United States Patent Application Publication US 2015/0315605 A1 - sequence listing, part 2

SEQ ID NO: 2465 - DNA, 3066 bp, Zea Mays
agtctttaaatagatgcagaccacagtgctgtgacgatcttgcggatggccgtcgttgacaccagctagtagcagccagcactagtcgctactagctagatagccatatcaccagcatgtggaggctgacggtggccgagggcggcggcccgtggctgcgctcgacgaacggcttcgtggggcgggcggtgtgggagttcgaccctgacctcggtacgccggaggagcgcgacgaggtagagagggtacgccaggagttctccgaccaccgcttccagaggagagagtcggccgacctcctcatgcgcatgcagtgcgcaaagcagaacagatctcaacgtcgtgatctgccacgcatcaagcttggggaggatgagcacgtcactgaagaaattgtactgagctccttgaggtcggctctggaccagttctcttcactgcaagccagcgatgggcactggcctggtgatttcagcgggattatgttcatcatgcctggtttgatatttgccttgtatgtcactggatcactgaatgttgtcatatcaccagaacatcggcatgagatttgccgctacatctacaaccaccagaacgaagatggtggatggggcacacttatcctgggttcgagcaccatgtttggcacatgctcaaactacatcaccttgaggcttctcggtgaggagccatacgccaacaacagtgtgttggctaaagggcgtgcttggattctatcccatggtggtgcaaccttgattcctcagtggggaaaaatatggctttcggtacttggattgtttgattggtcaggaaataatccaattttccctgaactatggtccattccccagtttcttccatttcatccagggaaattctggtgctttgcccgtatggtatatctaccaatggcttatctttatggcaagaaatttgttggaccaattacaccaactatattggcactaagagaggaaatctatgacactccttatggaaagattgactggagtgatgctcgtagtaaatgcgcaaaggaggacctcatctgtccacgcacactgttgcagaatgttatttggacttcactttataggtgtgtggaaccagtattgagcagttggcctatcaacaagctgagagagagagctctgggaaacatcatggagcatatccattatgaagatgagaacacacaatacctatgcatatgtcctgtgaataaggctctaaacatggtctgctgctgggtagaagatccaaattcagatgcattcaagcgtcaccttgcaaggataccagacttcttgtggatttcagaagatggcatgaaggcacaggtatatgatggctgccagagctgggagacatcattcataattcaagcattttgcgctacagatcttgttaatgactatggttcaactcttcagagagcctatgagtttatgaaaaattcacaggtcatgaggaaccatcctggtgaccaacgttattggcatcgccatagatcgaagggttcatggacactttcatctgcagacaatggatgggctgtatctgacactacaggagaagcacttaaggctgtactgttgctgtcaaagatctcaaacaaaaacaaccttgttggggatccaatagaaagagaaaggttgcatgacgctattgattgccttctatcttttgcgaacaaagatggcaccttttctacatatgagtgcaaaagaacttattcttggttagagattctaagtccttgtgagactttcccaaacattgttgtcgattacccttacccagaatgcacttcatcagtgctccaagctctgatattgttcaaagacttatatcctggttaccgcacagaagagatagaagcattagttagaagtgcagcaacgtttattgagaccaaacaacaagaagacggttcatgttgttttgcaggttaggtaattggggtatatgtttcacctacggggccttcttttcgattaaaggtttagtcgcttctggaagaacgtacaagaacagcccttgcatacggaaagcatgccacttcatattgtcgaagcagctcagtactggtggatggggagaaagtcatatcgctattgaaactcaggtgtatgtaaatctcaaaggtgaccgtgctcacgctgtgaataccgcctgggcaatgctcgctttaatttatgctggacagtttgaacgagatccaacgccattacatcgtgctgcaaaggaattgatcaacatgcaactggagacaggagagtttcctcagcaagagcatgtaggatgcttcaactgcagcctctacttcaattacccaagctaccgcaacttgttccccatctgggctctcggtgagtaccatcgtggccttcgtgcaaagaaagacaattgagtccgtgtgtgtatatatatagtacgtatagcattgtgaggaataaaacaggttgcgtcggtggtgagtgcgcaaaaacaagatgtgcttttatgtaggtgtaccacagtgtacaatgttggtcgttgttagactgtaaggctatcatgacgtgtatattgtaatatatatactacgtgattggtgtcctgtatggtcacggccatactcgctgcgtgcgtagagcgcatgattggcttcctgcgcgcgtagaagctaggctgccacgcgccggtgcgatgtaggatattttttcattcatttgctgcatccatggagaagccagggagggacgtttcccacgggccaggatggcgcgcgcctggcgacggtgagcgcgcgaaccaatcacacgttatagtgttccatatgtttcaaattatataagacgttttatcttctctaatgaacgagcagtctcctttcccaaaatatgttggtgagcataccaaattcagagcacgtggtacgctaaatcgcgatcatacgccagttcatcatcttcgtgtggagtgcagctgggaccatcacacaggtcgaacgttccatattacagtacatatatatccctttgttctactcttgtttagacatgttcagttaacatctcc

SEQ ID NO: 2466 - DNA, 3286 bp, Zea Mays
caccacttccagcagcattgcctgccactctgctggtctgtctgccctctgcccctgcatgcctgccccggaatgcgtcggttcacatgatccaattcttttgcgcgatccgcggggttctccgacgaccttttcatcgtccccccctccgcccctccccggttccgatcactctctcccagtcaacgcaccaccactaaataacgcactctctcccgagtccgatcccaactcaacccaaggcagtctcactgacagagtgtgtcgaccgacgacctgatctcggtcgatcgagacagagagagaacaacgacgagaatcatgcagagactgcccacggcaacggccgccggcgccggcatgacgtcgttgctggtggtgctgctgctcgtctcagtcttgccgggcgccagtggtgccgactctgggccgctcgacggcaggaagatggtgttcgccggggagaccgcaggagtacttgcccgctattccttcaacaaggacgcgaatgtcgaaacggcatcaccgccgccgccggcgttggccggttcggcggcgcagttccgtgggcaggcgcagctcccgcgcttcgccgcgccgcgccgctacgacctgcgcctgcgccccgacctcgtcacctgcacattctcgggcactgctgccgtcaccgtcgctgtctccgcgccaacccgcttcctcgtcctcaactctgctgacctctcaatcgacagcgcctccatccgtttccgggtacgtacgcgctgaccttactatctcgaaggaagaaaaatgttgccatatatttgtccttgccttggcgccaaatatcatctcggatgccggttgccggtccggggccggtttttgaaggatttggcgcctaaggaggtggtgtttttcgcggacgacgagatcctggtgctcggattctccaaggacctggtgctcggtgagggcgtgctcagtatgaagttcaacggcacgctcaacgaccagatgagggggttctaccggagcaagtaccagtataagggaaagatgaagaatatggcagtgacacaatttgagtctgtggatgctcggcggtgcttcccatgctgggatgagcctgcattcaaggtgattatagtactaaatgaaatatctaataatatgggtgtgctccttcaagtgtttcatctattaggcttttgtgctctgagcaacatctttgttgcacttaaaagaatacatatgtagtagcaagttctactccaacctgtagctttatgatctttccagtctcatgtacacaagcctaataaaatatcaactatttcttacatttccattttgttatgtctattttaggctaagttcaagctaacacttgaagtaaatgttgggatggtggcattgtccaatatgccaatagctaatcagacagttgctggtcctatcaggactgttcactatgtggaatcacctcttatgtctacttatttagtggctatagttattggtttgtttgaatatatagagggtgtaacaccagaagaaagcgttggcttcatatataagaaaatttgcctactcaaatgctaaaaccgaggacctttgggctgttcttgaagagaattctggtgaacctatcaagaatatgatgactacatggacaaagcaacaagggtaccctgttattaatgcaaagcttcaagggaattatctggaacttgaacaggcacagtttttgttagatgggtcctctggccccagaatgtggattgttcctataactgcagactgtggttcatattatacacagaaaaaaattctactgaaaggcaaaagtgataggctggatataagagacattgcttcacagtgtggtaaccaagagaagggtggaaacttttggattaagttgaacattaatcaaacaggattttatagagtccaatatgacgataaacttgcagctgcacttcaaaatgcattgcaggccaagaagctgtctgtaatggataaaattggcattgtggaagattcactggccttatctatggcctgcaaacaaaccttaacatcgttgctacgtttactgtatgcttaccgcgaggaggctgattacagtgttctttcacacataaatactgcgagtttaagtattgctaaaatatcggttgatgctactcctggattggtcggtgacatcaaacaacttctgatcaagcttcttctgccacctgctgtaaaattaggttgggacctcaagaatggtgagagccacctggactcgttgcttagaccagtgctcttggttgctcttgtcaaacttgggcatgataagagtataaatgagggagctaggcgtttcagtatctttgtacatgatcggaacacttctcttcttcgtcctgataccagaaaggctgcatacctagctgcaatgcagaatgtaactgcttcatacagatctgcttataatgatcttctgaaagtctacagggagtcagatgaagcagaggaaagggggcgtgtcctaagcacactgtgcttttgtaaggacgagaatattgttcttgaatcactgaatcttctttttaccaatgagtttcgcaagcaagatgcatattatgtacttcaaggtcttgacgtggagacgcgtgataccgcatgggtgtggttgaaggataactgggatcgtgtgacaaggaaatacggggacacacaagcaggaggttttatcagatacgtcgtcacattgttcacctccaacgagaaggcagcagagttctcccgcttcttcgcaacccgcaagaagcctgaattcgagagaacactaaagcagagccttgagaacgtccggatcagcgcaaggtggatccagggcatcaagagcgaaccgaggctcgctcaaacggtgcaggagctgctgcgtagaccctgatctgccctcggttgagttgcaggtgtggccggaaataagctggtcgtagatgacatacgctttgtacattctcagtgtgtaaaaggttacctctcttagtgttcatggcagcatgcaaatgtaagctattgggttgaatttttagcccaagcatgtgctagcagtgatctcgtgtctaatttgagaagcgtagaggtttaaaagaagattaaagtgcatttccgattcttaaatttgtgcggctgtgttaatctgatctataaacttttaaaatatatctcttaaaggctcaatatttgttttggtgtttgttacgtgcaaacggacccaaacagatccggtaagtccatctcccca

SEQ ID NO: 2467 - DNA, 7484 bp, Zea Mays
agaccctccaccacttccagcagcattgcctgccactctgctggtctgtctgccctctgcccctgcatgcctgccccggaatgcgtcggttcacatgatccaattcttttgcgcgatccgcggggttctccgacgaccttttcatcgtccccccctccgcccctccccggttccgatcactctctcccagtcaacgcaccaccactaaataacgcactctctcccgagtccgatcccaactcaacccaaggcagtctcactgacagagtgtgtcgaccgacgacctgatctcggtcgatcgagacagagagagaacaacgacgagaatcatgcagagactgcccacggcaacggccgccggcgccggcatgacgtcgttgctggtggtgctgctgctcgtctcagtcttgccgggcgccagtggtgccgactctgggccgctcgacggcaggaagatggtgttcgccggggagaccgcaggagtacttgcccgctattccttcaacaaggacgcgaatgtcgaaacggcatcaccgccgccgccggcgttggccggttcggcggcgcagttccgtgggcaggcgcagctcccgcgcttcgccgcgccgcgccgctacgacctgcgcctgcgccccgacctcgtcacctgcacattctcgggcactgctgccgtcaccgtcgctgtctccgcgccaacccgcttcctcgtcctcaactctgctgacctctcaatcgacagcgcctccatccgtttccgggatttggcgcctaaggaggtggtgtttttcgcggacgacgagatcctggtgctcggattctccaaggacctggtgctcggtgagggcgtgctcagtatgaagttcaacggcacgctcaacgaccagatgagggggttctaccggagcaagtaccagtataagggaaagatgaagaatatggcagtgacacaatttgagtctgtggatgctcggcggtgcttcccatgctgggatgagcctgcattcaaggctaagttcaagctaacacttgaagtaaatgttgggatggtggcattgtccaatatgccaatagctaatcagacagttgctggtcctatcaggactgttcactatgtggaatcacctcttatgtctacttatttagtggctatagttattggtttgtttgaatatatagagggtgtaacaccagaagttgcaaagtcgtatgtggagcatgccttggtcgtgctagtgttgagcatgtcgtgctgcagtggtcggtaggtgtgtccatgccattgagtacaacatagttggtagacagtataacaacttgtactttataatacctttgggtacacccaccaccataggcgtgattacaatgacacctgcacctgcacatctaatatagtggtattggttcgcttgcgccacgagcattgatgccttttgaccataacatcgaccataacattgctttaaatatgatgtacaagagccttctctcaacagctaggagtcacgtgattgatcgggtcagagtcgcacgaggcaccggtgtcgtcacacgacactgggctgtacaacatgtggccttcctgcctcgtgggtgtcttggagagttggaggatcctggcgtgagggcctccggtcctgcagggctccaggatctgccgcttctagggcttggcctaatggtttccaagctacatgtccaatgatgttgagctagcactagtcggacccactacaggtcttccttcatgtggcaaaatttctcggaggacgttttgccagtattaggggattgaaggaccggtgaggcgactagagggggggggtggtgaatgggagcccctaaaaatttctcaatcaagagcttgtggcttgattccccgacccaatccaacctccggggacaccaaaaacacttctcaaaagaatagctcaaccgcgaattgattgattgctcctaccaagttccagagaggaataagagctcaaatggacaaaagaacttgatttggaacccaaactttcaaaagaaactccaaagaacaccctcaaggaccaccagaagttctgggaaaagtccgaaaaaatcgtcgagaagtagtgccgctcgacaaaattttgtcagaacgacttcaaattttgcaggcatcaagatacgagggagtagaggtgaaccgtgaagtttgagcaagaaaggatcaaagtaccttgcgcgacagtgcccgatagaggagcggcagcgccgcttgggcaaaaatgcttagaacctcttcaaactttacagacaatttgcgtagagggaaggaagtctatccgtgaagtatgaacgtgagctactcaaaacttcaagcgcagattcaaaatctcagttgtgattggggttttgttggggttttctcaaatgaactcaaactgaggaagaatgaaacttgcccatgatctgctcaaacctgagacttaaaatgatcaagggatggtcttccaacagttggtgtccccaaaacaaactcccaacacaaagggaaagaacacaagagcaaaatgactcagaaacttcatccaagacaaaaactgagattgagagccaacaaaacctgtgggcgggactggccaccctttatcagattaaacaatgaagattacaaaatcacagacgaagagttcaaatccctgtggacctctagctacaaagctagagctattctaggaattgaaaacaaatactgctaaaactctaagccaaagagatggttataataacagcccacccatctatttatagagggttattactacttcctaaactacccctagatacgtagtgcctatccatttagccggggcgaaatggaccaactcctgggatattgatctgacggctacgcgctccacacgaagttgcttctcctcgacgcaccctccgtgatgacgccacatgccgcctccgattcctgtcggaaccgccaccaccgagttttgaggccgatctcggtcgaaaacccgccgtccgtagcgctggttgttttttcgaggatcagccactaaaccaccgtgagtattgcaccgcgtgcgcgtcccccacgtcctggacacgtgtcccgtcagtcctcgaccgcgccggcaacacgacctgctccaccacgtcctcgcgcaagtgcgttctcaggtgtcagccaccatggctagtcacccgacaatcctggtccctcggtcaagtcctagcgcggcaacgctcgttcttcaccgctcctggtccatcaacacgaacccgcatgtccttcaccttcggcatcgaccactgtccctgtgctccacacctgcacaccacaaaccgaaagacatggttgcacacacataatcacgcctcgtgtagtccacgactcaacctgagacactacacgttgacaatcactcatcatcatagttgtcaaggcgtcgccttagcgtcgcctaagcgctaaggcgaggcttaggtccaaggcgtcctgctcgccttactttcttggctagggcgtcgccctagcgcttcataggaagacaaggcattgccctgcagacgcgtttggccggattgtaaagttttccactccccaaacccttatgttcgctgctgttagctgtccacgtactagactcgcggttagggcttcacgtgagattcgggcggcggcggcggccccctaccgcgagcccgcaacctctccctacccggcgaagtcctcttgccctgctccctggtgaggctccgccccctcccccttccgcggtgagctccccctccccctcagctgatctgctctctgcctctttatccagttcagttgtttagttgttcccaattacctttgtaggtcagtgatggagagcacaggctctgctctcgcttctgtgcctgtggattcaaacactgaccctatggcagatccaaagcgcagagcgaagtctaatgatcctagatggaactatggatattggatagagattgggaatcgagataaggtcacatgcaacctttgcaagaccgtgacaatgggaggaatcaagaggttaaaagaacatcttgctggtggttatgcggacacattaatgtgttctaagactacaactgagattagaaaagaagtgaaggcatatttggacaagaacaagaggactaggcctactttccttgatgatgatgatcatgatggtcaggggcagcaaggcgaagaggattccaccacatctatgcaacaacctagctcggggacaactgccaaaaggaagagagctgcatttcagtttagaacaactgcacagccacagacatcaaacaaggaaaagaaaaagggaaaattgcaaccatgcttcgaagaactactgaacaagttgtggatgagaggcgctcctcagggtcacaccaccaaaccaccatggaagcatgcactaagtctaaggctgacaaagattatgtcaacaagcaatgagctatgtagttctatgagtgtggtgtaccttttaatgccattaattctagacagtttcacattgcttgtgaggccactgctcaacatggtactgaatatgttcctcctagtattcatgaggcatggaaggatccttagtggaatgagggagcaaacaggtggcatggacctagttagacctggagccactaggtttgtcacttgcttccttactttgaagagcctacataagcatagaaatcatttgaagggtgggaagggatgcatggaagtcaaacaagtagtcaaaaacagaggctgggaagggagtttatgacattgttctagcctcaatgttttggagcacagttgaagattgccttagagcttcagcaccacttcttattgtccttagggcgatcgatggtgatgagaagcttgccatggtggaagttgcaacactaatggatagtgcaaaagagaggataaagcttagctttacataaaaaaaagcaagctttgctaaaaagagtcttgagtattgttgagcgtcgatgggtgtcgcaaatggaccatccattgtatggtgctgcattgtatttgaatccgggaaaattctttgccattaaaaacaaaggagatgatatgtatgttgcagagctaagtagctactttaatgatgtgcttgaaagaatggaaccggatgatgctattcggtctaagattgatgaatttgcaatgcattctgaggaacaatgtagccctatcttctcaagcaaattggcacttgcaaacattgaaacaaaaagccctcgtttgcaaagcgtgtggctagtctatgtgcttcatcacccagttgtgagaggagttggagtacctttgaatttatgcacacaaaaaggaggaatcgattgctaacaaaaggctaaatgacttagtctttgtatcatacaaccggaagatgcaaaataggttccaaaagaggagggagacgggtggcacaagttatgacccattagtgcttgacgattttgattgggacaatgagtgggtacactcatcggttgtacatgctggtagggatgatgatgagcataacttgacatgggaacaagttgatgaagccattagagcatctgagtcccttcgaggccgcaactttcaagacaagctcatgagtaatctagctgtaaattctttctttccgcaatggaatatctggacacaatttcttgatgacacaaccgctggtctcaaattggattcacttgaagagtctcaccctattgagaaagcgttggcttcatatataagaaaatttgcctactcaaatgctaaaaccgaggacctttgggctgttcttgaagagaattctggtgaacctatcaagaatatgatgactacatggacaaagcaacaagggtaccctgttattaatgcaaagcttcaagggaattatctggaacttgaacaggcacagtttttgttagatgggtcctctggccccagaatgtggattgttcctataactgcagactgtggttcatattatacacagaaaaaaattctactgaaaggcaaaagtgataggctggatataagagacattgcttcacagtgtggtaaccaagagaagggtggaaacttttggattaagttgaacattaatcaaacaggattttatagagtccaatatgacgataaacttgcagctgcacttcaaaatgcattgcaggccaagaagctgtctgtaatggataaaattggcattgtggaagattcactggccttatctatggcctgcaaacaaaccttaacatcgttgctacgtttactgtatgcttaccgcgaggaggctgattacagtgttctttcacacataaatactgcgagtttaagtattgctaaaatatcggttgatgctactcctggattggtcggtgacatcaaacaacttctgatcaagcttcttctgccacctgctgtaaaattaggttgggacctcaagaatggtgagagccacctggactcgttgcttagaccagtgctcttggttgctcttgtcaaacttgggcatgataagagtataaatgagggagctaggcgtttcagtatctttgtacatgatcggaacacttctcttcttcgtcctgataccagaaaggctgcatacctagctgcaatgcagaatgtaactgcttcatacagatctgcttataatgatcttctgaaagtctacagggagtcagatgaagcagaggaaagggggcgtgtcctaagcacactgtgcttttgtaaggacgagaatattgttcttgaatcactgaatcttctttttaccaatgagtttcgcaagcaagatgcatattatgtacttcaaggtcttgacgtggagacgcgtgataccgcatgggtgtggttgaaggataactgggatcgtgtgacaaggaaatacggggacacacaagcaggaggttttatcagatacgtcgtcacattgttcacctccaacgagaaggcagcagagttctcccgcttcttcgcaacccgcaagaagcctgaattcgagagaacactaaagcagagccttgagaacgtccggatcagcgcaaggtggatccagggcatcaagagcgaaccgaggctcgctcaaacggtgcaggagctgctgcgtagaccctgatctgccctcggttgagttgcaggtgtggccggaaataagctggtcgtagatgacatacgctttgtacattctcagtgtgtaaaaggttacctctcttagtgttcatggcagcatgcaaatgtaagctattgggttgaatttttagcccaagcatgtgctagcagtgatctcgtgtctaatttgagaagcgtagaggtttaaaagaagattaaagtgcatttccgattcttaaatttgtgcggctgtgttaatctgatctataaacttttaaaatatatctcttaaaggctcaatatttgttttggtgtttgttacgtgcaaacggacccaaacagatccggtaagtccatctcccca

SEQ ID NO: 2468 - DNA, 4509 bp, Zea Mays
gcgtgcttctctcactgcttgtgactgagcgctagatctccgctgcttttcgtgcttgcttgtgttgttcttggctaccggcaaagtttcccgatccctgcatctgccttttccagatttggtacggattaggcccccgttctcgaactccttcctgtgcctgatgagaattgagatagtgggcggccaaggaagcgaagtttctcgcactccacctgttgaatttaccaacttggtatgctggagtgtaaggataagagcagacccaattgcttcacagctcttgggttcttagtgccgactgtagcagcagcagatctggggcgagcagcgaaggcgttcatcagatgttatccagtgagcagccttcaggcccctcatgttccttcaagtctactggcccgggtgtgagcactgatccggcaacctccgtggccgaggggccgccgagccaggatcccagagatctggtccaaccttatcccaagttctccataagagattatgtgtttgcttcaagaagcaaaggcatcaagagaagctggcctttccatccacattcattgcagctttgcctagagcgcggtgtgaaggatccattgcctccatttgagtctcccgatttgatccggtcacagccattaaatatttccactgactttgagcaatctgctgcttgcttagaactcaatagtgttggtctggtgaagaatagagatgctagttccttaaacgagtatacaggcaatatcaacttccagtcatgccaaccagtagatgagtcacttggacctttgccatacacatcgccagaggatgggaaatctggtatcaaccaagtgggaagtacaaatgaatcagatcatcctgatgaggttataccaatagatctacaagataatagctgtacaaaagcaagtcagcaaattgaggttgatgtgcccttgcggcggttgagaaatcttgacttatcatgcgagccatctgaaaagaagtgcaaatttgtagtcaagttaggtgccacgacggatattcggcgagcagaggatatagcatctaactctagctcagtttcagatccgatggcttcaaagacttgtcctgtttgcaaagtatttgcttcgacttcaaacaccacattgaatgcccacatagatcagtgcctttctgcagagtctaatactgagcttgttgaaacggtccttgtgaaacctaaagtgaagccaaggaagaagcgattgatggtggacatatacaagactgctcttccatgcacacttgaggatcttgatcagaggaatggcactaattgggcagttgagttgtctatgtctccagtgagcagagaggtttgcactgagaaccgaagcccagaaatggtatcatttgacagaagagatgatgaaagagaaggagatgtctatgttgattctaacggcataaaaattagaattttgtccaagtgtaatgatgtacctttggtgttgagggatgaccttggttcgaggaaagttgcgaagcatggaactggaaaaggtatactgatgagcaaaaagatgctgaagtcaaagcttttgaagaataagaagctcaagatgcatggaaagaagtacaacaagacaagccctttgaactcccaggttcaagcatatccacatgatgatattaacgaggaaacctccgaggaggagtggcatgcgcggaatccttttgaaagcaccagcaattgttgttccaggactatgcagcagtgggtgtgctccaaacgctcagatatcgccaagagtttaagcagaaaccatagtggtaaagcatttgataaagtgatacctggagcacagaaatcggataggaacaacatgcttggctttaatgattctcaagttccagaaagtcctgctggggcgttttcttcggagtcaccagaatacatggccacaacttcagaagccattggtgttgagcagagcaatggtccttcaaaagtgcttagatcgattcctacatggtcttcaaaaactcaccgtcttcagagcagtgtcatgccaaaaacacctagatcagctgctgctcttgcaaagagaaaaattaaggagattgggaggagagaagctaccaaattagataattacaatatagtgaggaatcccacttcagtgaaaagatctgaaactaggactctttccttcactgcagggccaagcaatggatcaaacaggttagcatctacctcaaagaagatccggaagcatcgatctctgttgaggaccggcaagcgtgcattttcaccttttagtactagagtagttcatggttttggtgaagagcgtgaacttgataccagacatgtaaataagaaattccggattactagtaatgaggttcccaagaagtttttgaagcatactgaagaggatactgcagataatgacttctctcttgcaagtgacatgacagtatcaggacaacagaatgatcaatatgatgttgcacaggaaacagagggtacacaaatggattgtgaaggtgaagatgctgaaactgatgtgccatatgattctgtatccagaagtgatcctgctgactgttgcaaccaaataagtgatgtttctctgagtcctgaaaataacagaacaacagatgatgatgttttagttgaaggctatagtgtagctgtggaggatccaaactccagtgagaaattagcacatgggcatgaatccaactgtgctaccaataatgaaatggatgaatggcagatggatccgacttcaacaaaggaatctagtccctgcttagttagtaacagggacatgggtcctggaggtcctcaggataactcatcaataacatcaaatggagaaaactttaatcaagagcatggtctgccactcggacaggactcactagattctcctgtatcaactgcctcaactatgtcccctccagctgctttgaaggattcaaggattaacgatgaagaacctggcccatctactggtagaactgttgaagagcaaatcactgggtgcttgaatcaagaagccaagtcaatacctatggccagagaaggtgaacttcccaaagagaagccttttcgatgttcttgccaggagaacatttccagagagtctcatcaaagtgttgttgccagaccaacgctgaattttactggaaagcaggttccgcaattgcacattggttcgagggcatcatcatctttcagcatgtaccaaagaaccagcgcaaagcccaacccctgcttagattcacatgaacatctttcagcggctaaggttgcagcggaatctgctgtcagcctcccttcttactcaacagattgcataagcccctcattacaaactcagcttccttcgccatcaaatcctatcttgaggctgatgggtaaggatttgatggtgatgaacaacgaagagagtgtgcatcctcaagcaccaagttcagactacatcttgagagggaattacgaggcacctgttggttttatgcctccaagctaccaacatctcggtaattctggatttatcagcatgccaccaaccgcagccagtcaccagattcctctaccaagtgttcaagctagcggccttgttgctcctccgttgcacagcgtttccatgatgcaacctgaacatcattcccagcagaagtcctacagaaatattatgcctgccatgcatcatccaacctacatgatgaaagaagtgattgtgatcaaggactctcctgagcgtagtagaactgagccacaagctagcatgcttttcccccctgctccacctcccgcactctcgataccaaacaatacgccaccacgtccattttactgccttccaccgcaaatcccaatcttgccaagggagagggctgctggatccatgcctgtgtacgcaaactttggcgcattggctggtgtcagtccatcaagtcaagaaagccaaacgggagtaaccaatccttacatgccgaatccgttcttcgtccagtcccgaactggttacatgaaccacccgccagtgtactactcacagaatctggggtgatgatttctcagtagctcaaatgaccagaactccatttaacttgccggtcgtcgctgtcgaagtttgtgggggatgagagtttcgtgatgggtcaaaaacatgctgagatcaatgaacctgcatgagatgtgtctgactttcatgaggattttcacataggttgctttagatttttccccctttctttctcccttaaagctacagcatgtttgccgtcaaaagtatcttaattactctctgcaaagctgcagtagtaaattacagtgtgcaattcccaatagctctgcaaaggaatatatctcagtatttatcgaaaaagctggcatttgatattcccagttgcatgtttatagtctgatgtctgttctttttacacactgttctgccggtgtttgctgcctcagcagtgttaactcgtgatagttaaggggtgtttggttccttt

SEQ ID NO: 2469 - DNA, 2838 bp, Zea Mays
gtcgtctccccgttcgaggggatcaggggaattggacgggcttgcttcgactccacctcgcctccgtcggcgtctcatctcatgctgggactctggtggggtggggattgacttcgctatagcccaatccagtcagcagcagcttcccgccgccccatgcctcgtcgcggccggtggcgatgggcgacgtcccagtcccttctccagctccccctgtttccggcatcgatatgaccccacgccgccgccgtgagccctccgagccccgcagcgacagcgactgggacgctggatccagtcgcgagggctccccggacctcctccgccgcgcgcccgccgtccagatctcgcgcgcctcctcttcctcgtcctcctggctccgcgagatcgagcgcgaccgtgtgcgcctcgtcagggagtgggtccacatggctgcccgcgaccgtgacgacgacaccggacccccaccgtcccccgtccatgaacacgctcgcagggacgcccccaggatccgcggccgccaagcgcgcctcgagctcgtcatgcgcatggccgccgaccgccaagccgagctccaccgcctctcgcagcaccgcgccgtctctgactttccgcatcgcaacagaatccatgcgctgctccggggtcggtttctgcgcaacagcggtttaccagaggagaggaggcccccatctgtggccgcaagggagcttggccagctgcggcaaaggcatcctgtctctggtttgagagaagagttccgcttcagattggagaatcttgtccgtggtcaagcagatagccaagtggatgcttcttcagttcacgatgttgagttatctacaaatgatcgttctgaattaaggcctcctgaaactactcaggagagacatgagcggacaagtgagattgtcagtcttcaacaaatcgacagtacggcaatgacatcaggatttgaaagtggcagccctaacattgctgaagtcttctgcgggtctcatagccaagcagaaagtcaggatgatttggaacatgagagaagagactggcaacgattttcccatgctgtgattggagaggaatctgaaagaacttggcgtgaaaatgcagacaacatgtcatctcatgaggggacagcagttgaagatgataataacgatcatcttccagaagcaaatgaagagtcaaccagtgttgatcaccttcctgaaggacttgaagggtctatcactgatggtagtcttcctgaagcgcaagaagatcagcatgacagtgatcatcttcctgcagtgcttgaagagctgcatggaaataatcactttcaggaatcacatggggaatggagaagagatgatcgtcctgttgaagtctatgatgagtggcagagtgatgatcatctccctgaagtaaatgaagagtggcataatgatgatgagtctaatgatactgcagacaattggcatgataataattctgaccaaccaattgatcatgatgctgctcttattagaagagctaatactttcatccctggagatgatgataatgtgtacagcacagaattgagggaacttctaagcagaaggagcgtttctaatcttcttcacagtgcttttcgtgaaaacttggatcgacttatccggtcatatgtggaacggcaaggtcgtggtcctctcccttgggatctggaaggaacaacccctgcccctccatcaccagttcaaattcaggaggagcaaagagatgatgaggaccaggaactgcagcgcactgtcaacaggcctcctttagtgataccacccccacctatgcctcctcgtcagccactttggcattcagagttgcatcgtactaattggatcagacaaaacattcatcgttcatcttctgatattgctgtgtttatagtaggctaatgcactcaactcttcgatttatagaatgggaggctatcaatgatttaagagctgatatggctagacttcagcaaggcatgagccatatgcaaaggatgttggaagcttgcatggatatgcagctagagttgcagcgttctgtaaggcaagaagtatcagcagccttgaatcgtttcattggggagcaaggtggtgaaagtaaagaaataatcgatgatggatcgaaatggataaatgtgagaaaagggacctgctgcatatgctgtgagactccgattgactcccttctgtacagatgtgggcacatgtgcacttgctcgaaatgcgcaaacgaattggttcgaggtggagggaaatgcccgttgtgccgcgcacccataatcgaggtcatccgagcatacttcatcatgtagatacaaaaggaagacagcaagaagatagaagaggcccaaattgtttttggtctgtgtggagtcgttagcgggttgtgtattcaattttgttcattctctctaatgcgtttggttaagtttttttccggcttcatttcgttttggtctgcttgccctattgtaagtaatgtacggttttgggtgtggcggcaggacgggaaggtggtcttctctcattaggacttgggtcactgctaattatgttccacaacgactaatggggttggaggttgtcgaaacacgagatgaggaaacttttggtatctttttgttcgtgtagcaccagcaaagtgcggcttggtcgcttcagtgtttcgtgtgattttgttgttggtcttggctatgtggtcatgatattttaggcttctagtttgcagatggatgtaaaagtggtactttgttgtcatgggcgatgctatttcctggatgtttgctttttctttccacaatagtaaaacagatcattttta

SEQ ID NO: 2470 - DNA, 1907 bp, Zea Mays
cacacttttaaactatttacccagagaaactaggggcaggcagacactctagacgacgattgacgaggcagccataggtgttgttgttgtcccggcggcgcctgcagtgccgtattcgtataagagaagagacccccaccggctgctccacccaacgtaacagagaatcgccgcccgccaggccaggcgatagctagcgcgcggcggccatcgccaacgcccggcccggccccgggcagctcggctcctcacgcgcgcgtttgcagcgtgatcgtcgagcgccgccacgtcgaacgaagcttagctagctagctcaccggcaggagcggagctacccctcgagtactcgcgcgcgcatgggaaacgccctcgggtgcgcggggctcggcgagcggctggcggccggcgccagggacggcgacgcggcggaggtgcggcggctgctggacgccaacccggggctcgcccgctgcgccgccttcggcagcctcagctcgccgctccacctcgccgccgccaaaggccaccacgagatcgctgcgttgctgctggagaacggagcggacgtgaacggcaggaacatctacggccagacggcgctgatgcaggcgtgccggttcggccactgggaggtggttcagacgctgctgctgttcagatgcaacgtgtccaaggcggacagcctgagcggcaggacggcgctgcacgtggcggcggcgggcggccacgtcaggtgcgcgcgcctgctgctcgcgggcgccggcagcggcaggagcaagctcgtgaaccgggcggccagcggcggcggcggcggcgtgacggcgctgcacctggcggcgctgcacgggcacgccgactgcgtgcacctgctggtggacgagcgcgccgacgtcgccgcgcgcacgctgccctgcgccgcgccgcccatggcgtccgtcggcgccgggagcgcgccgctgcactacgcggccgccggcggcgaggtcaagtgctgccagatcctcgtgtcgcgcggggcggacagggccgccgtcaactgcaacggtcaggtggctcccggtggacgtggccaggacgtgggggtgccactggctggagcacgtcctgtcgcccaagtctctgctgcccatccccaggttcccgccctccgcatacctctcgtcgccgctcgccagcgtcatcaccctcgcgagggattgcggcctggctctgaacatgtcgtcgctgccaatggacaccatggacggcggcgccgacgacggcgacgcatgcgcagtctgcctcgaaagaccctgcaacgtcgctgccgaagtgtgcgggcacgagctgtgcgtcaagtgcgcgctggacctgtgctcggtgatcaggtcctacgacgcgccggggatcgccggcaccatcccgtgcccgctctgccggagcggcatcgcctcgttcaggagacgggccgcggcggccgaggccgagcctggcgccaatgccggcgaccggcaggcgtcgtccagcccacacaagaagcggagcacggagtccgaccaggacggcctccccctcgtctgcgctcctcccgccgtcatgtcgtcctgatcagcgctgcagacatagaaatagaagctgctgtgctgcatcgtctcttcgtcggtagaaatctgcagggtacagcagcagcatgggtggatcacaggatgcatagaagctagacagacagattgtttggttctgtttgctgatgctcgccttcggcatcggtggattttattttattttcattttattttttatggtgattcacatggcattagctagtctgctagtgtaacacgttgatttgctgtagaaaaagatggaacattcttttgctgtaaaaaaaatggggttggttggtttcgggcgttttgactcatgat

SEQ ID NO: 2471 - DNA, 4021 bp, Zea Mays
cgcgtcctcctgtcgtgtcggatccgagcaaaccactgcgcaccttcccttcacttcccccacagcgcgcgaggcgcaacttccggctatgtgcttgcccacgcctgaagtcgccgtcacgtccttacgcgtcaacggcacggccccacgcgggtgagagaggagagccccccacgcacccgcgtgaatatatactcgcgcggccacggcagggttggtgggagagcgaattcgagctggtcgaatccggcagccgagcgagatggagagctatctcaaggagaacttcgggggcgtgcaggccaagcactcgtcggacgaggcgctgagacgatggcgcaaggtcgtcggcctcgtcaagaaccccaagcgccgcttccgcttcacggccaacctcgacaagcgcaacgaggccaccgccatgaagcgaaataaccatgagaagctacgtgttgccgtgcttgtttcaaaggctgcacttcagttcattcacagcgttgctccgtcgagtgagtacaaggtccctgccgatgtcaaggcggctggtttcggcatctgcgctgaagagctgagctcgattgtcgaggggcatgatgtgaagaagctgaaatctcatggtggcgtgcagggcctcgcgtccaagctatccacttcggagtctgacggcctcaccacgtccgcggacaagctagcgacccggcgggatgtttttggcgtcaacaagtttgcggaggcggagtcccgtggcttcttggtcttcgtctgggaggcgttgcaggacatgacactcatgatccttgccgcgtgcgcgttcttctcgctcatcgtcggtatcgccacggagggatggcccaagggcgcacacgacggcctcggcattgtggccagcatcctgctggtcgtgttcgtcacggcgtcaagcgactaccgccaatccctgcagttcaaggaccttgacaaggagaagaagaagatcacggttcaggtcacccggagcggctacaggcagaagctctcaatatatgaacttctcgtcggcgacatcgttcacctctccattggtgatcaggtgccggctgacgggctgttcatgtcaggcttctcgcttctgatcaacgagtcgagcttgaccggagagagtgagccagttgccgtcaacgttgagtacccattccttttgtcagggacgaaggtgcaggacggttcttgcaaaatgctcgtcacgacagtcggcatgaggactcagtgggggaagctgatggccactctcagcgaaggtggtgatgacgagacaccattgcaggtcaagctgaatggtgtggccaccatcatcggtaagataggacttatctttgcagtggtcacattcgcagtgctcacccaaagcctgttccggcgcaagatcattgatggtacgtacttgagctggactggagatgacgcattggagctgcttgagttcttcgccattgctgtcaccatcgtcgttgtggcagtacctgaagggctaccgctggccgtgacactgagccttgcatttgcaatgaagaagatgatgaacgacaaggcactcgtccggcaccttgcagcctgcgagaccatgggctcagcgacctccatttgcagtgacaagacaggcactctcacaacgaaccacatgaccgttgtcaaagcctgcatctgtggtaagatcaaagaagtggatggtgtttcggatatcaagaacctgttctctgaactcccagactctgtcatggcgattctctcccagtccatattcaacaacactgggggagacgttgtcttgaaccaggatggcaaacgtgaaatactggggacacctactgagacagcgattctagagttcgggctgtcacttggtggagactttttggcggtgcgcaaagcaagcactcttgtaaaggtggagccgttcaactctgccaagaagagaatgggagtggtaatccagctcccagagggtgcactgcgagcacactgcaaaggtgcatcagagatcatactggcatcttgcagcaagtacctgaatgaagatggcaatgtcatccccctggatgcaggaaccattgatcacttgaaggccacgatcgatagcttcgcgaacgaggcacttcgcactctctgtcttgcctacatagaagttgaggatgggttctcagtcaatgatcagatcccaacggatgggtacacctgcattggcattgtggggatcaaagacccagtgcggcctggagtgaaggaatcagttgctatctgcaggtcggcaggtattacagtcaggatggtcacaggtgacaacatcaacacggcaaaggcaattgcccgggaatgcggcattttaactgaaggtggcattgccatagaaggcccagatttcagaaccaagagtgaagaagagcttactcaactgataccaaagatacaggtgatggcaagatcttcaccactggataagcatacccttgtcaagcatcttcgaactaaactctacgaagttgtggctgtgactggtgacggaacaaacgatgcacctgctcttcatgaggctgatattgggcttgcaatgggcattgctggaaccgaggtaatttcgagattttccttatgtttctaaaaataactagccatgtcattccaattatcacactactgctgatatcttgtagtaatcaccgatatcaaacatcttggaaatttattttttagctatatttagtattgtgatttttgctctttcactcttttatatggctgtaacatctatgagatctagatacccatgaccatgagtaacaatcaattacatgatatctcgagttatttgctatttactcccattttgaatttgactctttaacatgttcttaaaggtggccaaagagagtgctgacgtcatcattcttgatgacaacttctccacaattgtcactgttgcaaaatggggtcgatcagtttacatcaacattcagaagtttgtgcagtttcagctcactgtcaatgtggttgctctggtggtaaacttctcctcagcttgcctgacagggagtgctcctctcactgctgtgcaattgctctgggtcaacatgatcatggatacactgggtgcgctggcattggcgacagaacccccaaacaatgaactgatgaagagaacacctgttggaaggaaaggaaacttcatcagtaacattatgtggagaaacatcctgggacaggccttgtaccagttccttgtaatttggtacctacagacagagggaaagtggctgtttggaatcaagggcgataactccgatctagtcttgaacacactgatcttcaattgcttcgtgttctgccaggtattcaatgaggtgagctcaagggagatggagaggataaatgtatttgaaggcattctaaacaacaacgtgttcattgctgtcctcggcagcaccgtcatcttccagttcatcataatacagttcctcggcgatttcgcaaacactacccctcttacgctcaaccagtggatcgcatgtgtttttatcggtttcataggcatgcctatcgcagctattgtgaagatgatcccagttggatctacgtagtgaattagagctaatttcgtccagaaactgaagttggacatggctacagtctgatcatggcaatggagttttctgggttgccatttgtgtacaagatagatctgtgctatgcttctattctggtcaatctttgcatcttttatcctgtagtatcttatcagccaaggttgtggactcgattgttagaaaatgccttgggctcttgtagctgttctttgctttatattttttcttggtgcttttgctaggaacattggaggctggagctgtatatgacaatcttgttgttcactcgaatgtgcttgttttgacacctatcattttgcttcatctgataagtaatgtttcagtcagaagttccagagaagggtggaatcttaatgtttctgatttgccaagaaaacggaccc

SEQ ID NO: 2472 - DNA, 1196 bp, Zea Mays
ctgctctccacctgacctgctttcgttttcgtatatgtgccagcagtccagcagcaccaacttgtccacactcgacactgtgttgattgagaccttagctctagcggtttcgtttccggatggaggattcggtgggcgcggatgagaggagggagcagagcgagacgatgccgcacaaaaaggcgcgccaagaagtagcggaggccggtggtgttggcggcggcggcggcggcaagccagctgaggagggcgggttcctgagcgctgtggcgtccaagatcggcgcaacgatgtccggggccaatggcgggagcggcggcgaggtcggtgcggccatggcgtccgacggcgaggagggaaagagggacggtgacggcgagccaggagcaatggaaacagaggaggaggtgaaagatcaggatgtggcaggtggcgagcaagccgggattctgagcgccatggccaccaagatcgccatggccatgcctggtgcaaacggtgacgacagccatggcggcagcggggacgacgctaagtcgagcaatggcgaagcggcccgtggcggcagtaacggtggagagaagcaggggagtgaatccaacggtggcgggatacttagcgctgtggcttccaggatcggcgtggccgtgtccggcgccaacggggaccgcagcggcagcgctgaggatggtgccaagacgagcgctggcgacgctggtcacggtagcaagggcgaggagaaggggcgtggtgtgaacggtggtagattagtcgagcagatcatttccaatctgccctcagatgatcaggcgcctgatgccgatgaagcttccttgctcatcgccattatcgaagattagctccatgttccgaaggctctctaggtcgtcctcagcgccatgatcaaatcatcagctgagccggagactgaaaacaataaagaaaagcaagcagctggtcatagtaaacatcatgtagcgaggcttagcagattgggtttttttttccgttagaatcagtccacatgtccttgacacgggctagatttgttctaggattatttttccagtagtaagccatgtgtccatggacagtccactgcgcgacgtctaatgtaacaacatcatcaaggttcttttgactatcccataagaaaccattccttgagacaaccgatattgtgagttgataaccat

SEQ ID NO: 2473 - DNA, 1379 bp, Zea Mays
ctgctctccacctgacctgctttcgttttcgtatatgtgccagcagtccagcagcaccaacttgtccacactcgacactgtgttgattgagaccttagctctagcggtttcgtttccggatggaggattcggtgggcgcggatgagaggagggagcagagcgagacgatgccgcacaaaaaggcgcgccaagaagtagcggaggccggtggtgttggcggcggcggcggcggcaagccagctgaggagggcgggttcctgagcgctgtggcgtccaagatcggcgcaacgatgtccggggccaatggcgggagcggcggcgaggtcggtgcggccatggcgtccgacggcgaggagggaaagagggacggtgacggcgagccaggtgaggagggcgggttcctgagcgccgtggcgtccaagatcggcgcggcgatgtccggcgctaacggtggcagcggcggcggtggcaatgcggccgcggcgtctggcggcgaggacaaggaggcggacggttttaccggcggcgtaatcttccggaagctgctgcacagctcgccccctgcgccgccgcatgtgtcagaggaggaggtgaaagatcaggatgtggcaggtggcgagcaagccgggattctgagcgccatggccaccaagatcgccatggccatgcctggtgcaaacggtgacgacagccatggcggcagcggggacgacgctaagtcgagcaatggcgaagcggcccgtggcggcagtaacggtggagagaagcaggggagtgaatccaacggtggcgggatacttagcgctgtggcttccaggatcggcgtggccgtgtccggcgccaacggggaccgcagcggcagcgctgaggatggtgccaagacgagcgctggcgacgctggtcacggtagcaagggcgaggagaaggggcgtggtgtgaacggtggtagattagtcgagcagatcatttccaatctgccctcagatgatcaggcgcctgatgccgatgaagcttccttgctcatcgccattatcgaagattagctccatgttccgaaggctctctaggtcgtcctcagcgccatgatcaaatcatcagctgagccggagactgaaaacaataaagaaaagcaagcagctggtcatagtaaacatcatgtagcgaggcttagcagattgggtttttttttccgttagaatcagtccacatgtccttgacacgggctagatttgttctaggattatttttccagtagtaagccatgtgtccatggacagtccactgcgcgacgtctaatgtaacaacatcatcaaggttcttttgactatcccataagaaaccattccttgagacaaccgatattgtgagttgataaccat

SEQ ID NO: 2474 - DNA, 3580 bp, Zea Mays
ccgctgccgccgccgtcagcgactgcagccgccgctaatcccagcgtgttctccgtctccggctcgaactccgtcgcctcccgccggctcccgcctctcaacgccgccttctcttctccgtagcgctgctatcaaacaccttgtgctgtcaacatttatgagtgcaaggcagtattgctaagagtatcttgccatggcatctcctgcttccgtcaccaacctcggaagcaatgggaggtctggcccgctcccggctgcagctgcaaggagggcgcagttggtcacaaggatcagattcacggggttcgatggcataaggcgatggcagtatgagcctgggaggctttgcaggtgtatggtcgtcactaatctgattgaggagaaggttgttcagttctcgtcaagagggagtgtcagtgtgaaagctgatgatgacaatgatctgcttctgaagccgccacagaagccagtccggtcaaatggacccccggagagcatgaaaacagcatcactgccggatcagaagccagcaggggcaactttagacgacagagagaaggtcagagagtcactggacgctgtattggagaaagcagagaagcttgaggcctccagctttggtaatgcagatggtggcaaccttggttcaaggcagagtaatgtttccatgagtaatggtccaggaccgacagcagtggaggaaggtggtaattcaaggaagacaaaaacactaaagagtgtatggcggaaggggaaccctgtgccaactgtacgtaaggtcattagagagcaaccaagaactgaaacaaggagtcagtctatacctgtggctaaaccttcagtgtcatctgcatctaagccttcccctctgctactatctaaaccttctgtagcacagcctcctcgtcggcctatcaagtctgatacatcaaatgagaaaaaaggacccatccttattgataaatttgcttccaagagggcagcagttgatccgattgtacctgaggaattgttagaccctctaaaaccagtacgaggcccaccagcaaaagtcagagttgatcgtcgtaaaaaaccagacacacaagctggttccagacgacgtatgtccaatgatgatggattagttgatgaggatactactgacgtgccaatttctggtgttccagtgcgcaagggtaggaggtggagcaaggcaaaacgccgcgctgcaaggctagaggctatgcaagctgaagagccagtcagagttgagatccttgaagttggtgaagaaggtatgctgattgaggacttggcatatgagttggcaattggtgaatcagaaattttacgattcttatcggtgagaggagttatgcttgacaatgttcagactctagataaagatttggttaagatggtttgcatggaatatgatgttgaagtactagaaagtggtcctgtgaaagtggaggaaatggctaagaagaaggagttccttgatgatgaagatttggataaattggaagtgaggcctcccattgtgactatcatgggccatgttgatcatgggaagacaactctgttggattatatacgcaagagcaagttggtggcatctgaagctggtggtataacacaagggattggagcatatcaggttcttttaccagtagatggaaaccatcaagcctgtgtttttctggatactccaggacatgaggcgtttggtgcaatgagagctcgaggagctagagtaaccgatatctgtattgttgttgttgctgcggatgatggtgttcggccacaaacaagtgaggcaattgcacatgcaagggcagcaggggtgccaattataatagcaataaacaagatagacaaggagggagctaatgcagaacgagttatgcaagaactttcccaaattgggataatgccagaaatgtggggtggtgataccccaatggtcgagataagtgctcttactggggataatgttgatgaacttctggaaactgtcatgcttgttgcagagttgcaagaattaaaggcaaatccacataggaatgcgaagggcactgttattgaagcatgccttgacaaggccaaagggcctcttgctaccttagttgttcagaatggaaccctaaacaaagctgatattattgtgtgtggtgaagcttatggaaagatccgtgcattgtatgatgactgtgggaagctcgttgacaaagcaggaccatccaatgcagtgcaggttattggcctcaataacgttccccttgccggtgatgaatttgaggttgttgacaaccttgatgttgcacgtgaaagggcgaatgggcgtgctgaagcactgcgcatagaaaggatatctgcaaaagctggggaaggaaaagtcacactctcagctattgcagcatcggtttcatctgcgaagcaagttggaattgatacacatgagctaaatgttatccttaaagttgattttcagggttcaatcgaggctattaggcaagccatccaaactcttccacaagaaaatgtctctctgagattcctccttcaaggtccaggagatgtgagtgttagtgatgttgatctggctgttgcttcggaaggaattatatttggctttaatgtcagagcaccaggatcagttaaaaactatgctaagaagaaaggtgttgaaattcggatgtacaaagtgatctatgatttgattgatgatttacggaaggccatggaaggtcttctcgaacccgctgaggaggaagtaccaattggttcggcaaaagttcgagctgtctttagtagtggcagtggaaaggtggccggatgcatgattacaacaggaaaagttgttcaagattgtaatgtgcgggttcttcgtaaagggaaagaagtatatgtgggttcgcttgattccttgagaagggtgaaagaaactgtgaaggaggttggtgctgggctagagtgtggtattggggtagatgacttcgatgaatgggaggaaggtgacatcatagaggcattcaataccgtgaataaggcaagaaccctcgaggaggcctctgctaccgtgactgccgcactcaaggatgcaggggtccagctgtagaattggcaacacgctgatactcttttttattaatgctgttgtgagctggaccggtggaccgtttccctgattccttcggtggtggctgaagctgaatggtgagctgctggagagtggagacgtggagtggtggccggtgggcgcctgggcggtggctgccggctggtgcagactgtgcacttgtgcagtgcagtggcgctaatatattgtgtgtggctgtggaagatgcatgtgtggatcggctgtctgtagtgagatggaagatactgtatatagcatatcaaaccatatattcatcgtatatacattaattattgatattgaattttgtcggtcaagcgtatgggccggccaagccaaactgtatttgccgaaagccgcttttgaatcgccgggagtggcaaggcagctagttggggtttcacacgcagcaggtttagattagaagtttgcacggttgcaaaggtttggtttgca

SEQ ID NO: 2475 - DNA, 3660 bp, Zea Mays
ggctctctctctccggcgtgccaaccttatcaccacccattcgagcttgctgcggctgcccgctgcccccacgatcccgatagttttccgaaaaaagacacttccccaatccgtagtggttcacgtcctggttcctcgccggcggcaaccgcgctggacgaggtttcatctgcgcttcgccggcggcaaccgcgctggacgaggtagcgctgctatcaaacaccttgtgctgtcaacatttatgagtgcaaggcagtattgctaagagtatcttgccatggcatctcctgcttccgtcaccaacctcggaagcaatgggaggtctggcccgctcccggctgcagctgcaaggagggcgcagttggtcacaaggatcagattcacggggttcgatggcataaggcgatggcagtatgagcctgggaggctttgcaggtgtatggtcgtcactaatctgattgaggagaaggttgttcagttctcgtcaagagggagtgtcagtgtgaaagctgatgatgacaatgatctgcttctgaagccgccacagaagccagtccggtcaaatggacccccggagagcatgaaaacagcatcactgccggatcagaagccagcaggggcaactttagacgacagagagaaggtcagagagtcactggacgctgtattggagaaagcagagaagcttgaggcctccagctttggtaatgcagatggtggcaaccttggttcaaggcagagtaatgtttccatgagtaatggtccaggaccgacagcagtggaggaaggtggtaattcaaggaagacaaaaacactaaagagtgtatggcggaaggggaaccctgtgccaactgtacgtaaggtcattagagagcaaccaagaactgaaacaaggagtcagtctatacctgtggctaaaccttcagtgtcatctgcatctaagccttcccctctgctactatctaaaccttctgtagcacagcctcctcgtcggcctatcaagtctgatacatcaaatgagaaaaaaggacccatccttattgataaatttgcttccaagagggcagcagttgatccgattgtacctgaggaattgttagaccctctaaaaccagtacgaggcccaccagcaaaagtcagagttgatcgtcgtaaaaaaccagacacacaagctggttccagacgacgtatgtccaatgatgatggattagttgatgaggatactactgacgtgccaatttctggtgttccagtgcgcaagggtaggaggtggagcaaggcaaaacgccgcgctgcaaggctagaggctatgcaagctgaagagccagtcagagttgagatccttgaagttggtgaagaaggtatgctgattgaggacttggcatatgagttggcaattggtgaatcagaaattttacgattcttatcggtgagaggagttatgcttgacaatgttcagactctagataaagatttggttaagatggtttgcatggaatatgatgttgaagtactagaaagtggtcctgtgaaagtggaggaaatggctaagaagaaggagttccttgatgatgaagatttggataaattggaagtgaggcctcccattgtgactatcatgggccatgttgatcatgggaagacaactctgttggattatatacgcaagagcaagttggtggcatctgaagctggtggtataacacaagggattggagcatatcaggttcttttaccagtagatggaaaccatcaagcctgtgtttttctggatactccaggacatgaggcgtttggtgcaatgagagctcgaggagctagagtaaccgatatctgtattgttgttgttgctgcggatgatggtgttcggccacaaacaagtgaggcaattgcacatgcaagggcagcaggggtgccaattataatagcaataaacaagatagacaaggagggagctaatgcagaacgagttatgcaagaactttcccaaattgggataatgccagaaatgtggggtggtgataccccaatggtcgagataagtgctcttactggggataatgttgatgaacttctggaaactgtcatgcttgttgcagagttgcaagaattaaaggcaaatccacataggaatgcgaagggcactgttattgaagcatgccttgacaaggccaaagggcctcttgctaccttagttgttcagaatggaaccctaaacaaagctgatattattgtgtgtggtgaagcttatggaaagatccgtgcattgtatgatgactgtgggaagctcgttgacaaagcaggaccatccaatgcagtgttattggcctcaataacgttccccttgccggtgatgaatttgaggttgttgacaaccttgatgttgcacgtgaaagggcgaatgggcgtgctgaagcactgcgcatagaaaggatatctgcaaaagctggggaaggaaaagtcacactctcagctattgcagcatcggtttcatctgcgaagcaagttggaattgatacacatgagctaaatgttatccttaaagttgattttcagggttcaatcgaggctattaggcaagccatccaaactcttccacaagaaaatgtctctctgagattcctccttcaaggtccaggagatgtgagtgttagtgatgttgatctggctgttgcttcggaaggaattatatttggctttaatgtcagagcaccaggatcagttaaaaactatgctaagaagaaaggtgttgaaattcggatgtacaaagtgatctatgatttgattgatgatttacggaaggccatggaaggtcttctcgaacccgctgaggaggaagtaccaattggttcggcaaaagttcgagctgtctttagtagtggcagtggaaaggtggccggatgcatgattacaacaggaaaagttgttcaagattgtaatgtgcgggttcttcgtaaagggaaagaagtatatgtgggttcgcttgattccttgagaagggtgaaagaaactgtgaaggaggttggtgctgggctagagtgtggtattggggtagatgacttcgatgaatgggaggaaggtgacatcatagaggcattcaataccgtgaataaggcaagaaccctcgaggaggcctctgctaccgtgactgccgcactcaaggatgcaggggtccagctgtagaattggcaacacgctgatactcttttttattaatgctgttgtgagctggaccggtggaccgtttccctgattccttcggtggtggctgaagctgaatggtgagctgctggagagtggagacgtggagtggtggccggtgggcgcctgggcggtggctgccggctggtgcagactgtgcacttgtgcagtgcagtggcgctaatatattgtgtgtggctgtggaagatgcatgtgtggatcggctgtctgtagtgagatggaagatactgtatatagcatatcaaaccatatattcatcgtatatacattaattattgatattgaattttgtcggtcaagcgtatgggccggccaagccaaactgtatttgccgaaagccgcttttgaatcgccgggagtggcaaggcagctagttggggtttcacacgcagcaggtttagattagaagtttgcacggttgcaaaggtttggtttgca

SEQ ID NO: 2476 - DNA, 930 bp, Zea Mays
cagatagtttcctgctgtatcacgaggaaaagccgtgaagaaatcaaacgagaaagagaaaggcacaaaaaaataaagaacgaaaacaatgggcagtgaaataaataaaaatggcaaccgcgccgccctcatctcccttcatctcctcaagcaaagcaaaggcgagcgcgagagaaacctgaaccaacttcccagacccgctactccctcgccgcgatttcctcacatggcagcgctgcgcctccgcgaatcactcgagaggaacggcccccgcttctatttatccggcccttgtccctgcgccgacccgcgttgccccagtcccgatctcgccgcccccttctcctccctccgcgtccatcgcacccgctcctgatcccgcttgcttgctctggttctgcttccgccgtttgtctcgcgggtcctgggagctcctgagccctggttctgtctctagcctgtcttgccatggggaagagcaagaagagcaaggcccgcggcggcagggacgacctgctcgacagcagcgacgccgacagcgtcagctcctcgtccaccgcactgtcggatctctccatctcgtacgctaccgagcacgtcaactcgcaggagttcgtcctggacaagtacatcgacgcgctctacgagaagaggtcaggagggtcactctttacgcgctctacgagaacagcttcatgtttgctgttctggcgccgatggtgaaataggcatttctgttcgtgtgttttttacttcgatttcgttgagcttacttaacttatgtgtattgtaggcatagatagtttactatgtcgcatcacattgtagctggctgtctggctgacccaattgtagttggccgggcaatacggttttcttgtttgtttgcatgacgttcactatataatgcacgggttcgtcttggactat

SEQ ID NO: 2477 - DNA, 900 bp, Zea Mays
ccttgggctgcttcgtcctgtctcgtgggattgatctgctgcgcattgcgccgccggggtgtggtgcgggggttggcggcctcttcttcaagcaagagatggagctttcattggtagggctccaaaatgctgggaaaacatcacttgtgaactccattgctactggaggttttagtgaggatatgatccctactgtaggattcaatatgagaaaggttaccaaagggaatgtgacgataaaattgtgggatattggaggccaacctagattccggagcatgtgggagagatactgccgtgcggtttctgcaattgtgtatgttgttgacgcggcagatcgtgaaaacatggccattgcaaaaggggagctccatgatctcttgagcaagccatctttgaccggaataccattactagtaattggcaacaaaattgacaagcctgaagctttccctaaacaaaccttcacagaaataatgggcctaaagacgatcactgaccgagaagtggcatgcttcatgacatcatgcaagaactcgaccaacattgattctgtcattgactggctggtgaagaactcgaaaaagaagaattgaacttaaatctgtactagctattaaagcgcacgccaatctctctatttttgcatgtcgcatagcattggagctgtaaattatgcaagaggtattaatcagggatgttgtgttcataattttgttaacctggtttagcagtatgttggtggacagcgtctggtattgtgcacgcccgtgctctgaggctgcctcctgtgttccactcaattttagctgtgcgatttgttctcttgtgttccactcaattttatctgcttgatttgtttcacattctttacgttaaatcaaacaaaactagaacgaa

SEQ ID NO: 2478 - DNA, 2291 bp, Zea Mays
aggatcgatttcttccgtcccgacgattcgcagattttacattctgattttggacgattttggtagaagctattttcacggaatcggactccaaccgaagtgtttgagtggcagaagccgattcccacggtcggaatctggcaagccgaaacaaacaggctgactgggttggcttccggtttcggcgatggagtgcgcggcgaagggactggccgcggagccgtgcgccggcggcgtcgccgatcggcggtgcggcggctgcggagccgtcgcctactgctcccgcgtccaccagattatacattggagggttcacaaagaagaatgtgaaaggtttgcagaacaaatgaggcacatcaatgcgctgagccagtttccattcacattcttggaacctcctgctctgaaccatgaattcccaagtgcaaggtgcttatttttgcaatcaatcaaacttcaccaaaaaggactctggaaatctgaatgtatatgtggccgagatgttgctcctttgaagggcttaagcgtagaagctgaatggaacttgcaaagctccctctgcccttgtgcagagcctaaaaatcctgtgtcttcggccctggcaagctgggaagcatattatcagtggagatcccttcccctgcattcacctgttgctgttttacttcattggccacttactctatatcattgtgttcaactctctcggacccaaactccaagatatgatggtcaggacaccctatgcattcactatttagggcctgagaaggagctacttcagcttgcagcgtttggggaactacgtgcattgtttccaagtgtccagattcacattgagcttgtcggaccagaagttccaaagtccagggatggagaggttgtgaacatttccagatatgcatgttgttctgataagagttgctgttgtaaatcttctattggttccaaagacttgagttgcactgcagtgacactcaaactgtggaaaggtttctatcatgagagatgcagtgatatattgaaggttctctctacaattactcctattttctaaaaagatgtgaagttacccaccatattatagagccaagcatgtccttattgtaaagtttagaaagaatgttaatactggacaagctttcacatgcatcacacacagttctgtattgtctggtgctatacatagttgtaggtccagttaattctagaagtgctaagttatttacagtcttctgcttacgttgtatcttgtaagctcagctctccaataatcactggaatgtgtagaactcataactcatttcctagcaggtcgatttctgattttctgttaatttacaaacaaaagtatgaaaagaaaagagcaccatgccgctgctgcttgctggtggcccctaccagagctacagctagctttagcactgaaccatagacctaatgctatttttccaacagatctagagcgtgttctaccatttgagagatgatgacatgtcttgtttgaaactgataaaaatgatttactcaccagataattcagttggcaggattccgttccacaacttatttttgccccaaatgcgggtgtggctgcatatcctagttggatgccaactattgaaatgataaggcagactgggattcctgcaatctttacggacttctgtgaagaagctgcacatctagcatcctgctgcataagctccataactggtcaaccccttaaaattccaatccaggtaaatcctttcaggcagccagttgcagcggaaaacaatgcattatacgtaccatgttattcaaattgctttgtttttgggatgtaaaattgccctgtcaccaggaagtatatttagagattgatttgtcaagaaatggaatgtgaattttcaaagaagacaagggtgccattcctagaacatctgagatgggaggtttttatttctgagagatgatggaattaggatttaatgttggtacacttagaatttgagaagacaagttgcacaaatcaagaggaacactggaagggctaggaatagcatgtgtacaagccgactaggagaaaatgtattttatttgaacctctgaaaatatttagatactgcaattgtaagattttcgcatcaaccgattcttgaaatacactttttcataattgggagatgtatatgttttcttatggtggagctacatattatctaattttgttgttcacagcaatctggaggaccgagattgtaagaactgattttgattcataaaaacatagaccagtgttccatgtc

SEQ ID NO: 2479 - DNA, 2287 bp, Zea Mays
taggcagtggccacccacccctgtcctcctccgggtcgcacacctgtcccggcggcctcccttgcgcacccgatcacacgcacgcaccgccagtcaaagcccccacctcccggccagcccccaccgccccgcgaagactgggtccctgccgtccgccccacatccaagggccccgtatccctcctccggcgagccaccgctcccccgcccataaatacctcttcgctcccgccgctgccgctgccacccccgcgagacctgtccgaatcgcgcccaggtccctcgctgggagtttcgccgagggccctcccgcctcccctagattcacgacggagatggcgtccgagctcacctaccgcggcggcgggacgtccacggccgccggcgccggcgccgggggatactcaccgaagccgtccaagccgctcgcgtggctgccccgcgcggcccgctacgccgtcgccgagcatcgcccgctcttcgcgctcgccgggatgctgatcgccgccgccgtcatctccatcgcctccccgtccgcctcctcctcctcctccacctccacctccaccggcggcgccgcctcgtcctactccaacaacaacaatccgctcgcccgcttccccgtcgagcccgcccaccaccgcgacgtggccacgcggcacttcgtcggcggcaaggtgccgctgggcctcaagcggaaggcgctccgcgtcctcgtcaccggcggcgccggcttcgtcggcagccacctggtggaccgcctcctcgagcgcggcgacagcgttatcgtcgtcgataacttcttcaccggccgcaaggacaacgttcttcaccacctcaacgacccaaacttcgagatgatccgccacgatgtcgtcgagcccatcctgctcgaggtcgaccagatctaccacctcgcctgcccggcgtcccccgtccactacaaatacaaccccatcaagacaatcatatcctttctctacgaattccttcagttcagttccgttgcgttcatttcctttcctccatgaatgattcgtgattgatgcctggatcgcgatcgcttctatttttcttcttcttttggtgcctaaacaaaaatattttatattgttattgggatggacttggtttctattgctttttcgtggggaatttccaaatttgtttcttcctgcgggtttatcggttaacgcgcgatgcatctgaggaggaggatcgattcactactctttgagattccgtatccgtctctgaaatgggaatatgacaatttttttaaaatccggtaccaacaggtataaccccccagaactacgatttccttccacggaaggagaattttgtccggagctcgaatttgtgccacgtttcacttcgttttttggagttttctgctcaactgagggaaagcagagccaccagagcttggccgtttcagatctctgtctgctaggctgccctttgctcaagggcaatcctcccttttcattcaacgcaaaaaaaaagatctttttttgcgtctttctatgaaatctggtgacaaatgttcagttgaactcagattcttcagatgcaattgaagatctcaaatcatcacatcattttttctgtcgaaataatttatgtgtgtgtgtgtttttcttaaaaaaactgttttttatgcttctgaatgcttgctgcattttcccgtgcatttgaaacaggaaaaacgtactagcgaaagctatagctgtgatctgaactcaattgctccgtaccgttttactttgcttcatgatccgttaatgaaagcaaaaagtaagcgcacggtgcgcatggatctgggttagttatgtactttgcttacttctgacataaagggcgcatttcaattttcaacaacacaaaagttgacgtccaagtggcctttgccttttccgctttctaagcaacttcgcttactgttcacttcacgaaatttccttatgctttacttgttttgcaactgaatgtggagtagcaatgtaacaaagtgaaaaagggtgtctggctgattcatttagtttctgctcgttttgctttcttgagatggttcgtgttagccttaacctttgtgatagcacaagaccaatgtggttgggactctgaacatgctcggattagcaaagaggatcaacgccaggttcctcctcaccagtaccagtgaggtctatggtgatcctctccagcacccgcaggtggagacttactggggcaatgtcaatcccatcgccatagtcttttagtgacatgattttggatgagc

SEQ ID NO: 2480 - DNA, 2796 bp, Zea Mays
ctccctctctctctctcttggagttgctgtgaaaatacgacctatcggggacagctcgatctccctcccttggctggagcctggagccgacggagcagaacgacggttccttgcggcggcagcgacctcgagctgagggcggcgagaaggcgggaacaactcgatctccctttgctagctagctagtcccgatggagccgagggttccttgcggcgacggcggccccgaacctagggccgcgagaacgcatcgacgggagggcgagcgaaaccacgtcctcgatgcgcgaatcctggagcctcagcgacagagatcgaatccaatcaggaacatctttcatctattaactcaacgagaggtctcacctcgattgaaacaccatgctaaaagaatgtggaatgagtccccaaaatatgatcctgattcaattgagttaaggtctgcagatgctaaacttgatattttttcatgggcagaatcacagtccctgcatagctggtctgccaagtattgccctcttttgccacctcctaggtcaactattgcagctgctttcagtccagatggaaaaacacttgcgtccacacatggtgaccataccgtgaaaataattgactgccaaacagggaaatgtttgaaggttttgactggacatcgacgcactccttgggtggtcaggtatcatccattacattctgacatcctggctagcggaagtttggatcatgaagttcgtctatgggatgctaatacttcagactgtattgggtcacaagacttccatcggccaattgcttccattgcatttcatggaagtggggagattttggcagttgcatcaggtcacaaattgtacatatggaactacaataagagagatggcacttctgtaccagccatcatactaaaaacccgccgctcgctgagagctgttcattttcatccgcgtggggctccatatcttctaacagcagaggttaataatatagaatctgcagactcaccgctgactctggcaagatcctctggatatctaaattacccatcggccctgctggtgacaaacactaattctagattctgtacacttcctgagtccaatgtggtgtcaccttgcttactgtggcctgcatacctcagagatggtggaattttacatgtgctcggcaatgacagtagttcaaccattgtgcagcagagatcatcattagttcaaccttccacatcagatactgcaaatgtacagcttgaacagtttgctacccctatggatgtatgtccgggagagccaacttcatctaatgacatacccgatgcagtaactgttcctacttcaaatggaaatgaaatgcatggtgctggaggccagtctaactcaagactgcagggcagcagctctactagtaatcttgagagggccttcaggatccgatttacaccgtgctatgccactaaatatgctcctcactggcggattagatgttcaaatgttcctaagaaatgtaggaagtggacagcaggatcattctctcttcggcgactcacgtaactgggaggtaccatttttgcagggtttcttgatggccccaaaccatgcaggtgcttcatcttcgattccccttaccactggcagttctaggggaccaaatcgacgctatgcttcacgctctgtacctggggttgggaatttgctcctaggtcctcaaattgacgaagctgaagctcatgctgtttcactaggtgctggttctgaaatcactgcgtccatgcttgctcctggtactgaattgccttgtacagtgaagctcagaatatggcggcacggtaccaatgaaccatgtgttcctttagaacctgaggcatgctgtctgacgatttctcatgccgttctctgcagtgaaatgggtgcccatttttccccatgtggacgatttctggtagcatgtgttgcgtgtttgttgccacaaacagaagacgaccgtggtagccaattgcctgtgtcttacgaaggggctggatcatcaccaactcgtcacccgcttccctctcatcgagttatttatgagctccgggtttattcccttgaggctgagacatttggggatattcttgcttccagagcaatacgggcagcacattgcttaacatccattcagttctcacctacatccgaacacatacttttggcatatggtcgtcgtcatagctcgctccttaggagcatagttgtggaaggcgaaaatggggttcccgtatatactattttggaggtatatagagtttcagatatggagcttgtgagagtgcttcctagcgctgaagatgaagttaatgttgcatgctttcatccttcaccaggaggtggccttgtttatggcactaaggaagggaagctcaggatccttcagcacaatggcgcagacatgacaaacatgggggtgggttgcttcattgaggaaaatatggttgagatccagaggtacgcattggaatgctgaagaagcttcaccacaccatgtgtttttaggcttacttccatggaatttttttctgcaggcttcatctgtgtgatccatccaaggggaaacattagatccatctctaactaagtgccttggggattggtctgtgcagaggtggtaggagatgtaaatctacatggccatcgtcgtggctgccataacgatgctcgtatcttatgggcatgggcttgcacatctccaatcctgtcccttcaaccatgatcctatggtcattgttaacactttggtcgctgatgaagatgaaaagtagcc

SEQ ID NO: 2481 - DNA, 1317 bp, Zea Mays
cataacaatacatgcatgtacaaagatctgaataataatgggttcgctccgtgatggcaagaccaacagcagcagtggccggcggtggtgcgcggtgaccggcggccggggcttcatggcgaggcacctggtggccgcgctgctgcgctccggcgagtggcttgtgcgggtcaccgacctcgccccggatgtcgtgctcggcctcggcgacaccgaggacgtcctcgatgacgccctccgtgatggccgcgccgtctatgcctcagcggatgtctgcaacctagaccagcttattcaagcttttgaaggggttgaggttgttttccacacagctgctgcggatccaagcaagaacgaccagcaacttcactataaggtcaacgttgaggggacaaagaacgtggttgatgcgtgcatgatttgcaaggtgaaaaggcttatccacaccagctctattgctgttgtgttcgacggagttaatgggcttctcgatgcaaatgaatcattgccatacccagacaagtttcctgatgcgtatggacaaacaaaggcagaagcagaaaagatagtcatgaaggctaatggcattagtggccttctaacttgttgcatacgtcctggtagcatttttggccctggtgacatagttatactaccaactctggaccaatgtggaaaaacacactttgtttttggtgatgggaagaattgtgatgattttgtatatgttgaaaatgtggtacatggccacatttgtgctgaaaaaactctttctacaatggaaggcgcaaaaaccagtggtggaaaagcctactttataaccaatacggaaccaatgaacatgtgggactttctatatctgcttcaagaagaacttggatacaaaaggttgttcaagataagaatacctttgattgtcatccaggcagtaagctatttggtagagtggggatacaaggttctacaccattatggaatgtgccagcctcaagtgctaacaccagcaaggatcaagtatctgacagttcatagaacattcagttgtaacaaagctgctgaagaacttggctacaaaccaattgtgacacttatggtttcatagattcaactctctttgtgttgcattcgttgttgtttttttctgttagtgcagctcgtttttgtattattgaaatgctcatgtgctttcctaatttgctgtctaggatggtatgaagctagcagtcaaatcatatattcggttgagaaatcatgcagatttatcttacaaacatatataaaagtatacagggaaagttataccaccataaactacta

SEQ ID NO: 2482 - DNA, 1993 bp, Zea Mays
caatttctttccaaatttttcggaggcctgtccaccaccgaaccaccaccccgcgcgccgagctcaccccgatccagatccaccagtcgtccctccggtctgcgacgggcgccctcctcctcgtcctcacgcgcctccggaagccagtgcctgcgcagtgaagcatccatctgcctctcctctcgtcggatccggggccggccaggcggcggcagcatgaagcgggtgtcgtcgcacgtctccctcgcctccgaggcggagatcaacctcgatctgtcgcgcctcatcatcgacaagcccaggttcacgctggagcggaagcgctccttcgacgagcagtcgtggagcgagctctctcaccgccagaacgacggcttcgacagcgtgctgcagtcgccggcattcccctctggtgtctttgactcgcccttctccgtgggcacgcatttcggggggccgcacccgctggtcaatgaggcctgggaggcgctcaggaaatcggtcgtctacttccgggaacagcccgtcggtactattgctgccgtagaccatgcgtcggaggaagtgctcaactatgatcaggtttttgtgagggattttgttccgagtgcattggctttcctaatgaataatgagactgacatagtgaagaactttctcttgaaaactcttcaccttcagagctctgagaaaatggtagaccgattcaagcttggagcaggtgcgatgcctgcaagtttcaaggtggaccgtaataaaaacagaaacactgaaaccttagttgctgattttggtgagagtgcaatcggcagggtggcaccggttgactctggattttggtggatcattctccttcgggcatatacaaagtacaccggagatgttagtttgtcagaatcacctgaatgccagaagtgcatgaggctgatactgaatctctgcttatctgaaggatttgatacttttccaactctgctttgcacagatggctgttcaatgattgatcgtcgaatgatacaaaacagaagagtattcccacacagctgtgaacaagtttaatgtcattccggattccattcctgattgggtgtttggtttcatgccatgtcgaggaggctactttcttggcaacgtcagccctgctatgatggacttccggtggtttgcccttggtaattgcattgccattgtatcatctctagctaccccagaacagtcagttgctataatggatctgatcgaggaaaagtgggatgagctagttggtgagatgcctttgaagatatgctatcctgctctcgagaatcatgagtggagaataatcactggatgtgaccccaagaacacccggtggagttaccacaatggaggatcgtggccagttcttctgtggctgctgacagcagcctgcatcaagactggtcggccacagatggcaaaacgtgccattgagcttgctgagtcgaggctgctcaaggacggctggcccgagtactacgatggcaagcttggaagattcgttggtaagcaggccaggaagttccaaacctggtccattgctggttacctcgtggcccgcatgatgctggaggacccatcgacactgatgatgatctccatggaggaggaccggcctgtgaagccgaccatgcggcggtcagcatcatggaatgcctgaatgcgtggacagttgtttctgaattaaggaaatttagaagcaaaggttatacgtgagtttttttgggatcataaaagtttgatgtgattttgttgggaccggaatagttcaacgttcattatagttgagctctgtcaattaggacagaaattgtataccatagaggatcataggagttacacaggattttgtcacacctttttgttttgaatactaggatcctgttcagttgaaaccttgattttggaataacaaatcactatttatgcacacttttcactgtggcattactggtatctctgataactctggaat

SEQ ID NO: 2483 - DNA, 989 bp, Zea Mays
aaaccacagcactggatagaacacgccaaaagcaagagatatttcagtttcgctcttgtctcagctcagctcagctcctgccagtcgcaactcgcgtcctctccaaaaaaacagcccacagttgaagcgaaaacacgaaagctcagtgatatttctctccaggtctgcacactcgtctcctatcgagactgtcggcggccatcgtcgcccacgctgtgctcatgctaagtgtcgaggctcacacgtactactactacccgaccgcgaggccgagacggaagctatgcgcctgcagaaacgtcttgcaagaaaccgccccgcgtgacgcggaggcagatccctgccgccacggcgagaggaagagcaggagaaggggcgacggtgcttattacatcgacaaggacggcggcggcgtagccaggaccttcgaccggaagaaaatatccagaaagaggggtacggtaaatgattatgacagtgtgccagtgtgccacaccactccttaattttagttcccacacaatgctgcagatcaatgccagttcttagatcttcttcttttttttttaaaaaaaagcaagaacacaaaggttgttccttttccggattcactcactgttccatgcattggaagttcaaggacaacatggcgtaggtaggttctagctctgaatggcatggcatggcttgggcttgggcgtgcagggggtgctatcaaagggcgtggatggaagtacggctccgggttcgtcgacggagtgttcccagtgctgagtccgatggcgcaggatgtgctagaactcgtgcagacgagggggaccgacgccgccagcgtctgggagtcactggacaagatccctcaagcacacgatctttgggacgacatcgtcaacgtcgccgtccagctccgcctgaaccggcaatgggagccgatcatcacaagcaaaaatcctcagcctttggctatgggtgtttgatctgatctgcct

SEQ ID NO: 2484 - DNA, 1788 bp, Zea Mays
aagtaatgggtttagataggatcaaggtgaatttttgctccatactatcccaattcccaacccgaccattgccgtccttacagtcaactgtgttctagacagttgagttcaaaaaggtgaggcggcgagatcgaatcaagcggagcggagcctacacatggcgatggcgctgcgtcggctgctgcttcctctcctcctcctcgtactcttaggtctgcggccgcagagctgcgtcgccagtggcggaggtggaggggagccggcggagttcgagatacctcgggacgggagcgtgctggagcttgacgagagcaacttcgaggcggcggtgcgcgcagccgaattcctcttcgtcgacttctacgctccctggtgcggccactgcaagcgcctcgccccgcagttagatgaggctgctgcagtgctagctggactgagcacgcccgtccttgtggctaaagtaaatgctgacaaatacaagaagctcggctctaaatatggagtagatgggttccctactttgatgttttttgaccatggagtgccctcggagtacacgggttcaaggaaggctgatgtgctagttgagaaccttaagaagcttgttgcacctgatgtttctgtccttgagtcggactcgtcaattaacggctttgttcaagcagctggcatcaattttccattgtttattgggtttggaatggatgagtcattgattgttgaatatggagcgaagtacaagaagaaggcatggttttcaacagcaaaggatttctctgaggatgtgatggttgtgtatgattttgacaaggttccagcgttggtttctgttaacccaaaatataatgagcagagtgtattctatggcccgtttgaagttgttttggatgcaggaacttttctggaagattttataaggcaatccctactgcctgcaactgtgcccatcaatagagagacagtaaagctattgaaagatgatgggaggaaagttgttcttacaatcttggaggatgaatcagatgaaagctctctgcagctaataaaagtgttgaggtctgccgccaatgcaaaccatgatttagtgttcggatatgtgggagtcaaacagtgggaggagttcaccgagacttttgatgtgaaggtttcgcagctgccaaagattgttgtctgggacacaaaagaggagtacgaagtggttgagggttcagagagtttcatagaaggtgactatggatcccaagtcagtcgatttctagagggatatagggaaggaagaacaacaaagaagaaagtgggccgtggttccccaacactgctcggccttaacgcggtatacatcctcgtcctgttggtcgccgttctcgttgttttgatgtatttttccgcgcaaggcgaggaggatcatcagccaagaagagcccatgaggactgacagcaatctgagatggcttagattcaaggcgttgatccggaggctgccgagttatttttgaaggggggtaacatataacatctgatggacaaattttcctgatcttcatttcacgtgccctagggtcgagttttagatatttgttgcagagctatgcatgagctcccctgtgtttctcttgaacccttgaagtttttggacttgttacttgaggaccgggtttcctcaggtttatgtcattgtaattattcggcactttgtaacatagcattcatgtgttatatttgagacccttggagaaacgacttctatagattgaacagcttatatctgggaaattttattacactaga

SEQ ID NO: 2485 - DNA, 840 bp, Zea Mays
gttatttacagatgctacaagggtcctgaactacttgtggatttgttagattatgattactcattggatttgtggagtcttggttgcatgttcgcagcaatgatattccgagtggaccctttctttagtggccaggataattatgatcaattagtgaaaatagctgaggttcttggcacaggagacctgtataactaccttgaaaaatatggcctccagcttgacccacagcttgaaagacttattggaagacataataggaaaccatggcccaagtttgtgaatgctaggaacagacaccttgcaacacctgagataaactcctccggtatgatcaccagaaaaggcctacagccaaggaaaccatggctcacccgtatttcaatccagtaagaagccccgaaagcaagacgaattcacaatagctaattagctataaggtgcacaaaggtgcacattttttttcacccccaagttgcctgcaaggcaaatgtggcatatttgacggtctttcccttttgaagtagagtgaaagatgtagagaaatacttgatactaaggttatgcttacccatcctcttacccatcctcttacccatatttaaattccattctgcgaacaataagtctacgttgcaaaatagtattttggatgaccatgagtgaactgctggcagttgcattctgaatgatgtcttggtcagcattacatttttttttggtgccagttattctcttcctgccgttctggtgcgaaaaaaatattttaccaatgggcttgaacacagcgtgactgatttatggccattaaattcctcaagtcacatttcaatgttaaca

SEQ ID NO: 2486 - DNA, 2351 bp, Zea Mays
gacatttatctcagcatcccggtaggtgacacgaggccgcgttttaaaaccccttcacctcaccgcgcgttttcctccgctcggttttattcccccacccacccaaccgcgctcctctgctagtctgctctgcaactgcaagacgattcgtttccatcgccatcggtgctgctcgagctcgactgctgcagctgctaccagtagtgagctgtgtgtgtgtgtagtatatacaatattcgtataaactgctggtctcaatcgagtcgtcgcccaatcggttgaatcggggagcagaggcatcgcccccacgcccaatcatccgcccccaaatccccagaagcacccacccctccgcgcgcgagatcccacgcgcgtccctcccacagtcccaccaccccccggggacgcggactccctcctccgtcctccccccccccccgcggtcccagcccagcggtggccctgcgacgaccgatggacgcggcggcgaagaagatgacgcggagcatctcgcggcagctctcgtcgggggcggcgcggctgtggcgccagctgtcgctggacccgcacaccccgcgccgcggcggcccgggcccggtcccagcggcgggggccgggcagacgcggttcgcgatcgccaggcagtcgtcgctcgacccgacgccgcgcggcgggccggacgggtcgtcggcgcaccagcagctcgcggtgccggagaacctggacgccaccatgcgcctgctcttcgccgcgtgccagggggatgccgccggggtcgaggagctgctcaggagcggggtggacgtcgacagcatcgacctcgacggacgtacggcgctgcacatcgcggcctgcgaggggcagggggaggtcgtgcgcctgctgctcgactggaaggccaacatcaacgcccgcgaccgctggggtagcacgccagcagcagacgcgaaacattacggccattttgaagtatataatactctgagagcaagaggagcaaaagttccgaaaaccagaaagaccccgatggctgtgtcaaatccgaaacaagttccagagtatgaactgaacccacttgaactggagtttcgaagaggagaggaggtcacaaagggtacatatctggcaaaatggtatggctcgaaagtttttgttaagatactagacaaagacagcttctcagatgctgaaagcataaatgcgttcaaacacgagcttaccttacttgagaaagcacgacatcccaatttggtccaatttgttggagctgtcacgcaaaatgtcccgatgatgattgtttcagagtaccatcaaaagggtgatttagccagttatattgagatgaaaggtcggctgaagcctcacaaagctataagatttgctcttgacattgcgaggggactgaattatctccatgagtgcaagcctgagccaatcattcatggaaatttgtcgccaaaaaacatcattcgggacgatgaaggacaacttaaggtggctggttttggatcactgagtttgagtaaagtttctgaagataaagtacaaatggctcagccagttacaaaatttgacaatgtatacatcgctcccgaggtctacaaaaacgaaccatttgacagaagtgtagatgtatttgcatttggtctcattctttatgagatgattgaaggagctcctgcttttcacccaaagccacaagaggaagcagctaagatgatttgcttagaggggctgagaccaccattcaagaataaaccgaaatactaccccagtgatgtgaaagagttgatacaagaatgctgggatccgatgccttccgtcaggccaacattcgcggagataattgtgcgcctgaacaagatacatgcgaactgtgctaagcagggtagctggagagacaccttcaagcttccatggaaacaaactggagagagataattgtaaagccccgcgaggctgccgtgtcaagatttcgccccttcccttcagcaagtgtgagtaaacacgagtcaagaaacgtacagagttacaaacagaaaggcaaagttcctatttagttcaggtttcagaccagtttgtgctttgtagcctgtataactgtatctaggcttatgccaccggcccaatttctcttgagctatcttcatccaaacgggaacaacagagtattaatcagtattctgaacattcagggcgtgcctattccttttgaactcctacgtgaacgttgtaaattctgcacgatttcctttcgtgccttttgtgtacgttgtgctgaaagagaaccagaggcatacgcatatcccgagaaaatgctgcagcgacgaaggaaaagcacagcgaagaaa

SEQ ID NO: 2487 - DNA, 1760 bp, Zea Mays
ctctaattggtcagcaacggctgcgtgcgtgttccttccttggcctttcataagtcgtctttctccttgaccagccattagcgtcgatcgatgatttagcacggagaggctcaaggctgtccacacagactctaaacaagcttacagcccggatgcgtcgccgacatggtgaatgcagtggctacaatcatatctacagtagcctcaactgcgacagtggtagtaatcgtcgccctcatcagaaggtgccgcgtcgtgaggaagaagatgaagaagaaaatcgtgaagaaagtcctggaggagattgagaaaaagaaccgcgagatgcaggccagcaacgccgtggaagatgtggcgatcgaggtcgggccagtggagacgtttctcaaccagatcctcaacgagaagccgatgcgtttcagctccgagcagctggcggcctgcacccggaactactcgtcggagctagggtccggcggctacggcgtggtctacaagggcgagctgccgaacggcctgctggtggccgcgaaagtcctcaaggtgtcgtccatgaacaggaaggtccaggaggcgttcatggcggagatcggcaccatcggccggacgtaccacgtgcacctcgtccgcctctacggcttctgcttcgacgcgagcaccaaagcgctagtgtacgagttcctggagaacggctcgctggagaagtacctttacggcggtgacgagggcagcacgacgagcacgaggctggagtgggggacgctgcacggcatcgccgtcggcacggccaaggggatcaggtacctgcacgaggagtgccagcagcggatcgtgcactacgacatcaagccggccaacatcctcctcacggccgactacaccccgaaggtggcggacttcgggctggcgcggctgggagagcgcgagaacacgcacatgtcgctgaccggcggcggccgcgggacgcctgggtacgcggcgccggagctgtggatggcgatgccggcgtcggagaagtgcgacgtgtacagcttcgggatggtgctgttcgagatcctgggacggcgccggaactacgacccctgccttgagggcgagagcaaggagtggttcccgagatgggtgtgggagaagtacgagcagggtgagatcgagcacgtcgtgtcctgctcctgcgacgggatcgtcggaggggcggacagggagaaggcggagatcatgtgcaaggtggcgctgtggtgcgtgcagttccagccgtcggcgcggccgacgatgagcagcgtggtgcggatgctggagggggagatgcccattgtcccgcccgtgaacccgttccattatctcatggaaagcggcggcggctcaactagctcgggattgtggagcggcacataccagagcagcagcagagacaccgccggcgcagagttgtcgcctgtcggatagctctgctgccaggtcaatcggcgtcgacgcgccgtgatcgaagatgttgagcggactcgtggggggtcgtgttgatgaaacagagtttgtagtcctgtagtacacattagttaatgctttaaaaaacaatgaaggccgtggtttgtaaattagcatcgtgttttggaggactatataaaagataaaagattcgcgcacgacaaaaaaaaatcgtgcatgcgttgagtgaaatgtacttgtaccggcaggtaccaaaagatagaccattattttaggggaaagttaggtagtatttggttatattgctctgtttt

SEQ ID NO: 2488 - DNA, 1853 bp, Zea Mays
gctcaacctcgtcaggaacggaccccatcgcgcggccgacgtctctaattggtcagcaacggctgcgtgcgtgttccttccttggcctttcataagtcgtctttctccttgaccagccattagcgtcgatcgatgatttagcacggagaggctcaaggctgtccacacagcctggattgttcgatcgttcttggagctcgcagctggagcgagagacgtagactctaaacaagcttacagcccggatgcgtcgccgacatggtgaatgcagtggctacaatcatatctacagtagcctcaactgcgacagtggtagtaatcgtcgccctcatcagaaggtgccgcgtcgtgaggaagaagatgaagaagaaaatcgtgaagaaagtcctggaggagattgagaaaaagaaccgcgagatgcaggccagcaacgccgtggaagatgtggcgatcgaggtcgggccagtggagacgtttctcaaccagatcctcaacgagaagccgatgcgtttcagctccgagcagctggcggcctgcacccggaactactcgtcggagctagggtccggcggctacggcgtggtctacaagggcgagctgccgaacggcctgctggtggccgcgaaagtcctcaaggtgtcgtccatgaacaggaaggtccaggaggcgttcatggcggagatcggcaccatcggccggacgtaccacgtgcacctcgtccgcctctacggcttctgcttcgacgcgagcaccaaagcgctagtgtacgagttcctggagaacggctcgctggagaagtacctttacggcggtgacgagggcagcacgacgagcacgaggctggagtgggggacgctgcacggcatcgccgtcggcacggccaaggggatcaggtacctgcacgaggagtgccagcagcggatcgtgcactacgacatcaagccggccaacatcctcctcacggccgactacaccccgaaggtggcggacttcgggctggcgcggctgggagagcgcgagaacacgcacatgtcgctgaccggcggcggccgcgggacgcctgggtacgcggcgccggagctgtggatggcgatgccggcgtcggagaagtgcgacgtgtacagcttcgggatggtgctgttcgagatcctgggacggcgccggaactacgacccctgccttgagggcgagagcaaggagtggttcccgagatgggtgtgggagaagtacgagcagggtgagatcgagcacgtcgtgtcctgctcctgcgacgggatcgtcggaggggcggacagggagaaggcggagatcatgtgcaaggtggcgctgtggtgcgtgcagttccagccgtcggcgcggccgacgatgagcagcgtggtgcggatgctggagggggagatgcccattgtcccgcccgtgaacccgttccattatctcatggaaagcggcggcggctcaactagctcgggattgtggagcggcacataccagagcagcagcagagacaccgccggcgcagagttgtcgcctgtcggatagctctgctgccaggtcaatcggcgtcgacgcgccgtgatcgaagatgttgagcggactcgtggggggtcgtgttgatgaaacagagtttgtagtcctgtagtacacattagttaatgctttaaaaaacaatgaaggccgtggtttgtaaattagcatcgtgttttggaggactatataaaagataaaagattcgcgcacgacaaaaaaaaatcgtgcatgcgttgagtgaaatgtacttgtaccggcaggtaccaaaagatagaccattattttaggggaaagttaggtagtatttggttatattgctctgtttt

SEQ ID NO: 2489 - DNA, 928 bp, Zea Mays
cgcacggacgtgcctgctttctcgggcgtgctaggcgctatccatcctgagccgccataaccaccgcctgctagtgcagccagcaagccgctcgccacgcgcgcgacgccgtgtttggcccccaccgccgttcggccgccttccctgccgccggcgtcgagctcgcctctgcgggaccgtagcccccacccctcattggctctctgcgcgagcgtgatcgcgcctccgcatcccatgttcagtggagccctaaagttctggctaccgatgctggaggatttggaaaggcgctgtttgattagaagacgagcatcctgacaagtgggtacctatatcctgtatgggccattttctggtagcagtttgtttcgcatctccatgtatttctcaatttggagactggagagagaacaacagagagaaactgatgttgaggagaaccatagaagtaattggttaggcttgagattaggaatttggcaaacaggttgtgtttctacgaagatccaaaattccttggaccaaaagcttcagcttccaatagtcgttaagggccttgtactgcgaactctggacaaagtttcatgctgctacaaagtgctctgcatacctggtgagtgtttaatcaatctcggtgctgatttgttagttttctttaagagggagttgccgagctttctcaacaatagcgatcgtggaaggcgtcaaccagattgtggatgttgaaactattctatctacttttggatctaagttataggatatttgaacattttaatgtttgatacctggatgctttatgcttatatgtggatgctagaaaaagttgtgtacacatgtttttgacaaaattgtacgcacgatttggattgcattcaattgaatgatcattttattaactgatggtgaattaaatatgttataaaca

SEQ ID NO: 2490 - DNA, 5228 bp, Zea Mays
cgggagttgggtccggtcgggtcgggtccagtcaaccgcaacagagaagggaaaaattccaggcagcgcagtgcgcacgccctgcggcaaatacacgaatccccgagccgggggcgagaaaaccgcaaaaggagattctcctcgccccttccactagactactggagtacccgacggcccgaggcggcgagctcgtcggcgactgaccgccgccggagcagccgccgcctcccgctggttcctgtaccacagcctcgcaggagcgcctccgttcgctacgccacccgccactgtgctgtcggaaggcagctcggactactcgcgccgcctcggcttctccgcgctcgccgcccctccgccggcgtgatcaaggatggagctacatcgtgaacctcctgaagctattctgaatgccataaaatttgatctcatgacgagtacggatatggaaaaattgagcagcatgagcataatcgaagtgagtgatgtcactagtccgaagctaggattaccaaatggttccctgcagtgtgagacttgtggatcacaacgtggacgcgactgtgatgggcattttggtgtgactaaactggcggcaacagtacacaatccatacttcatcgatgacgttgttcactttctaaaccgaatatgtcctggctgtctcagcccaagggaaggcatagatacaaagagattggagagagaaaaggttcaagcaacatgcaagtattgttcgaaggatggctctaaactttaccctagcatagtctttaagacactgtcaagtccaagagtattattattcaagagtaaacttcacagaaacgccagcgtgatggaaagaatttcgattgttgcagaagctgctgacagaatgcctaatagatcaaagggtaaaggttcgcttgaaggcctgcccctggatttttgggattttgtaccttctgagaataaacaagtccagtcaaatatgaccaagataatattgtcgccctaccaagtcttctacatgttgaagaaaagtgaccctgaacttatcaaacaatttgtttcaaggcgggagctattgtttctatcatgtttaccagtaactcctaattgccatcgtgttgtagaaattggatatgggcttccagatggacgcctaacatttgatgacagaacaaaggcttacaagaggatggttgatgtcagtaggagaattgatgactaccgccagcatccacatttcagtgttcttgcaagttcacttgtctcaagccgggtttcagaatgcctaaagtcatccaagttgtactctaaaaaggcagatggagagacatccacagatacatatggaatgaaatggctaaaggatgttgttctcagcaaaagatcagataatgtttttaggagtattatggttggagacccaaaaattaagttatgggaaattggcattcctgaagatttatcctcaagcctggttgtttctgagcacgtcagttcttataattttcaaagtacaaatctgaagtgcaacctgcaccttctagccaagcaagaactatttattcggcgaaatggaaagctaatgtttcttcggaaggcagaccagctagaaataggagattttgatggtgattgtttgcatggatatatcccacaatctatacgctcaagggttgaacttgaagagctggtaagcttacacaaccagctgttgaatatgcaagacggtcgaaatttggtgtcactaacacatgactctctagctgctgcacatttgttaacaagtacagatgtttttctgaagaaatctgaattacagcagcttcaaatgctatgcctttcagtatcaacaccagcacccgcagttattaaatctatgaattttcaaggttctctgtggactgtatggttgcaaggcacttgacttcctttcttcagcacaagaagtactatgtgagttcttaaccatgaggggtttaagtgtctctctttcagatctctacatgttctcagaccattactcaaggagaaaactagctgagggagttaagttggcactgtatgaagctgaagaagcttttcgagtcaagaaaatattgttagatccaattaacataccagttctgaagtgtcacgatgaaactgaagatgtaacttacagacaatctgattgtatccagagcaatccatcagttatcagatcttcaatcatggcatttaaagacgtcttccgtgatctcttaaaaatggtgcaacaacatgttagtaatgataactcaatgatggtgatgataaatgcaggaagcaagggtagcatgttgaaatatgctcaacaaactgcatgtattggtcttcaacttccagctagcaaatttcccttcagaattccttcccaactctcatgtattagctggaatggacagaaatcgttgaactatgaagctgagagtactagtgaacgtgtgggaggtcaaaacctttatgctgtgataaagaattccttcattgagggtttgaatccattggaatgtcttctgcacgctatatctggcagggcaaacttctttagtgaaaatgctgatgtaccagggacattgacaagaaaattaatgtatcacttgagagatatacatgttgcctatgatggaactgttagaagttcttatgggcagcaaatagtgcaattctcttatgatagtgttgatgacctagtagataaactcggcgccccggttggatgtcgggctgcttgttccatttcagaagctgcatatggagctttggaacacccggtcaatggtttagaggactcccctctcatgaatctacaagaagtatttaagtgtcacaaggctacaaattcaggggatcatattggtttgcttttcctgtcaaggcatttgaagaagtacagatacggtctggaatatgcatccctagaagttaaaaaccatcttgagcgagtgaacttctctgatttggttgaaaccatcatgattatatacgatggacatgacaaaataagaaacgaaggaatgtggaccacccattttcatataaacaaggcaatgatgaagaaaaaaagattaggattgagatttgttgtagatgaacttgcaaaagagtatgacaccaccagagatcagctaaacaacgcaatcccatcaattcgtatctcaaggagaaaatgtttagtaggtgacgagggtgttaaaagttcatcatgctgtatcgctgtcgtagcacatgctgaacgcaactccatctctcagttggacactatcaagacaagggtgattccaagcatactggatacactgctgaaaggttttttggaatttaaggatgttgagatccagtgtccacatgatggtgaacttcttgttaaagtttgtatgtctgagcattgtaaaggggggaggttctggcctactctacaaaatgcttgcattccagtaatggagttgattgactgggagctgagtcaaccaagcaatgtatctgatattttctgttcatatggcatagactcagcatggaaatactttgttgaatccttgaaatcagcgactactgatactgggaggaacattcgccgggagcacttgctggttattgcagatagcttgtctgtaactgggcagttccatgcattaagcagtcaaggtttaaagcagcagcgcactcggttatcgatctcgtctccattttctgaagcatgtttttctaggcctgcacaaagttttataaatgctgcaaagcaatgttcagtggacaatctgtgtggaagtctcgatgcagttgcttggggcaaagagcctttcaatgggacgtcagggccttttgaaattatgcactcgggaaagccacatgaaccagaacaaaatgagagcatctatgatttcctatgcagctctaaagttcggaattttgaaaagaatcatttggatacccgtagacaaagtactgaaaatgcttcgatatgtagattagcatgcaagtcttctaaaggcagtacgaccgtcaatggtgttgctataactatcgaccaggactttcttcatgctaaagtcagtatatgggataacattatcgatatgcgtacttccttacaaaacatgctaagagagtacccgttaaatggatatgtggcggagccagataaatcacagttaatcgaggccctgaaatttcattccagaggtgctgaaaagatcggtgtgggagtaagagaaattaagatcgggttgaatcctagtcacccaggtacaaggtgcttcattttgctgagaaacgatgataccactgaagacttttcttaccacaagtgtgttcagggtgctgcagactctatctcaccccagctcggaagttatttgaagaaactatattacagagcataagcttatgcaacactcccactagttcatttttttaactaaaacgtggcaaataaaaaagaacggatggagtaggattttggaaagtgttcctggcaacatcttgttctgatcagaccatattaccaatttctgataaggaaactacgtgtcgcattttaaggatgaggtgaaaactgaaagggtctggcgctcagaactcagaaggtcttctggactggaggtgtatgtcaactcaactcaatgggactatgtaaggtgggcctgagtcatgactgcggtttcatgcctgcaattctctagtcagtagtataaatactagtctgcgtgttttctaatatgaagatccatctattttattacttaaccatagcgtagatgattggtaacagatagatacattttatttactgattaaaatgcagcagcgactccccgaacttaaaacaggtaaacgggtgtggaaacttagtggctcattcaaaactgtctaaaatcgggtttgctcaaacaaagtgtcgacatggcatgtcatgttgaaatcatttgagtctctaaatttggtttacagacttttattagtgtgcttcaatcgtagcacaccaaatcagtattcggtttgagcatccgatttctgatggttttgcacaggccggccaagttatatgatctagttttttaacttaggggatctaattgatacaacatgccaagtttaagaatggctattgtatcttactcttatttattgaacaagtaatgcacattcccagtcagccgagcggctttgcgtgatgaatttgatgaactacacaagttaaactaagctacaca

SEQ ID NO: 2491 - DNA, 1287 bp, Zea Mays
gaaagcatcgctgaaacgagatcctcgccgtttcgcgaacaaatcggtgactgtctcctgctatctccccctttccgccacttcgctccgctcccatgcctcctgccccctctcgccgtggaggcaccccaaaccctagcccctgaaaccctagatcctcctcccctgttccgatggcgggggccgcggcgtccccagcggcgggccacgtggtggagcggttccggtcgcgactgcgcgaggaagcgggcggcggcgagccgggcgccgccgcggtcgtgcacgtgtacgcggaggcgctccgtgagctaaccttcaactgcaagccggtcatcaccgagctcaccatcatcgcgggccagcacgccacgctcgccgccgggggaatcgccgacgccatctgcgcccgcgtcgccgaggtgcaccagccagcagctcgggacactaggcaaatgactgatgtgcaggaggatctgataaatggattagcatcgaatagttcgtgtgaacggccttcaattttccagaaatcttctttacagtatgctgatgatcctgatcaacaagagacgtttcggcctcttgctggaacaagggcagcatcaccacatctcttgagtacacatgcatctgatatgaatctagatgggccattagtcaattcaaggagaaacttgtccatatcaccacctcttgatgtgttctctaggaatgtgtcccccaagagagcactagagaggctgccaccatctcattctgtattgggacctgatcccagaaaattcactgatcgaaatggcaggttaagatggggtttggatgatggtgcacaacggcctacaatcagtatgcttgatgaagagtacaggaagcaaagtgcaagggaacttattgatgcatatgggaattgtcaaggacgagatgctgatgaacgacttcctaaagtgcagcgcctggatccaaatggtatggctagcagatctagtgcacgaaattggttaacttccgaggaagaagagtattcatgggaggatatgagcccaactttgactgatcgagtcagtagcagcatgccatcttttcctcctggaaccatgagaactggatttcctggggcaaatgcagggttactggaatctgatgttgggaggcacaatttcccaagccaagctactagattatcggttgatggttcaccgtttaatcttgaagataggttttcaactgcaagtgtatgattgtctgatctctctttaaataatagtgaatcacagcattagcataaca

SEQ ID NO: 2492 - DNA, 1706 bp, Zea Mays
tcgtcggctgctcctgcccgcctccgtctcccacagcccacagtcccacacagccacggccacgccgccgtcctcgagccgcctgatgagctgcctccgccgcgcttcccgcctcacccggggtctctcttcctcctcggcggcggaggcggagacgctcccgccgccgcgcccctctgcgggtcgccgcgtggtcgtgacggggctgggcgccgtcacgccgctggcgcgcggcgtgggcgccacctgggatcgcctcgtcgcggggagatgcgccgtgcgctctctcgccgcagaggacctccgctttccggaggaagcagcggggaggacgctcgagcagctcccgtccagggtggtcgccgccgtgccgcgcgggaagggcgaggacgagttcgccgaggacacgtggaccaaggataaatctgtatcaggatttatttcctatgctctgtgtgcagctgatgaggctttaagagatgcaaattggttgccttccgaagatgataagaaggaaagaacgggagtctctattggtggagggattggaagcatctccgatatcttagatgcatcacaaatgatcatcgaaaatcgtctacgtcgtctcagcccatacttcatccccaagattttgatcaacatggcatcaggtcatgtcagcatgagatatggtttccaggatgatccaatttggtgatgccgatgtgatggtggctggtggaactgagtccaatattgatgctttgtctatagcgggattttctaggttaagagcattgtctacaaaatataattcctctccacttttagcttcaagaccttttgattgcggtagagatggatttgtgattggtgagggctgtggggtcatggttttggaggcacttgatcatgcaaaggaacgcggtgcaaaaatatatgctgaagttcgaggctacggaatgtctggtgatgcacaccacataactcagccacaaagtggtggtagaggtgctattttagccatgaagcgtgctttggaccagtcaggtcttcatgtaaatgaaattggttatgtgaatgcgcatgccacgtcgactcctcttggtgatgctgtggaggcgaacgcgatcaaatctgtatttggcgaccacgcagcatccggtgatcttgcaatatcctcaacaaagggagcaattggtcatctgctaggggcagctggatcagtggaagcaatcttcactgtgctagcaattcaccacggactcgctccgcctactcttaacctggagcggccggacccgctgttcgaaggggcattcacgccactagctgcgcccaagaagatgtcgatacgagcagccatctccaactctttcgggtttggtggaactaacacgtcgctgctgttctcgtgcccgccctagtcctagtgtaacggcgctctgttttctggtcctcgctggaagtgaagaggcttcctgtaatattcagatatgttccgcaaggcaccacccgcctttagctgaagtttcttcaagttgttttttttcaagtcttagttaaactctgtttcgttattttttttaaaaaaaggaaaaagatggaaatttgataggtgagtgagacgttccctttggacatcattagcgtaaaatctgtactactgctatgatataacgtgtccaacatagacatcacttgctcttcatcggagaaagcag

SEQ ID NO: 2493 - DNA, 1776 bp, Zea Mays
tcgtcggctgctcctgcccgcctccgtctcccacagcccacagtcccacacagccacggccacgccgccgtcctcgagccgcctgatgagctgcctccgccgcgcttcccgcctcacccggggtctctcttcctcctcggcggcggaggcggagacgctcccgccgccgcgcccctctgcgggtcgccgcgtggtcgtgacggggctgggcgccgtcacgccgctggcgcgcggcgtgggcgccacctgggatcgcctcgtcgcggggagatgcgccgtgcgctctctcgccgcagaggacctccgctttccggaggaagcagcggggaggacgctcgagcagctcccgtccagggtggtcgccgccgtgccgcgcgggaagggcgaggacgagttcgccgaggacacgtggaccaaggataaatctgtatcaggatttatttcctatgctctgtgtgcagctgatgaggctttaagagatgcaaattggttgccttccgaagatgataagaaggaaagaacgggagtctctattggtggagggattggaagcatctccgatatcttagatgcatcacaaatgatcatcgaaaatcgtctacgtcgtctcagcccatacttcatccccaagattttgatcaacatggcatcaggtcatgtcagcatgagatatggtttccagcttagggtccaaaccatgctgctgtgacagcttgcgccactggtgctcactctattggcgatgctactaggatgatccaatttggtgatgccgatgtgatggtggctggtggaactgagtccaatattgatgctttgtctatagcgggattttctaggttaagagcattgtctacaaaatataattcctctccacttttagcttcaagaccttttgattgcggtagagatggatttgtgattggtgagggctgtggggtcatggttttggaggcacttgatcatgcaaaggaacgcggtgcaaaaatatatgctgaagttcgaggctacggaatgtctggtgatgcacaccacataactcagccacaaagtggtggtagaggtgctattttagccatgaagcgtgctttggaccagtcaggtcttcatgtaaatgaaattggttatgtgaatgcgcatgccacgtcgactcctcttggtgatgctgtggaggcgaacgcgatcaaatctgtatttggcgaccacgcagcatccggtgatcttgcaatatcctcaacaaagggagcaattggtcatctgctaggggcagctggatcagtggaagcaatcttcactgtgctagcaattcaccacggactcgctccgcctactcttaacctggagcggccggacccgctgttcgaaggggcattcacgccactagctgcgcccaagaagatgtcgatacgagcagccatctccaactctttcgggtttggtggaactaacacgtcgctgctgttctcgtgcccgccctagtcctagtgtaacggcgctctgttttctggtcctcgctggaagtgaagaggcttcctgtaatattcagatatgttccgcaaggcaccacccgcctttagctgaagtttcttcaagttgttttttttcaagtcttagttaaactctgtttcgttattttttttaaaaaaaggaaaaagatggaaatttgataggtgagtgagacgttccctttggacatcattagcgtaaaatctgtactactgctatgatataacgtgtccaacatagacatcacttgctcttcatcggagaaagcag

SEQ ID NO: 2494 - DNA, 2267 bp, Zea Mays
agataccataagaacgcacgcgagtggccagtgggaaccaggaaacaagtgagagggggaagctgcggccgacggccgagctcttgccgtccctatccacccctctcggctctcgccctcctctctgtctttcgctccgtccagccgccgcgtaaaatccgcggaaccagatgcccttatccgccctctgatcgaatccggccagaaaggccggttctttgtcgtcgtcctcggcatcgccggcgaccttgatggcactggaggcgggtagcagcggcggcggcgggaggggatggggtggcaggttccgaagcctgatgcggcggaagcaggtggactccgatcgggtccgcgccgagggccagccgcagctcgccaaggagctcaacgtgccggagctggtcgcgatcggccttgttttttggaggacaggatagtgtgccatggattttagcacgccatcagcttccatggtttgatatcattgttgatccctgtgcagccgctcttgtttttgttgtcactgttttactatgcgtgggaattaaagagagttcatttgcacaaggagtcgtaacagttctcaatgcctgtgtaatgatatttgttattgtagctgggagttatattggcttccaaataggatgggtgggctacaaggtttctgacgggtatttcccacatggagtaaatggaatgcttgctggatcagcaactgtcttctttgcatacataggctttgatacagtcgctagtacagctgaagaggtaaagaatccacagagagatttgccattgggaattggagttgcattggctatttgttgtgcgttgtatatggctgtttctgttgttattgttgggctggtgccatattttgccatggatccagatactcctatttcatctgcctttgcaaggcatggaatgcaatgggctatgtacgttgtgacaagtggtgctgttcttgcactctgctcgaccttgatgggctcacttcttccacagcctagaatacttatggccatggcacgagatggtctgttgccatccttcttctctgatgttaacaagcaaactcaagtacctgttaagagcacaattgtgactggcatctgtgcagctgctctggcttttgcaatggatgtttcacagttagcaggaatgatatgtccctccagatgaggtccctttgccgccttctatgcaagaatcattttgtttgaaccaggaatgtgatgaggaaagggataggggtcttcttggagttgggaactgtaacttatctcagacaaaggatgtgattgtggtagtagaatcagtgaaggatcctctcattgataaaagactgcataaaggcaagatggatgagacgaagcgccgaaagatagcctctttaagcatagggtctgtgtgtgtaggggttctgatccttgcttcttcagcctctgccacatggttgccttttctcccgatatgtattggctgcaccattggagttgtgctccttctggctggcctcagcttgctctcctggatcgaccaagatgctggcaggcactcttttggtcattccggaggattcacatgcccttttgttccagtgctaccagttttgtgtatcctgataaatacgtatctgttaataaacctgagtggtgacacatggatgagagttggcatatggctgctgctgggtgttcttgtgtacgctttctacggccgaacccacagctccctaatagatgttgtctacgttccggcagcgcaagctgatgagatatacaggagttcatcaggatatgtatcatagaaaagaacagctgcagtcatgtgacacgatagagccacagaaagaccgagcggatgacagttactcaaaaggtggttgtccatcagctgtagaaaattggttatcagccggggaagacggaactgactgttatttctttcatgctcggctagcatgatctcgtggatgcaactttgcaagatatgtatgctgctcacgagccaggtcaatttacacattgttggaatgtgtgtagatgtggtgtatataaaaccaactgggtggagtatgtgatgtgatacataataatttgtctaattcatgtaaaagccctttgtgcggaaatgtgagggcatttaaaggacctattgaaaacagtacatggacggcaaaagaagccaccttttttatatcatgtatatgtcgtccacaaacattctcttcatgtatcatgtatatttgaccttggtcaggg

SEQ ID NO: 2495 - DNA, 3066 bp, Zea Mays
ataaaaggagaaggggtttcttgtggaagggacaggagcaagccaatgcaggaaattgcttggtattttgggctaaggataatatgttcaatctgtttccttgttcatttaaacgtagagtggccttgaaggatgataattgaagcaaaatgattctctatttcaccatattttggagatggatgatctgccaggagatgaaggaagatcccagacacacccttcagaccggaattggccctcccatttggagcagaagttccagtccctgcccctgactaaacaggaaaggaattttgattctgcatattcttcccttgattctagggaagttggtcattcattgcaggctgctcagacattatggtctagcggatccctttcaggtccaatacccaatggtttttattccattattccggaaaagagactcaaggagcattttgataccataccttctcctgatgacctttattctcttggaatagaaggatttaaggctgagattatccttgtggacatagaaagagataaaaagctatctgctttaaagcagttatgcacagcactggtaaaaggattgaattcaaatcctgctgcaatgataaaaaaaattgcaggtttggtttttgacttctacaaccgaccaaacccacatctcagtcctgcaagaacatcctctgaagatctttccaatttattagaaaatcgaggagttcaattgctgggacagataagacatggatcttgcaggcccaaagctatattatttaaagtccttgctgactcagttggtatagattctaaactgctggtgggcattccaaatgaagaacctcatggatatgataattcatccaaacatatgtctgttgtggtcattctgaaatctgcggagtttctagttgacctgatgcgttttccaggacaactagttccattttcatccaaagctgttgtcacatcccatatgtctgcaactggagaaagtgattcagccgactatgattcctgtgattctcctcttgaaccaaatagtcctctatgtgctcaaaggcaagagcaagatgatggcaatagatccttcaaagtcctctcactaagaaacatcatgctcaaatcgacaaattctatggagggtaaaatgagttgttcatctcatagtgagccgaatgttgcaaatgccttctgtggtcgcagccgcgataaagttgtggatgaacatcaaagaactgcaagctcaagtccagagcatccactgtccagagttcgtgggcgctcaatgctgggtgataaacaatatggtggtgctgtagcagtgtcaaggtcagatggcgcatcaacatcaaatacacatagagcacggagaagtactaatattactcctgaaatcagtgatgatattgtgagagcagttcgagcaatgagtgaaagcatgagacaaaatcgcctttcaagggagcagaaggatggtagtcttggatcctcaaatgattcaatgaaacatgaacctgctggtgactccaatgatgatgaagcatccacaagacgaccgagtgcactggagggtttgagaaggcaatttaatagtcagaaagctgtgtcattgccttcgtcgcccaataggtcaggtattcttggcctcaggagcccatctgactatacagaagccgatctgatggcgacctggaatgaggtgttgcagtcttcaccatttctgaacaagcctttattgccttatgaggaatggtgcattgagttttcagagatcactgttggcattcgtgtgggagtagggttttttggggaagtcttccgtggcctttggaacggaacagatgtagctataaaagtatttctggagcaggatttgacaacagagaatatgaaagatttctgcaacgagatatcaatacttagccgacttcgacaccccaatgtcatactctttcttggtgcatgtatgaagcctcctcacttatccctagtcactgagtacatggaagtgggttctttgtatagtttgattcactcaaaaacacagaaaactaagctccattggaagaggaggttaaagatgctccgtgatatctgtaggggtctcatgtgcatgcaccggctaaagattgttcaccgggacctcaagagtgcaaattgcctcgttaacaaatactggacagtcaagatatgtgattttgggctctctcgagtaatgtcaaattctgcaatgaatgacaactcatctgcgggaactccagagtggatggctcctgagctcattcgcaacgagccattcacagaaaaatgtgatatcttcagcttcggggtcatcatgtgggagctttgcactctttgtagaccttgggaaggaattccacctgttcagatcgtttactctgttgcgaatgatggggcaagactggaaataccagatgggcctcttggaagcttgatagcagattgctgggcagaaccggagaggcgtccatgctgccaggagatcctgacccgccttcttgattgcgagtataccttgtgctgaggctttgcttctagtctgtatagcggttataggggcatcagacggtctggcttatatatacatcacttaattttccatttcacatacatcattgagggtgtaaattaccatgtattaataagcaaactttttctaaacctctttaatgctattgccccaaaatccaagaaaagttttcgcaaaaaaaaagccttgttcgagttctgtacgttttccctttatctatatcttagtcgctttctgaaataatgagatttcactttccaaataaatctatatgtgatttttttaacctttgtttgactaactgccgaacccaacgattcttccaggacccgacccaaacgtttttgattggatctctttctttctctctccctgagagcaagcagatgggatgtaagcttgtctatgtcattaaatcctacgtagagatgagagagaataagagaccgaagtgggcacccgatctaccgcacaactaaaacacgccatttccaaggttcgtttaacttttaatccat

SEQ ID NO: 2496 - DNA, 3271 bp, Zea Mays
cttggccattcgcccgttctacgccagagcccagaggaggcagcaagtcgttctcgcatctcgcgcgcctcgtgaacgaatccctaaccccacaattaaaagcaagcaacccccgctcccccacctgcgctaattaatcacatcacgagatccccttgcccacctccttcgcctcagtcacacgcctcgatctcgcctcgccgcgctcccaccaccgcaccatcccggccgcctcgctcgcgacgcaccaaggtgccctcgtatcccgcggcgccggattgggttccctccggggatcacgcggcgagcctcgccgctcgagccacagagtggccttgaaggatgataattgaagcaaaatgattctctatttcaccatattttggagatggatgatctgccaggagatgaaggaagatcccagacacacccttcagaccggaattggccctcccatttggagcagaagttccagtccctgcccctgactaaacaggaaaggaattttgattctgcatattcttcccttgattctagggaagttggtcattcattgcaggctgctcagacattatggtctagcggatccctttcaggtccaatacccaatggtttttattccattattccggaaaagagactcaaggagcattttgataccataccttctcctgatgacctttattctcttggaatagaaggatttaaggctgagattatccttgtggacatagaaagagataaaaagctatctgctttaaagcagttatgcacagcactggtaaaaggattgaattcaaatcctgctgcaatgataaaaaaaattgcaggtttggtttttgacttctacaaccgaccaaacccacatctcagtcctgcaagaacatcctctgaagatctttccaatttattagaaaatcgaggagttcaattgctgggacagataagacatggatcttgcaggcccaaagctatattatttaaagtccttgctgactcagttggtatagattctaaactgctggtgggcattccaaatgaagaacctcatggatatgataattcatccaaacatatgtctgttgtggtcattctgaaatctgcggagtttctagttgacctgatgcgttttccaggacaactagttccattttcatccaaagctgttgtcacatcccatatgtctgcaactggagaaagtgattcagccgactatgattcctgtgattctcctcttgaaccaaatagtcctctatgtgctcaaaggcaagagcaagatgatggcaatagatccttcaaagtcctctcactaagaaacatcatgctcaaatcgacaaattctatggagggtaaaatgagttgttcatctcatagtgagccgaatgttgcaaatgccttctgtggtcgcagccgcgataaagttgtggatgaacatcaaagaactgcaagctcaagtccagagcatccactgtccagagttcgtgggcgctcaatgctgggtgataaacaatatggtggtgctgtagcagtgtcaaggtcagatggcgcatcaacatcaaatacacatagagcacggagaagtactaatattactcctgaaatcagtgatgatattgtgagttcgagcaatgagtgaaagcatgagacaaaatcgcctttcaagggagcagaaggatggtagtcttggatcctcaaatgattcaatgaaacatgaacctgctggtgactccaatgatgatgaagcatccacaagacgaccgagtgcactggagggtttgagaaggcaatttaatagtcagaaagctgtgtcattgccttcgtcgcccaataggtcaggtattcttggcctcaggagcccatctgactatacagaagccgatctgatggcgacctggaatgaggtgttgcagtcttcaccatttctgaacaagcctttattgccttatgaggaatggtgcattgagttttcagagatcactgttggcattcgtgtgggagtagggttttttggggaagtcttccgtggcctttggaacggaacagatgtagctataaaagtatttctggagcaggatttgacaacagagaatatgaaagatttctgcaacgagatatcaatacttagccgacttcgacaccccaatgtcatactctttcttggtgcatgtatgaagcctcctcacttatccctagtcactgagtacatggaagtgggttctttgtatagtttgattcactcaaaaacacagaaaactaagctccattggaagaggaggttaaagatgctccgtgatatctgtaggggtctcatgtgcatgcaccggctaaagattgttcaccgggacctcaagagtgcaaattgcctcgttaacaaatactggacagtcaagatatgtgattttgggctctctcgagtaatgtcaaattctgcaatgaatgacaactcatctgcgggaactccagagtggatggctcctgagctcattcgcaacgagccattcacagaaaaatgtgatatcttcagcttcggggtcatcatgtgggagctttgcactctttgtagaccttgggaaggaattccacctgttcagatcgtttactctgttgcgaatgatggggcaagactggaaataccagatgggcctcttggaagcttgatagcagattgctgggcagaaccggagaggcgtccatgctgccaggagatcctgacccgccttcttgattgcgagtataccttgtgctgaggctttgcttctagtctgtatagcggttataggggcatcagacggtctggcttatatatacatcacttaattttccatttcacatacatcattgagggtgtaaattaccatgtattaataagcaaactttttctaaacctctttaatgctattgccccaaaatccaagaaaagttttcgcaaaaaaaaagccttgttcgagttctgtacgttttccctttatctatatcttagtcgctttctgaaataatgagatttcactttccaaataaatctatatgtgatttttttaacctttgtttgactaactgccgaacccaacgattcttccaggacccgacccaaacgtttttgattggatctctttctttctctctccctgagagcaagcagatgggatgtaagcttgtctatgtcattaaatcctacgtagagatgagagagaataagagaccgaagtgggcacccgatctaccgcacaactaaaacacgccatttccaaggttcgtttaacttttaatccat

SEQ ID NO: 2497 - DNA, 1761 bp, Zea Mays
ccattctagatcatatgggaggaatagagtgtagctcctaccaactcaccaataataatacggatgtaagaaacaaaagaatgtacaaagaaaatccaaatgaataaaaggagaaacaatgagtggaaaatgatatggagcacccaacagtatacgcatacgccaggcaccacatgtccatccgcgactccgcgtcggtatccgtcaagaaattttcaacaaaaaaaaaacttaattttccactcctattcttccccgacgccggggaccagcgccagcgccaccaagaagtgacccacccaggtagccaggtaggtaaccgcccgtgccccgtcgccggcgatggcgaggtacgaggcgtcggcggccgcgccgggcgtagactttcaccttcccgacgagatcctggccgtgatccccaccgacccgtacgagcaactggacgtggcgcgcaagatcacctccatggccatcacctcccgcgtctcccgcctcgaggccgactctgggcgcctccgccgtgacctagccgaccgcgaccacgccgaggccgagctccgtgcccgcctcgccgactccgacgcgcgcctggccgccgctctcgacgagaacgcgaagctagcgaaggaaagggactcgctcgccgcgacgaccaaaaagctgaccaggaatttggcgaagttggaggcttttaagaaacaactgatgaaatcgttaagtgaagataatctattgcaactgtctgaaaccagtcaagatcacaacggagaagatattttgacagctcgagtcccgtattggaaagatgaagtttgtagcagtaacacttcttcagatacctccatcagatctacaataactgaatccatccatggtggaggataccagttctcaatcaaaacatatgtgcctccaaaattaactcctggctcaacacctatgatttcgtcttctagtggttctccccgagcttattcaactggcccaccctctcccaacttcttctctggtccgacttctcctacaaaagctcgatctgagggccaattgacattttcgtcatggcaaggatcatcaagtcatcagtattcagcacctacctctcctcaacgccactcattcacagggcggccacgtatagatgggaaggaattcttccggcaagcacggacaagactttcttatgagcaatttggagcatttttggccaacatcaaggagttcaatgctcaaaaacaatcacgggaggacaccctgtcaaaagcagaagagatttttggaacagaacacaaagacttgtacatttctttccagaatatgcttagtcgcaaccagtcatgaaaaatatgtcagaagcggtattttctgtctctaaatcaagcaggttctcaagatcacattgtagagatctgtatgttggcaatcttaatccgaggcgtccgttctcaatgatttggagcggtgacttgagaatgaaattctcataactgccggaaaattagcccgtttgatttagcatacatccaatcattccctggcattcaagacttcttgtttgtctttctgctgtaaagatctttgagaatgaacggcgaacgaacttgaatttgcagagtgaagaccactccaagtcgagagagatcttgtaggcgtcggtcgcggtgggcacaggagatgtccgtagggagcttttggaggaccttctctttggaacaaacacaaaacatggtacacatttcaccaagcagcattggaagacgg

SEQ ID NO: 2498 - DNA, 776 bp, Zea Mays
gccccttctatataaaggccttcatttccgttcgaaaagccgcgtgcaagcaccgcagaaacaaacaaaaaaacacccgggaaatccaagcagctgttgcaaccggttccttcgaggagaacgtgagaaagaagcatgaggccccaggtgctgctcgtcgcactggccgtcttcgccgtcctcgtagctctgccactgggcaaagcgcacgaggaggaggaggaggaagggcttgaactcgaagccagcaggaggcggtggccgtgctgcgaccagtgcggcatttgcaccaggtcgcagccgccgatatgcgagtgcagggacacgtcgacgaccggctgccacccggcttgcaaggcgtgcgccctgtccatctccgacggcctcttcgtgtgcaaggacaagatcgtcaacttctgcaagcgccgctgcacccgtcgtactgatgatgatgatgcgtgacttataatctaagtgggcaaataaccttgccaataaataatttccgttcggagctccatttgcatctttctcaagatgcagacgacagggtttaaataatcaaggcgatgcttgcttgctcgtcgcctttttactcgtacagtttctgaaataaagagcatgggtatgttatgctcggagatatatgtagtcatgagacgtaaaagaatgcaatatacgctttggttatgtgcatctttagatgccatagaccgaggcatgattatttcgcggtgatagctaataacgcatggctactttagcgtcaaaacaaa

SEQ ID NO: 2499 - DNA, 1152 bp, Zea Mays
cctcgtgattcacctgcgcatcatccgtgcctagaaaaccagccgccgaagcagatagatgaaccgatgaaggcggacgctgtcgcaggctcgcgccccagcctcgctttataatggatcccaacatgaagcagcttcaagaggctctggttgatattgagactgatgcagaaaaagttcttctggctagacatcagttggtggaaaatgataagataagaaatggtaacagggaggctctgacagcccttcggaaacaagctaggacgtccaagactagcgtgccatctccctttgaggtcataatgaaagagatggaaggaagctctggcaagcagctgataaaggagatatgcccaacttgtggagatcatgaccccaaggaacatacttggctaatgtttcctggatcagatatgttttctcgtgttccatttcatgtggcacacactgttgtggaaaaagaccaagaacgcctggatttggataccaagaaactgcaaagctttgtcaaggagaaatcacttgtgattgcggagaaaggcgccctagcaggcagattcggtgctgacactgtaaaatctttggtcagccttacagacacaactaaatcaacacgggagggcggggaggtgaagtaccagttttgttgagtcgtcaactgttcagccacaatatatttcttggatatccggtgtttgttcggtatatcccctgccggaagggattgaaggggattggtgttgtttaactcaattacctgcagtccacaccaaactgaacaaggctatatgtatagattttctttgcttttgtttggaacaaaattttgcatggttgttagcaattgcgaaaaaattgttctcgattgatgtgtgtattcttatttgctgtgagattgtggcatagtcagtgtgtagttcctgatgatgagctgggtgtagtcaaaggttctcaatctgtagtagtcatgtttgaaactgaagtaaaggtgggtggcgtatgaatttattcattcagctattccctctgtcccagaatagttgatgttttagggttgtacatatgaatttataagtataaaaatgatgtggcgcattgaaaacaaggagaaatacagatatattgggaaaaaaaagatgtgagcccgga

SEQ ID NO: 2500 - DNA, 1907 bp, Zea Mays
ccccccgcgacagtcgccacgctcgcacgcactccctctgcaatagctgtcatgcgccctatctccgtcgcatcccgcccgctcgccacgcttgattcctcctttcaatggtgcccacgccgtccaatcccgcccgcggtccttccccacgcggatcccccacccctcctccccaccgccgccgcaacaaatccgcgcacctcgatctgctcaagtgagcgtggctcaacgagaaggccacgtcagatatcctcagcttcgaatcgcccctcgcgttacgtgtccgcgagcagatccagcacctcatacgctcttctccctcccccttcttgaccacgttcctccactcccccccatagctctgggatctggccatggctccctctcctggtgtcgtgtcacccaggaggcggcgctcgatgacttcgtcgacgatggcgttgacgacctggtggtctcgctctaccagatggacctcgatctcacgctcttcctcctccgctcctaactcctcccggagaagatcaagaagtacacgatgcatatctctagggccacggccgaggcgactggtgaagttgcggcaatctgatgcgggaggtggccgacctcatccttagcttccctgacgagacgcccgtcgtcgtcctctctgccatggggaagaccaccaataacctcctcctggccggagagaatgcggtgagctgcggtgcccccaaggcgtccgaaatccctaagctcgctgtcatcaaggacctgcatcttaggacggttgatgagcttggtttagataagtcgattgtttcagagaaatttttgaagtacttctggtggtgctggaacaagttgaaggagaagactgatgatgatattcccatgccagcctatttcaggttcctcgcgctgctcgcattcaagatattttctgctgagcaggtagatgttgctgttctcgaggttggcctaggagggaagtttgatgcaactaatgtggttaaagcacctgtagtttgtggcatatcttcccttggatatgatcatatggaaattcttggtgaccaaatcctgttcttggtgataaacttggtgtcgataaacgggttaattctgttggcaaaattaggatgacacaggttgttagttctcatgaatgtcatgttgtctcgaaataaagagcttctgtccgcacctaatcgcctaaaatggaaatgtttgactcattgtttaattcggggggaagctgaaggtggtctgatccggtaagagatcttaatctgcattacacttgttggattttgatgtcgcttctgggagtgtttgattgaattctacaccagttctaggaagagaaagcctgaccaagtcatcatctccaggtttgttattgtttggatgcaaaaatcgtcgttagttaacttttttgtgttgaagtaactgtttggttgagaaaattagttgcctatcttctattttctctgttttgttatagcagcaagctgatttgtgtctaatttatagggacgatgttagcgaaagtcaatttaatcaggtgctgaacattgagttgcaacaaatcatcgatggagactgtcaccgcagccagaaaaccacggtctcaatttgaggagcctttccatctatgtttgttagaaggcatataatgcctatttatctcttgtattcgaacatttggcaattaagaaatagaagattacttccccaatatcccttattcctaatctcacctttcacggcttctggtgaacaatcacttgctattaccgactgacatgtccactcctcatatgtgagatattggggttgatatatatgttgttcgtttccatgtaattattgtgtactaacatttattgaataatttttacgccgtaacaacgtacggg

SEQ ID NO: 2501 - DNA, 1219 bp, Zea Mays
ggagccccctttcgcacgtgcgcgctgaaaccggtcgccgtcacgcccgtgccgtcgccgctgtttcgcgttcgcgcggccgcccaccatttctgcgccccgcccccacagaaaagcttcgcccatgccgtcgctgccgacgcgctgctctcttcttctctgcccctcctcctcctccactcgttcgaacccgccatggccgcctccaagcccctgcggctacgcctcgcggtgccgctcgccctcgccctcctcctcgcgctcgccctcgtcaccaacttcctctgggcctcctcctcccgacgagtctccccgctgtcggccccgtcttcttccagaacggtgatggggaagagcgccaaggcagtgtggcgcctcaacgcgacgtacgcagacttgccggcgccgcactgggactgggaggagatgcccgcggcgcctgtgccacgcctcgacggggcgtcggtgcagattggggatctcctctacgtcttcgccgggtccattctcatgttgatgtttataatttcacctctaacacatggacccaaaggtttcatatgcccaaggagatggcacattctcatttaggaatggcctcagatggcagatacatctatgcagtttcaggacagtatggaccacagtgccgcgcctcgattaatcgcaactttgtttttgacactgagactagagagtggcatgggttgccccctttaccacttcctaggtatgcaccagctactcagctttggcgtgggcggctccatgtgatgggtggaggcaaagaggaccgccatgaacctggattggagcattggagccttgctgtcaaggatggcaaggcactggagaacgagtggcgagctgaagtacccataccacgtggtggacctcatagggcgtgtattgtagctaatgataaactatttgtgattggtggacaagagggagactttatggctaaaccaggatcacctatttttaaatgtgtacggaggcatgaggttgtgtatggcgatgtgtatatgctagatgatggagccaagtggaaggaactgtctccaatgccaaagccagattcccacattgaatttgcatgggttgtcgttaacaactccatagtaattgttggtggaactacagagaagcatcctatcaccaaaaagatgattcttgttggtgaagtcttccgttttgatttggaagcactgtctct

SEQ ID NO: 2502 - DNA, 2815 bp, Zea Mays
gtcctaccctactactcccccgtccgtctccgatgattcatatgccgtgcctttgcggagcagaaaagcagaggcatcaaccatcaacacacgctatagggtcctcctcccgctgctatttctctaatcgcatgcacatcacgttctcgtgtggaggagggcgtgctgcctcgctcgcacttgttgccattgcggatcgccagtagctaggcggaggcagcagctgaggattaagcagccaggttgcttaattattctgcccgcttcagaattgccgcccgtgatgagtcgtccgtcatccgtgaccttcgataaaagcaggagactttcttcgtcttagcattatccgccgagaaatagaggttagagcgagagcgggagacagttggaggccggccatccattgctggatccatctgttgtccaaggctgctgattaattctgcgacgagggtgcaacttgctttccttggtggcagcagatccagctccaggtgcgtacgtgcgtagcgccgtagcctcgctactagccactagccagcgcgcgctaagcagccgggcatccatgggttcttgcgtgtcggtgtcgtcgacgaggcaccggcggcggcggtcgaggaagctgtcggtcgcggcgaggaagttccggcggaagctgtccacggcgatcgccgccgacgcgccgatcgtccgcggcgccggcagcgcggcgacctgcctcgcccggcacggggtcgtccacgtggaggcgccggactccaacgtcaccctgcgcctcaccaagctgcagtggcagcacagccagatggacgccgggagcgtggtttgcgaagaagcgtggtacgattctgtcagcatcctggagtcgccggactccgacgacgatctcgacaacgatttcgctagcgtcagcggagaccctctccctgatgtcaccggcggctcggacgcaccgcagtgcaaggaggcagcgtgcttcttggacaccatgcagctcctcaggagcatcgcaaacgcagaagcatacgaccaaagtgaacaacctgctgacaagagtgacgacgacgactcgaacgtcgctgccactgcaactaataatagcggtagctgcaataatgacgagggctgctgcagtagtacactgaaggagcttcaggctgcaatgtcgccgcggccgttcccggcgtcggttccgagcaacaaggtccagccgatgccggtcgttggtgtcagcccggtcccgcccccgcaccagcagcagcagcagcagaagaagaaaacggccgtggtcaggctctcgttcaggcgaaggtcatatgagggcgacgagatgaccgaaatgagtggttctgcgaattatctgtaccgcccaagggcaggtttcacggtgccgtgttcgaccggcgagaaactgccacaaggttgctggtcggttcttgagccatcgacgttcagagtccgaggggagagcttcttcaaagacaagaggaagtacccagctccaggctgctccccttacacccccatcggagtggacatgttcgcctacacgaggaagattcaccacattgcgcagcacctctcgcttccgtctctgaagacacacgagacatttcctaccctgctcatcgtcaacattcagttgcccacctaccctgctacagtgtttggcgataacgacggcgatgggataagcctagttctgtatttcaagttatctgacagttttgacaaggagatttctcctcagttgcaggacagcataaagaggctcatgaacgaggaaacggaaaaggtgaaggggttcccagtagacagcattgtgccctacaccgagaggctgaaaatcctggctggtttggcgaaccctgaggacctgcaactgagcaccgcagagaggaagcttgtgcagacctacaatatgaagcctgtgctatctcgcccacaacacaaattctacaagggttcaaactactttgagatcgatctggatgtccatcggttcagcttcatatcacggaaagggctcgagaccttccaggagcggctcaagcatggcgttcttgatcttggtctaactatccaggcacagaaggctgaggagttgccagagcatgtcctgtgctgcatgaggctgaacaagatcgacttcgccaacaacgggcagataccgacgctgataactgcagctgatgagtaaatctgtcctgttactgtaaggcgctaactttctggaaaagcaaaagagactgttgcttttcgagatgctgttgtatagatcggcagatagttgtagggactaactcaagtttgtgagctaagaaacacctaatcactgaggagggaaaagaagatattgcagcaatctgcattctgaactctgaagacgatgtgtatacatgtctgtgttttctttttctttttttgaaacgaaatacatgtctgtatttccagttcaggcttactaatgttgcaggtacatcaccacaccagttctttccttgttccttccatcctcagttagaaaattttcttctcatgagaaaaagacataaaaacgtgaaaagaaaaagacaaataaagaggaaacaaatgtacataccatgcagcacaatcacatgtttagccgaaaccaacaagtcagctcatcttcaacagttgaaatctaatcgaataaacaattatccggcagaaaacacatgcccaaaagaatcaatggtgcagcctctcttattcacacacccagcaaagccacaccacagaggccaatggccagtcactcatttcccggctagcactcctccatcagctgccg

SEQ ID NO: 2503 - DNA, 3236 bp, Zea Mays
ttttttttggttggatgcagcatgttgtgttgtgtgtgtaaatgtggcagggcgagggagcaagtctctcattccttttgctggagtcccgctttaaagccacgcgcgcgcgtacacaacgcaagcgcagaagaagacttgcccttgcccacctcctcctcctcctcctcctcctccgccgccgcgcgcttcacacccctcatctcctcgcggcaatggccaccgcaccgtgcgctccccaatgattgctgctccactccgacgaccgatcgccattgccgcgcaagcaggttgtgttactagcttgctgtcgcttaggtagttttgtgttttagcttggttcacacgatgaccaacgaaaacaatggcaacggcacgaaccccgcgtcggcgagcggctggctaggcttctcgctgtcgcctcacatggcttccgccatggacgaacaccagcaccagcaccagcaccataatggcctcttcttcccttccgtcaccgcggcatacggcctcggtggcggcgacggcgtggtggccgccagcgcgtcgccgtactacacgccgcagctggcgtccatgccgctgaagtccgacggctccctctgcatcatggaggcgctccgcaggagcgaccaacaggatcaccacgggcccaagctggaggacttcctcggcgcggcggcgcagtcgcaggccatggcgctgagcctggacaaccccgccgccgccgcctccagcttctactactacggcggcggcggcggtccggggcaccagcacgggttcctgcagccgtgcggcgacctgtacggcggaacctcggccgcgtccctggtgtccgcggacgacgaggcggccgccgcgacggccatggcgagctgggtggcggcggcgcgcgccgagagcggcgtgctgtccgccgccgcagccgcggggcaccaccacgcgctggccctgtccatgagctccgggtcgctgtcgagctgcgtgaccgcgcaccccgcggcgcccgagtacggcgcggcggcggcgctggacggcgggcgcaagcgcggcggcgcggcggggcagaagcagcccgtgcaccaccgcaagtccatcgacacgttcgggcagaggacgtcgcagtaccgcggcgtgaccaggcataggtggacggggaggtacgaggcgcacctgtgggacaacagctgcaagaaggaaggccagaccaggaagggcaggcagggcgggtacgacgtggaggagaaggcggcgagagcctacgacctggcggcgctcaagtactggggcccttccacgcacatcaacttcccgctggaggactaccaggatgagctggaggagatgaagaacatgacgcggcaggagtacgtggcgcacctcaggaggaagagcagcggcttctcgcggggcgcgtccatgtaccggggagtcacaaggcaccaccagcacgggcggtggcaggcgcgcatcggccgcgtctccggcaacaaggacctctacctcggcaccttcagcacgcaggaggaggccgcggaggcgtacgacgtcgcggccatcaagttcaggggcctcaacgccgtcaccaacttcgacatcacgcgctacgacgtcgacaagatcatggccagcaacacgctgctgccgggcgacctcgcgcgccgcaggaaggacgacgccagcgacgacaacccggcgcccgccgccgcagccgccatcgccatcgccgaaccggcggcgcatcagcctgccgccggcgtcaacgacgccagcgagacgtggaagcatgtggtggcatcggcggcgctggccgccgcgccgcgggacaaccaccaccaccgccaccacgacgtgctgtccggcgaggccttctccgtgctgcacgacctggtggccaccgccgcggacggcggcgccggccaccaccaccaccacgcccacagcgccgcgcaccacgtgcccatgtccagcgcgacgtcgtcgctggtcaccagcctcggcaactcccgcgagggcagccccgaccgcggcggcggcctgtccatgctcttctccaagccgccgcaggccgccaagcccatgagcccgctcatgccgctgggctcctgggcgtccgcgacggcgtcggccagggccgccgtctccatcgcgcacatgcccgtgttcgccgcctggaccgacgcctgatcgtaccactcgatccaccgattcatgacatggccagcggccggccggttccaccatgcattatgtgccactccggccgaccgacggacggctagccacccaccacgtaacccggccgttctagctcggtgcacgtccgcgcgctagctctccaccgggttgcgtcgctggacttcttcacaccacttagttgattttaattacggttcttgggaggtagtgagttcattagttaattagctaatagccatcggaggagattggtcagaagctagctaggcgatatgatggaagggcaggagcgcacggcgcgcggcctctgctgtttccttcttctccggctccgtcgtgtgcggcccggacaaggaggggttttgtaaaatggaggccggcggagatcggatcacgtgcgtctactctaaaatctatatccagaactaatccactactaatgttaagtcatagcctctttgaattctcttacatatcgagctccggggcttcaacccgtctgaaccactggcatatgggtccggatgcagatttcaagcatcgcgatccacctgcctcacgctaaggtatacaagataaacgtgtacctttgttaacatgtaaaccgaatattgacgtggtgtgccatgttagagcatactaataaaagctcgaagatctaaatgacaaacatctaagttcatagatttaaataacacaacatgccaagttttagatcctaagtggctccaacgtagctacatcgacatccgattttgcaaacctgactttggatgttttcacatgagccgacaaagttctatgacccgtttttccggttttttgagttcgagcctaagtgatacaacgtgccaagttcgaggactgtcaatgcactttactgatagattctgatattcgacaccttttttaagtcatttgaaaaaatgagtcattttgatatacgacgagtgaacctgcgatcagtgaaccatatacatttgcattaattgtatatcagtataatgttcgtgtgttgtgatggtacacaatcg

SEQ ID NO: 2504 - DNA, 3259 bp, Zea Mays
tctctttctttattttttttttggttggatgcagcatgttgtgttgtgtgtgtaaatgtggcagggcgagggagcaagtctctcattccttttgctggagtcccgctttaaagccacgcgcgcgcgtacacaacgcaagcgcagaagaagacttgcccttgcccacctcctcctcctcctcctcctcctccgccgccgcgcgcttcacacccctcatctcctcgcggcaatggccaccgcaccgtgcgctccccaatgattgctgctccactccgacgaccgatcgccattgccgcgcaagcaggttgtgttactagcttgctgtcgcttaggtagttttgtgttttagcttggttcacacgatgaccaacgaaaacaatggcaacggcacgaaccccgcgtcggcgagcggctggctaggcttctcgctgtcgcctcacatggcttccgccatggacgaacaccagcaccagcaccagcaccataatggcctcttcttcccttccgtcaccgcggcatacggcctcggtggcggcgacggcgtggtggccgccagcgcgtcgccgtactacacgccgcagctggcgtccatgccgctgaagtccgacggctccctctgcatcatggaggcgctccgcaggagcgaccaacaggatcaccacgggcccaagctggaggacttcctcggcgcggcggcgcagtcgcaggccatggcgctgagcctggacaaccccgccgccgccgcctccagcttctactactacggcggcggcggcggtccggggcaccagcacgggttcctgcagccgtgcggcgacctgtacggcggaacctcggccgcgtccctggtgtccgcggacgacgaggcggccgccgcgacggccatggcgagctgggtggcggcggcgcgcgccgagagcggcgtgctgtccgccgccgcagccgcggggcaccaccacgcgctggccctgtccatgagctccgggtcgctgtcgagctgcgtgaccgcgcaccccgcggcgcccgagtacggcgcggcggcggcgctggacggcgggcgcaagcgcggcggcgcggcggggcagaagcagcccgtgcaccaccgcaagtccatcgacacgttcgggcagaggacgtcgcagtaccgcggcgtgaccaggcataggtggacggggaggtacgaggcgcacctgtgggacaacagctgcaagaaggaaggccagaccaggaagggcaggcaggtctatctcggcgggtacgacgtggaggagaaggcggcgagagcctacgacctggcggcgctcaagtactggggcccttccacgcacatcaacttcccgctggaggactaccaggatgagctggaggagatgaagaacatgacgcggcaggagtacgtggcgcacctcaggaggaagagcagcggcttctcgcggggcgcgtccatgtaccggggagtcacaaggcaccaccagcacgggcggtggcaggcgcgcatcggccgcgtctccggcaacaaggacctctacctcggcaccttcagcacgcaggaggaggccgcggaggcgtacgacgtcgcggccatcaagttcaggggcctcaacgccgtcaccaacttcgacatcacgcgctacgacgtcgacaagatcatggccagcaacacgctgctgccgggcgacctcgcgcgccgcaggaaggacgacgccagcgacgacaacccggcgcccgccgccgcagccgccatcgccatcgccgaaccggcggcgcatcagcctgccgccggcgtcaacgacgccagcgagacgtggaagcatgtggtggcatcggcggcgctggccgccgcgccgcgggacaaccaccaccaccgccaccacgacgtgctgtccggcgaggccttctccgtgctgcacgacctggtggccaccgccgcggacggcggcgccggccaccaccaccaccacgcccacagcgccgcgcaccacgtgcccatgtccagcgcgacgtcgtcgctggtcaccagcctcggcaactcccgcgagggcagccccgaccgcggcggcggcctgtccatgctcttctccaagccgccgcaggccgccaagcccatgagcccgctcatgccgctgggctcctgggcgtccgcgacggcgtcggccagggccgccgtctccatcgcgcacatgcccgtgttcgccgcctggaccgacgcctgatcgtaccactcgatccaccgattcatgacatggccagcggccggccggttccaccatgcattatgtgccactccggccgaccgacggacggctagccacccaccacgtaacccggccgttctagctcggtgcacgtccgcgcgctagctctccaccgggttgcgtcgctggacttcttcacaccacttagttgattttaattacggttcttgggaggtagtgagttcattagttaattagctaatagccatcggaggagattggtcagaagctagctaggcgatatgatggaagggcaggagcgcacggcgcgcggcctctgctgtttccttcttctccggctccgtcgtgtgcggcccggacaaggaggggttttgtaaaatggaggccggcggagatcggatcacgtgcgtctactctaaaatctatatccagaactaatccactactaatgttaagtcatagcctctttgaattctcttacatatcgagctccggggcttcaacccgtctgaaccactggcatatgggtccggatgcagatttcaagcatcgcgatccacctgcctcacgctaaggtatacaagataaacgtgtacctttgttaacatgtaaaccgaatattgacgtggtgtgccatgttagagcatactaataaaagctcgaagatctaaatgacaaacatctaagttcatagatttaaataacacaacatgccaagttttagatcctaagtggctccaacgtagctacatcgacatccgattttgcaaacctgactttggatgttttcacatgagccgacaaagttctatgacccgtttttccggttttttgagttcgagcctaagtgatacaacgtgccaagttcgaggactgtcaatgcactttactgatagattctgatattcgacaccttttttaagtcatttgaaaaaatgagtcattttgatatacgacgagtgaacctgcgatcagtgaaccatatacatttgcattaattgtatatcagtataatgttcgtgtgttgtgatggtacacaatcg

SEQ ID NO: 2505 - DNA, 1788 bp, Zea Mays
ttattaaaatttgatttgaacctcacgatgcaaaggcacacgcgaatccgccccgcaatcgctgtcgtcgattctcccatctccactaaaagcatccgttggacggctggagtcattccggcgactcgagaaccgtccgacgtggaccaccaacgaaccgggaaatgcccgcatcttccagattctatacttccgccacgtgctccctcgcctccgcctccgcctcctcccgttccccacctcgccgccgccgcgtctccctcacgggccagtccccgagtacccccctcacgcgccacagtcgaaaccaaagcagctcgcggtggccacacccggacctcgggctcgacatggggttcctgctcgtgcgcaagccgcgtccgagggacgagaagccggacctggtgaactggatgcggtgcttcctgtcgcagcgtctgtctcagcccgccgcggcggcggaggagaccgcgaacgcggagggtaaggccgccgggagacgagaggaagaggagggtggcggggatgacgctgaccacctcgtcgtcatggtgaacgggctgtacgggagttctgcggattggaagtttgcagcagagcagtttgtcaagagattgccgggaaaagtctacgtgcatcgtagtcagagcaattattcaaaattaacatatgacggagttgacttaatgggtgaaaggctagcagaggaggttcgacaagttgttcagaggagaagaaacttgaggaaaatatcttttgttgctcattcacttggcggcttagtaacaagatatgcaataggaaaactttatgaacctgccatggatgaaacatcttcttgtgacattgataagccttctgatgaacaaaatgtacgtgatgttggtaaaatagctggtttggaaccaatcaattttattacatctgctacacctcacttgggctcaaggttgaataagcaacttcccttcctttttggtgtcccacttttggagaaaactgctgcaggaacagcacattttatagttggaagaactggtctgctttgcgctgtttcaagcgtcgtgttgcctatgctaatgtaacatatgatcatatagttggttggagaacatcatcgcttcgacgtcaacatgaattaccaaaactcaagctaacagcaaacgatgaaaagtatcctcatattattaatgtcgataaaggaaatctagaggatcatcggcaagagggatctgtagaagattcactggcagatagttatgaagaggtgatgatccgtggccttacacaagtggcctgggaacgtgtggacgtatgctttcataagagttggctaagatacaacgcccataataacatccaggttaggatccatccaattaattcagatggagaagacgtcatataccatatgatagacaattttgtagtgtagccaagtagtccgtccggtgaatgccaactactacgtaaaagattactgctatttccagtggattcgccttgagaggtcattaatcttttaccatgtgggttgctatgcacaacagctagataattggcatcaatcagcacgtaactcatacgtgctgctaggtgattcgagcgtaggacctgtgcttgttggttgttgctggcaatgtaaatataagtgttaggtaatgcaaatatttgcatgacagtgcatattcttgtaaatgggaatttaccatgttattggaaatccaaagttcaaactatctcaagcttgttggttgctgtgctgaaataaaaaagatgttccttttc

SEQ ID NO: 2506 - DNA, 1109 bp, Zea Mays
gtggacatgaaaacattgatatggggattgagatgctgtcattgggatcatttaaaaccagagtcattctctcgtcgtgtttgcaggcctttcagattgaaccgattacttcaacggtgtcatacatgattggtagggatgtgatggaggggagggggcaatgcaggtgcaggtaaaatttagaattttaagagcataataccctggttgtatttggcttgggagtaagtggatgttagcaatagtggagcatgtgtgggaagcggaggctgacgacagctcttacgttatcaaggaacaaacttatcctgagaaagtgctcacacgtggaacacagactactctttatttgagagatgatgacaagtatgagtttactgaccctgcaagaattgaaagcttagttaagaactgctcacaatttgtgtcattctcatatatacatggaaggagaaatcaagaacatttggggtctaaagagtctaaagaggaggaagaataaaaaaaggtgaagaggtcactgaggtgttgtactgtttcttagaattatccagcaacttcgatgggaggaattttgtttgagcttgtgggcccaatttgagaagttttacatatagagtaaaaaaaggtcctgctctcgtgttttcgtgtaaaactggattttgttcagttcttactgtggagctatgcttcctagataaaacttctcgatttgtataacttctcgatttgtataaaaacttctccatttacatattgggaagtctatatgtaaaacttctcgatttatatatcaactatgcttcctgtggagcaaggaagcgaacgcaagctagccttttgtattagtgcattctgttcagttcttacttgatcatcccgtgttctcgcgtgtgccatggctgagtggcaagctcaacactggtattgttgtcttgtctcaaatgaagtccggttccacaagttaaccggaaatcttcatgggtgatagctgcgtcagattcttccgcgcatagggcaagtaatgcaagtgatagctgtgtcagtttacccccattttcttgggcatcacttgtctcaaatgaagtccattggaggttcgcaattta

SEQ ID NO: 2507 - DNA, 2725 bp, Zea Mays
gttcatctctgccgaggagctcggcaccgtggtgtgctcgctcgacctgcgcactacctgaagacgcattatgctgctattgtctccctcgtcgttgcctcgtgggtcacagtgctcctccactccctcgtcagccacaatgacagccaacaagactggtgtccaggagactgaaaagcactgctgaggagactgaaattatcttcgcgaggtggattacacattgtaagaactaagaactaaatctgttttttcttcttcttattttaaagaggaccaggtctcctgcattcttggaaacaagagacgatctcagattatcactaacttttttatgagctataaatgtgctctgcttaacggacatcttaaggaccacagattcagagaactatggattcatataaaacggcatggaactgattcaaaagaacatgaagtccagtgtgatttgaaaatttgggtatagctcagaagagatttgtgatgattcgaagtatcaaagaaacctgcaacatcaagaatttaaaaatgaaggtgactcgttcatctttgagacgcagcgccacaatggcataagggagctttgccctgcgaatggagagcacaagctaatccgtgcccgtgctctcatccccctgcatgaacccaattctgttgcgatcaaccatcaagggttgtcctattgtattattcagttcattgaaaaggactacaaattagcagatactatgatttggggtctactcaagcattggccagtcagaaactgccaagaggtaattggttttgaccaaattatcaactagatggctctatataaaatggcacacggaattggctgtgagcctgtctgtcaatgtccgaaacgacggcaggcgtgaagcggtggtcgggaaggaattaatgagtagcagcaatgcgtcagacagctacgtatcttcttccgcaatcccattctgacttaattaataaaacaacctttataatagtattatactgactcgatcgtctccaaagtctgaagcaaataaagggtgggtgcgtctccacctatacatatagtataatagtgaggtacccgtagagaccatataaatcagagggttttatatttcaccatttgataagaaaatactcgtattaggaagcttcaaaaaggagaggatattggatcttctatatatcttactttgtcctttatcattttcaaatgccaatcagtgaacaccaaatttcaggtttgttaaatgcctgttaccagtcaggaatgatatattatcttcggataataaataaaataactgggaactaggaattgtaccactatgctgtgtacttagttcctatgtaattctaattccttggtttattcttcaataactaggactggacaagagcttttggacatggttgacagtttgcccattgttgcgataaagagcctaaaagtatctgacttccaaggaacgatagctctctgcccagccaccagttttgagttgtattgagagcaaaaattcacatgctttccgaatgcaaatattgttctcataatttctcccagcagcaactaagccatttatcgcatggagggtcccatagataaaacatattccccaagtgccataccttgcaggggattgagatgctgtcattgggatcatttaaaaccagagtcattctctcgtcgtgtttgcaggcctttcagattgaaccgattacttcaacggtgtcatacatgattggtagggatgtgatggaggggagggggcaatgcaggtgcaggtaaaatttagaattttaagagcataataccctggttgtatttggcttgggagtaagtggatgttagcaatagtggagcatgtgtgggaagcggaggctgacgacagctcttacgttatcaaggaacaaacttatcctgagaaagtgctcacacgtggaacacagactactctttatttgagagatgatgacaagtatgagtttactgaccctgcaagaattgaaagcttagttaagaactgctcacaatttgtgtcattctcatatatacatggaaggagaaatcaagaacatttggggtctaaagagtctaaagaggaggaagaataaaaaaaggtgaagaggtcactgaggtgttgtactgtttcttagaattatccagcaacttcgatgggaggaattttgtttgagcttgtgggcccaatttgagaagttttacatatagagtaaaaaaaggtcctgctctcgtgttttcgtgtaaaactggattttgttcagttcttactgtggagctatgcttcctagataaaacttctcgatttgtataacttctcgatttgtataaaaacttctccatttacatattgggaagtctatatgtaaaacttctcgatttatatatcaactatgcttcctgtggagcaaggaagcgaacgcaagctagccttttgtattagtgcattctgttcagttcttacttgatcatcccgtgttctcgcgtgtgccatggctgagtggcaagctcaacactggtattgttgtcttgtctcaaatgaagtccggttccacaagttaaccggaaatcttcatgggtgatagctgcgtcagattcttccgcgcatagggcaagtaatgcaagtgatagctgtgtcagtttacccccattttcttgggcatcacttgtctcaaatgaagtccattggaggttcgcaattta

SEQ ID NO: 2508 - DNA, 1609 bp, Zea Mays
tttctctcgtcccaaaagcttgcttcgcgctttcgaaaaaccacaccaagtcgggaaggcagaggcacagggagggagccgacagccgagagcaccttccgattccgcccaagaaatctccacccaatctctctgtcctctcctcccttctcatcatttcgccatgctgccatcgcacctcaacggccactccgccctcgggcgccgtcgcccgcgcctctccgccgccgccggggagtctccggcggcagcgggggtagaggcggcggctccgctggaggagcacgaccgcatctacttccaggcctactcccatctcggcatccacgagactatgatcaaggaccgcgtaaggaccgatgcttaccatgcagcgatcatgcgccaccagaaatttatcgaggggaaggttgtgctggatgtggggtgtggtactggaatactctctgtgttctgtgctcgtgctggcgcaaagcgagtgtatgctgtcgaagcctgtgaaattgttgtccaggctcgtgaaattgtaaaagcaaacaacctaactgatcagattgtggtcatccatggacgtgttgaggatgttgaccttgaggaaaaggttgatgttataatatcagaatggatgggctatatgcttctctatgagagtatgctgccaagcgtcctatttgcaagagataaatggcttaagcccgggggtcttattcttccttctcatgctacgctcttcatggcccccgtaacaaatcgtgagagatatgaagacagcgtcgatttctggcgtgacgtctatggcataaacatgtctgctcttgtgccacttgccaaaaagtttacatctgaggaaccctccattgaaacaattggtggagagaatgttataagttggccatctgtgctcccattcatggctttggtttctggtttgaggtggagttcaacgagcctatagagtcctctcataattttccttccagtttggatccacttgagattatacagaagaaaaggagacgatcctcagaagatatagttctgtccacagccccagaggatgagccaacccactggcaacagaccattttgtatttcccggatcctatagaggtgaagcaggaccaaattatagaaggttctgtaacagtgtcccaaagcgaggagaatccacgttttctgaatattcatctagagtgcttcacaggaggacagacattggttaaggactgcgccatgcgatgaactggtgtttttatgcttctagtggcttgatttcaggcgcgcaatggggtgttggcagggaggagctgacaatatttcagatttctttaatggaagtggagaatttgtactatttatgccaattatccgtctaatacgaaggcaggattttagtaattgtactccgtcttattctatagagtatatactggttgttgattttggatccgcacgctgtgacctaagtctcgcatccaagggtccctttggaacaaaggaaacatgaaggatttttttatgatccattccctatcggaaaaattcccacgtgagtctttagaccacattatccaattctgtcaattcctttgaaacttctatagattgc

SEQ ID NO: 2509 - DNA, 2008 bp, Zea Mays
agttattactcaaaatccatgccattaaaaaggacttcaactccaagcggaacacttctactcccgttgttaaacggcactaccaacgaaacaacgaggaagaaggccgggagaggaaatcctttggcggcgcgcgcacgcgcggcagacacgtccacatccactgcagcgacgagccagccggtccgcggtcagcagcttggcagcagccccactctggctcccccctccgccatcactgcgcttgtgcgcgcgcacccacccccgcggcccgctcatcacccgcccggtcccgccgcctatttaacgccgcccccaccggggcactcggccctctccgtctcagaacgccccagccttccacctcgaactccgcggcgcccagcgccctcggtaaccgccccccgccccgccacagagacaggtcgacgagacagacaaaggccggccgccatgggagaggacaagaaggcgggcaacaaggacgccgccggcggcgacaagaagaaggacgccggcgccggggccgcgccgcagcccatcgtgctgaaggtcgacttgcactgcgccggctgcgccaacaaggtccgcaaggccatcaagcacgccccaggtgtggagtcggtgacgccggacatggcggcgggtaaggtggtcgtgaccggtccggcggacgcggtggagctcaaggagcgcatcgaggccagggcgaagaagcccgtgcagatcgtctccgccggcgccggcccacccaagaaggagaaggacaaggagaaggagaaggataagaaagcggacggcggcgagaagaaggccgacaaggagaagggtgccgacaagcccaaggaggagaagaagaagcccaaggaggagactgtgacgctgaagatccggctgcactgtgacggctgcatcgagcgcatcaagcgccgcatctccaagatcaaaggcgtgaaggacgtggcgttcgacgccgccaaggacctggtgaaggtgaccggcaccatggacggcgccgctctgccggcgtacctcagggagaagctcagccgggacgtggaagtggtggcgcccggcaagaaggacggcggcggcggcggtgacaagaaggacaagggcgcaggagacgggggagataagaagaaggacggtggcggcggcggcggcggctccaggcggctactacggtgccgccccaccgcccaaccaccacgccggcttctaccccaacggcggcggcgtccattacccgcccgcgccagcctacgcgtacggccccacccacctccacgcgccccagatgttcagcgacgagaaccccaacgcctgctccgtcatgtgaactcgctcgcttcgccggtttgccgccgccgccgcgccttggcacccccttcctccgtgtgagaccaagaaccatgggcttgtcctggattagcggtgtctttagttaaaattatcagtgagtagtagctagcttaagcagtgctccgatccgagatcagttcttccagcagacctgtgtaaatgagagtctcgccgccccgccccgccccgccccggtgtaacgcatcgtcatgtgtaaaatctatccggacccgataaagttttgcccttctgtcatcgctaatcgccatttgcgacgccgctgatagtgctcagttaacggccaagttggacgtggtgtcgtgtcgccgtcgacggtgaggtcagcgacgtcggtgagacccgcaggagggttcgagacgcccgcccgcccgctttggccgctcctgccgacgtccagacgggggtgatcatcgcgtcggcgctcacagcgtctgattgcggtaggataattagtcggggtcactagcgctaatgcgggttcttccttgtgcacggtagtgtgttgtcttgtgggtctggaatagctaagggcatgtacaacctagatacagctgcacggtactccaagtataagacacagctaaaacacaacataatacagtggtcatgtctaaaacatgtg

SEQ ID NO: 2510 - DNA, 2542 bp, Zea Mays
gacgaaagctgccgcagtcaaacagcgaataaaagccaaagccaccaggccagcaacaatagaagcgagcgagcgagcagcagtaggcagcggcgcgggcgaggagcagaccagcacccagcagccctcgtcggggggcggcagctgcagcttcaccagccgccgcctttccccgtctcctctgcctctgcctctccccctaacccccttccatttctccaccccaccccgctcccgcttccgcttcctcgccacttagttcgttccgcacccgcagccgcggctgcgttcgcattgggggcacgcaatggagcagtacgagaaggtggagaagatcggggagggcacgtacggggtggtgtacaaggcgctggacaaggccaccaacgagacgatcgcgctcaagaagatccgcctcgagcaggaggacgagggcgtcccgtccaccgccatccgcgagatctctctcctcaaggagatgaaccacggcaacatcgtcagattacatgatgttgtccacagcgagaagcgcatataccttgtcttcgagtacctggatctggacctcaagaagttcatggactcctgcccggagtttgctaagaatcccactttgatcaagtcatacctctaccagatactccacggtgttgcgtactgccattctcatagagttcttcatcgagacttgaaacctcaaaacttattgatagatcggcgcactaatgcactgaagcttgcagactttggtttagccagggcatttggaattcctgtccgtacatttactcatgaggtagtgacattatggtacagagctccagaaattctgcttggagcgcggcagtattccacaccagttgatgtgtggtctgtgggctgtatctttgcggaaatggtgaaccaaaagccactattccctggcgattctgagatcgacgaactttttaagatattcaggatactaggtacaccgaatgagcagagttggccaggagtcagttgtttgcctgacttcaagacagctttccccaggtggcaagctcaggacctggcaacagtagtcccaaatcttgaccctgctgggttggaccttctctctaaaatgcttcgatacgagccaagcaaaagaatcacagcgaggcaagcacttgagcatgagtacttcaaggaccttgaagtggattgctgacgttcgcatctccgcatcttccttggcaaagctccaccaaaggtacgaaagggggatagccacagcaaggcatatagcacggccatccacatatccccatcgcggaggaatgtcagaagcttccagaagtaccgcagccgcacctccgatggcaacaaatatgatcttcagccgtgaaggatgccgagtcatgacagcccacagtgcccataggagacactgagcaatgattatcacagtacaaaccttcatgttcaggcctgcagattttacaagcgtaaccgcgtaagccactaatacgtgctactccctatgtcctagtatataagatgtaagttacattcaaaaacaaaaaaaaatgtatttaattctctctatactactgcatcaatgtatacatgtctagaaagagcatgtcttatattatgaaactagaataaaaatcgttacgtctttatgtactaggatagagccatggagggagtacatccattcgctgttaaatctccatatcccatgaaaacaggaaagaaaatgtctagttataaggtaacaactaacaggttataagaccgtgtccagcagttcatccatatgatcacttaaaacattgttttgtactgttcacagagtgaagtttgaatatgagtatgagtatggataagcaggatagcctaaagcaccatgttacctacctaccatggaacaacaaacaaattcttgaccccattaattggcgagctttatctttggatgaactaaaattcaatttgaaacccctttggaacagacaaaaaaaatggaggaattataaaaagaacggaatcctaaaggtaaatttcctatgaagacctttagaacataagattgggtttcgatgaatcctacaaaaattccagtggaatagtttgtttcataagaattttggatgaattctaccaataggttgaacctcatggaaattggaacggttcctttgtgtcactctcattgaattcctgtattttttttctgtgctccatccagacattcaatcttgcaatttattgagggcctgtttggaacgcaggttaagggcctaagtattttcagtccatacgattcaagatgttggtgcattatattcctatgcttttcctattcctgtgtttgtagaatctcgcatttcaaagaggctgtattttttttgtacacataactcagtaatcaaccagtcaggtactaagattccaatctagcatactaatggaattttatatatcatataatctgggttacatacttagtgctggtaaaaaaacaaagtgtgcagaaacaataccgctatttttatagtgtcaggagtgcaag

SEQ ID NO: 2511 - DNA, 1619 bp, Zea Mays
tggcatgtgaggcttaagttaggacatttaactgctggatgcgatgctaaattgtgacatttagtgcataatgatgacaaggagaaaccaacacatttgagatttctagtgtctaatacggcagcagggtgcatcattggcaaggaatcatcatggtttctggactgtttgatgaagtaatgaaggccatggagctgattcttgagaaactgttggctgagggtgaagaattcaacgaagcagaagctagacctaaagttagacttgtagttcctaatagctcttgtggtggtataattggtaaaggtggagcaacaataaagtcgtttattgaagaatcacatgctggaatcaaaatctcgccacaggataacaactatgttggtttgcatgataggcttgttacaatcacagggacctttgataaccaaatgaatgcaatagatttgatactgaaaaagttatctgaggatgttcactatccacctaatttgagctccccatttccttatgcaggccttactttcccaagctaccctggtgttcctgttggttatatgattccacaggtgccatatagtaatgctgtgaactatggacctaataatggttacggaggaaggtatcaaaataacaagccaactacacctatgagatcacctgctagtaatgaagcccaagaatctttgaccattggtatagccgatgaacacattggtgctgttgtaggtcgagcaggaaggaacataacagagatcattcaggctagtggtgctcggatcaagatatcagataggggtgactatatatctgggacatctgacaggaaagtgacgattactggaacacccgaagctatccggaccgcggagtccatgatcatgcagagggtgtcagccagttcagagaggtgatgagccccttctgaaggaagggcgtaggccattgctgtgtccgagcacagcagcgtgtttgatgcaagttaggaggatgtgggaactgctttccttttattttccccccttttttcttttttcctagcaagctcgagcagaaaaaagaaacaagctgttattgtttgttgcattgcgtccaaccgatggttttatgttagtataaactgctagtcgaagataattaggtgcagcgtttgaattgatttgggtttacggttgagttatatcccgtgtatgccataacaaaggcagtcgccgctctgttgctagtggcaagcgctgcctgtcctgtgtctgtttgtacgttgacaatttgattccgttgctcaaggatagaagaatattgatacaggagacccgaggactggtttggtttttgcagtgcttttgagtcgtgtgtgtagatctgtgctactgaggtgctatcttttacgtgatcaggaagagtatcggtggaagctttcaggtgttccattcacccatctgcgtgttgcgggtctcggcggttggcgaccgagcgtgtttgcctgcagtattgggaaacctgtctgactgagacgtctggctggatcgagctgcctggccgcggctcctatcccaggtcaagacaacgactaaacagcaaaaaccattaaatggatgtactgtgcaaaaaaaaaaaac

SEQ ID NO: 2512 - DNA, 2434 bp, Zea Mays
cgccgaatcctctcccggcaccgcaaccgctgttcctctgcgcggaacgcgcgcgcgccacagccgatcagccaccgcaggattcctcgtccaccgcgaccattcggcttctccccaatcccggcacggcggcacgggacctctccctctctctcccgctggcgggcgatggcctcctcctcctcctcacctgcgcccgccctggccggggaggcgctacgccagaaacgcatcctctccagcaagctctacctcgaggtcccgtcctccaaggcgccggtggtttactcgccggcatacgacatctccttcctcggccttgagaagctgcacccgtttgaatccgccaaatggggccgcatctgtaggtacctcaccagggaagggtacctcgacaagaaacagatggtggagccattggaagcctgcaaggaggatttgctagtggtgcacacggaggcgtatttgaacagtctcaaatgcagcttcagagtttcctccattgtagaggtccctcctgtgtcgcttgtccctaattggattgtgcacagaaagctactacaccccttccggaagcaggtgggtgggtccattttatcagccaaacttgcatttgagagaggttgggctattaatgttggtggaggatttcaccattgttcagcagatgaagggggtggattttgtgcatacgctgacatctctctctgcatccagtttgcttttgtccgtctaaatatctcaagtgtattgatcatagacctggatgcccaccaaggaaatggacacgaaaaagattttgctaatgatggaagggtttacattttagacatgtacaatgctggaatttatccctttgtaagagtctacatcatcaccctcactccttagatatatgtagtatatgaagctatttttcttttgtgatctgttgctcttatatattgtcattatgaaatgcatattgatggagatattacttatgcggaactttcttatctcacttcttgaacaagttttattgttaaaccctaaatgtacaatcatctttttgaacaagctcttttgtgcagcatttagatgatgtaattgttcacagatcgaaattgaaaaacagcagtttttgtctcgaacgaagtaggagagatacgtgttatttcatatagaagagaaaaaaatagtacaaggagagatcaaaagacctctccaagagaaaaacagcagttccatccaactgttatactgcaatgaattccgacggtatcatgctatcagttttgtaacagtccacgttaatatgatgtagacaccaaaataaaggacgagttttgtatttatggtttcagtttcattggtaccagatatattcctgattcttgttctttgtaaacttacattggtttgtttcaggatttcactgctaagcaatacattgatcaaaaagttgaattagttgtaagttttatcttgcaaccttttagttatgcattctctccactgcacgtacttcatgtttttagttaaaattcttgttatgtgattgtgcattatagagtgggtcaaaaacagatgaatacttggagcaacttgacaaagctctcgaggtacatttacatacctgcagaattttctgtgaaaataaatatttacactgggtactaggttaatgttttgaaatgtcatcttttgcatgatatttatccaaaaaaattcaaatcagtataatatggcaatgtatcatttcaacttgtggtttcaagtgcatgtatcaatgattgaatatcctctttgtatatgtataaatccaaatgagcatgaggtttgaaagggtaaaagtctggttctttctgcataggctgcatgactaaatcctctcaaattaccttatgaggaaatggatctgcaatagtagatttgagccccagttgattgtatacaatgctggaacagacatcctcgatggcgatccgttgggcagattgaaggtaagtcctgagggtgtggttaccagagacgagaaggtatttaggttcgcaaaagatcgaaacattcctttgctcatgctgacatcaggaggctacatgaagtcaagtgctcgagtaatagctgattcgatcatcaatctgtccaataaaaacttgataggattaggcagccagctgggttgagcaagaacttgtgacagtatgcttcttatcgggaagcaatatctcgtaagagcttattcgattaggagtggattaaagaggattaaattccttgatggtcaaaattgaatagaaagatatctaatcctactcaatccacatgcaatcgaacaaggtttaaaggtgtagtttttttttttttgtgaaggataacatgtatgccacaaaaatgttctgtacataacacgggatgtttgtgaatctatacaacacaaaaacaaaaacaa

SEQ ID NO: 2513 - DNA, 2379 bp, Zea Mays
atccctcacgcagtcaggagatccccaattccccattcaccaatccccagtattgtagtagggggaaaaacgagagaaaagaaacagcagtagcggaggcaagacgaaatggtggccgccgtcgcgtcgccttcgtcggcggcaccctccgccggccgtccccatccgacatacaaggagatgatcatgcaggcgctgacggagctgcgggacccgagcgggtcgagccgcagcgccatcgccacctacatcgccgaccacttctccggcctccactcgcgccacgatgccctcctctccgtccatctccgcagcctcaagtcccatggccaacttcgcctcgtctctggcaactacttcgtctccaccgccgctcagcggcaggggcgaggctccaacatcccgcccaaccccaaccctgctccggggcagaagcgtggtcgggggcggcctcgcaagtacgcagattcagccccttccgcttcgatcccggcgtttcaggacgccaagcgagggcgtggacgcccacgcaaacgcaagagcgcccaggacccggtggcttcctccccctccccttcgccgctacagggagcaagtgttccgccgcctccatctggggtcaagagggggcgtggacgccctcggaaggacgcccttgtccctccgccttcctcttcttcgccactgctgggagggattgatccaccgcctccatctgggatcaagacgggccgtgcacgtcctcggaaggcccttgtccctgtgcgttcctccttttccgagctgctgggagctgttgttctaccacctccgtctggggtcaagcgtggccgcggacgcccgcgcaagagtgcctaccccgctgtggcgccgttggtgggagctgagaagggacctgctggtggacaaccacagaggaataccactcctctctcaccgacacctgctaccatgtcccacagtgtttggttggtgcgaagcggggaagagggcgcccacctaaggttgtggttgctgggaaagagaagatgcaacctgaatctgtgcagtccgtggatgcttcattgactaagagagggcgtgggaggcccagaaaggagaaggcattggaaagtggccgcatgaaagcctcgcagatgactgagggtcaacgtgaagctctgactgcagaccaagctggggctgtccaaaatgaagtagaagatagggatttgcaatccttgggtactcctttgacagagaagagaggccgcggtcgtcctagaaagaggccgttggaaatcgaaactgcaaaagcaggggctgctaagcgtgggaggccaagaaaggagaagacatctgaaactggggacttgaaagttgcacagatgactgagggtcggcatgaagctctgcctgcacaagctgtagaccaaactgggcctgtgcaaaatgaagttgaagctatgattttgcaatcccttgctactactcctttgatggagaagaggagtcgtgggcgacctagaaagaggccattggaaactgaaactgcagaaacccaagttgctgcatcggtggagaagcgagggcgtgggaggccaagaaagaagaatccatcggcagggtggtctgcaggaaccagggatactgcattaaaggggattaagagagggcctgggaggccaaggaaggccaggccttttgaaactgagtctgtgaaaactgcacttgaggtgtctagggacttgacagaagatgggcctcaaaaggatggggatcttgtgtcagggaagaaagcagatactcatggtgtggtttggtagtgtcaactgaggaggtagccattgctcccatggatgctgggtgcgcagacgccaagggttgatctgatggatgtgggcaccaagagtcactagtgctctgatggtgcgaacaagaacaaaaaagaaataatgatagtacctgaaaggctaaacagaacatgcagctaataagtgtgttcatggatataattaatagccatactgcaagtattgctatatgtttgcaccagtttgattactcgtatgtttttgagcagttccattggaaactgcgtttgatgggtttcacttttgggggttggatttaaatatctaacccacatcctctttctttgtcaaggactataacatttttgtaattttgttgcttgtactggaaactagccatcataaggttcattttgttttccagtttcaacatcttttagtgatatgttcacataatatctctgttttgtgctttatttggtgtgtctattgggtgtttggttggaggaatgggacgagttggtccactattgcttcattcagtcattcctcatactaataagcacagagtattcagtataaaaac

SEQ ID NO: 2514 - DNA, 2092 bp, Zea Mays
gtgctcttctcttctattgggacactttgtgataaactgaagcaaacagatccatataaatcagagcttgagacaatgctggtccgacatgtctttcctgaattcagcagtcgtgttggacacctgcgagcaaaggcagcatgggttgctgggcagtatgcccatatcaacttttcagacccgaacaattttcgtcaggctatgcactgtatagtttcaggaatgcatgatccagatcttcctgtgagggttgattcggtctttgcacttcgttcttttgttgaagcctgcaaagatttaaatgagattcgacctatacttcctcagctccttgatgaattttttaagctgatgaatgaggttgagaatgaggatcttgtgttcaccctagaaaccattgttgacaaatttggtgaagagatggcaccttatgcattaggtttgtgccagaatttggctgctgctttctggagatgtatggctagttcagaagctgatgatgaagctgatgattccggtgctttggcagctgttggttgcttgcgagcaatcagcacaatccttgagtcaattagcagcctcccacatctttttacgcaaatagaaccaacattgctgcctataatgcgcaggatgttgacatctgatggccaagatattcttgttccattagacaactacatttctcggggaactgatcactttcttgcatgcaaagatccagattaccagcaaagcctgtggaaggcacttcaatctattatgatggacgaaaacatggaagattctgatattgaacctgctcccaagctcattgaagttgtttttcaaaattgtaaaggcaacgtggatcactgggttgagcactatctcaggattacaattgagcggttacgtcgagcacacaaaccatacctgaaatgcctccttgtacaagtgaagctaagaagcaaaatgaagaggctgctgatgatatggatggttttgatgctgatgaagaagatgatgacgaagttgactctgataaggagatgggtcttgatgatgaagacggggatgaagtaagcagtcttcagctgcagaaattagccgcagaggctagaggcttccaaccagccgatgacgatgactcagatgatgatttcagcgacgatgagctacactcaccaatagacgaggtggatcctttcattttctttgtagaaactgtccaaggtttgcaggcatctgatcctgccaggttccagaaccttatgcatacattggatttttcttatcaagcgcttgctagtggcattgcacaacatgccgagcaaagaaaaaatgaaattgagaaggagaaatctgagaaggcaaatgcacagtgacgtcataaagcatttctggttcccttcgattgttttgccattttgccggtatagcattggtggacggttaatttcctgcgatttgcaggccgcaggtaagagtttttgcagccttagccaaagtgtaggacaaattcaatcttgtgagatagcatcttggataacctgtcacctcgaccatgttcgtcgtggccagttgtagacgtcttggttgtgcaagaaagtttctctcgaggacagttgctcgttttgttagggccatcaatttttttgggcggcttgtaagttatttgagaatcccacctcaggttgaggggttgtattctcgagtcgtcaaagtttagtaccggtgcggtgtagattgtatatggtttcagttgtctagaacgttgtggcttcatggacgggctgtggtataagtttttattattttttaatttttttgtcaacaagacattgtaattggggtttgtttgtttggtaagagcaagaaaggtcggcactgttatttcttcggtatcattgtccacttgtttcgatattagcagtttacctaatcctatatccaaactccactcttccatattcaaactccactctgaacaatgtaatctatagtgcttttgagtaaactatgaaaagattgctgcagatggttttacaatgatggaaaatgggtattgggataagtggtattgggataagtatcataatgatattgcttg

SEQ ID NO: 2515 - DNA, 2185 bp, Zea Mays
acatcatcgccccccttccccgcggccccaccaaatagagaggcccagacaccgaggggaaaaaggagagagagtacacaggtgacagccgctgcaccgagggcacagagggacagctagacagggactgccagcggcgtaggcggtgtgggggatggagcgcgagatggcggacgcgcccgccgcggcgatccccgccgccgagccgctcgcggcggtggcggaggaaggggagggggaggcggccgccgaggcagtggggtccaccctcaccatggagcgcgtcgccgccgcgaagaagttcatcgagagccactaccgctcgcagatgaagaacatccaagagcgcaaggagaggcgctttagattggagagacagctagcttcttctcaagttcccaaggaacaacaaatcaatttaatgaaagatcttgagaggaaggaaactgaatacatgcgacttaaaaggcacaaaatttgtgttgatgattttgagctgctcactattattgggagaggtgcttttggagaggttcgattgtgtcgagagaggacctcaggcaacatttatgcaatgaaaaaactcaagaagtctgatatggttgtcaggggccaagtggaacatgttagagctgaaagaaacttgttggccgaagttgctagtcatcactgcattgtgaagctttactattctttccaagacactgagtatctttaccttattatggagtacctccctggtggtgatatcatgacccttctcatgagagaggataccttgactgaacatgtggcacgattctacgttgctgagactattcttgctatcgaatccatccataaacataactacatccacagagatattaagcctgataatttgcttctagataagaatggtcacatgaagctgtcagattttgggctgtgtaagccaattgattgttcaaagctctcaactttgaatgaagatgaacccatgagtgatgacaacttgagggaatcaatggatattgatagttctttgtctgatacagcaaatggtagaagatggagaagtcaacacgaacagcttcagcactggcagatgaacaggagaaaactggcattctcaactgttggaacaccggattatattgctccagaggttcttctaaagaagggatatggaatggaatgcgattggtggtctctgggcgcgatcatgtatgagatgctagttgggtatccaccattttatgctgatgatccaataactacatgcagaaagattgtgcactggagaaaccatttgaagtttcctgaggatgcaaagttgtcaaatgaagcaagagatctcattagccgattattatgtgatgttgaccacaggatcggcagtgcaggggcagatcaaataaaggcacatccttggttccgaggagttgcatgggataaactttatgaaatggaagcagcatttaagcctcaagtaaatgatgaactggacacacagaatttcatgaaattcgaggaattggaaaatcctccagccaaaacaggctctggaccttcaaggaagaagtacaaagcagtagagcactagagcgcactagtattactgctgtaagtgctgtttgtcctcggcaaatttctgaactaaatcagcatgcaaacgcctggatgatgtggctccagctggataacctgctcatttttagccaggtttctgctttctcaatcgtgggcaagcggtttgtagaaatccaccagagtttctagttgtaaaatagtattccacggactttaacaaaggtcccatgtactaagggctcatcatcagacaccgggacagtttttttctggagaaattgcaccttgcggctggctgcccaggttggtagagcaaattgcggccttctcttgtggcagttcccggtccgctaacatttgatcagggaagggaaataagatggtgttgttgcggcaggaattctcatgggggggagttagtgttgttgtttgatatgtatcaggaattttcacatttgtagtagggtttctgttagcatattttagaaacatcctttttgcagagttgctatttctcattgatgtatggaaaacaacataatttggagatcgaagctcgatctaacttttatgctgcatatctgatctagattacatcaaacatgattcatcc

SEQ ID NO: 2516 - DNA, 2610 bp, Zea Mays
ctcttcccccttcgccaccctagttttttttttaaaaaaaatcgctatctccaagtccaagactccaacagctctcgcacacagccgcagctgctactggctagaccaacacgcactctcgcacacagccgcgggcacagtgacgcaggcggaggagcggcgccggagctagggtttccctgatccggtggggccggggagggggtggaatatcttgctcgatttcggcgctggaggcgcagtgccggtgtccccgaagccggcgggcgcgaggcgggttggggagctggggtacggcgccgggggctcagatctggtatgaccgacggcggcgaagacgggaatgtggcgttgcccaggggccccgcgcgccggaggggccccgtgcgggccagcttcgacgccgacgagttcatcgcgctgatgcacgggtcggatcccgtcagggtcgagctcacgcgcctcgagaacgagctcagggacaaggagagggagcttggggaggcgcagacggagatacgcgcgctgcgcctatcggagagggcgcgggagaaggccgtcgaggagcttacagatgaattggagaagatggctgagaaactcaagctgacagaatctctcctcgaaagcaaaaatcttgaagttaaaaagataaatgatgagaaaaaagctgcattggctgcccagtttgcagcagaagcaactttgcgaagagtacatgcagcccagaaagatgatgacatgccaccaattgaagccattcttgcaccgcttgaagctgagctaaagctttctcgccaagagaatgcaaagctccaggatgataacagagctttggatcgtctaacaaaacaaaaggaggcagctctactagaagcggagaggaccgtgcaaattgccatggcaaaagctgctatggttgatgatttgcaaaacaagaaccaagagttgatcaaacaaattgagatctgccatattgcagaagttgaaaagctgagccaaactgtgagagagttggaagaggctgttcttcaaggtggtgcaacggctaatgttgtccgtgattaccagcgcagatttcaagaaataaatgaagaaaagagaacacttgaccgtgaacttgcacgtgcaaaagttacagcaaacagagttgcttctgttgttgctaatgagtggaaagattctaatgacaaggtgatgccagttaaacagtggcttgaagagcgtaggttcttccagggggagatgcaacaacttcgtgacaagcttgccattacagaacgtacagcacgatctgaagctcaactgaaggaaaaatatcagttacgtctaaaagtactagaagatggactaagagggccaccaagtggctctattcgtccacctactgaaggaaagagctttagcaatgtcccttcccgccggttgtcactcggtggagctgataatatatcaagattgtctcctaatgggttattgtcaaggcgatctccttcttttaattcaagatcatctcttacgtcaaacagcagcttggtcctgaagcatgctaaaggcacttcaaagtcatttgatggcggaactaggtcactagataggagaaaggtacatggaaatggagctcatttactcaacagatctacagatgctgttagagataaagagactaatgatagttggaagggcgatatggatgagaaaactaatgagagtgcagacagcaacacagatgggaaaagtaatgaaaccatgaataataattcagctgagacagtttctggtttcctatatgatatgctgcaaaaagaggtaatttctttgagaaagacatgccatgagaaggatcagattctaaaagataaagatgatgctattgagatgttagcaaagaaagtagacaccttaactaaagcaatggaagtggaagctaaaaaggtcagacgggaggttgcatccatggagaaagaagttgcagcaatgcgtgccagtaaagaacaagaaatcagagccaagcggcttggtacgaaaggctctggtagttcacaactgcttcctggaagaaacgcaccacgaagtgggtccatgcgcaacttccaatgatggcagcactaacaccaagcagcattcttggataggtcctctgttccaccatttgttctgttcctatcctattaattttgtggctaaaatcgtagcacagtgagatgacccaacaatacctagatctgggtaagagtaggctcggatctgatgagaccattgtgggagtgaagctgagcctgttgtctaaccttgtggcgcgccctcttgtttattttagtccaggcagtgcacctgatgcttgtataggccagggatcaccgcatggccaatctgtaatgtatagcctgagtgctcagttacatagacacccgttgcccaggttgtgaatactgtttcctcgcacatgcttctttgcgctgctctatttgccctgtgtttgggttggaatttttaacatggcttctagcctgtctgagttctgttgattataaatagtgacacatgttcatctgcatatgtacatctagtggcgactgtcaactgatgtttatcctcttccattatgtc

SEQ ID NO: 2517 - DNA, 1340 bp, Zea Mays
ccacaatccgcaacgagcatccactcacccattgacacaacacactccggtgacggggcacggttggagatcacgacaacataagggtccgaaacgaaaatcccgcacgcccgtggaaatatccacccgcggtccgggtcaccccgcaaggccgcaacgcctccgctttcattcttcttctcttttctcgttccccccgttggggttttgagctccgacgaaccctaataatcgccggggaccggcgaccgatcgcccgccggcatgcaccattagcagcggatgaagcaggcagcggcggccgcggccgcggcgcagcaggcactgctcctgcagcagcagtcgcagccgcccttgttccccgtgcaccacccgcaccccggcctcctcgccgcaccacagatagagcccatagtcagtggaaacctgcctcctgggtttgattcaagtacatgccgcagcgtgtatgtttgcaatatccatcttcaagtgacggacgcagtactgcaggaagtcttccaaagcattggtccagtagaagggtgcaagctcatcagaaaagaaaagtcatcctttggtttcattgactaccatgatcgcagatatgctgcactagcaattttatctctcaatggcagacaactgtatggtcagccgattaaagtcaattgggcatatacaagtactccgagggagggcacatcaggtcattttaatatttttgttggggatctttgcccggaagtcactgatgctactttgtttgcatttttctctggttactctacttgctcagatgctagtgttatgtgggaccagaaaacaggacgatccagaggatttggttttgtttctttcaggaaccagcaggatgctcaaagtgagataaatgacttgaatggtgtgttctctagttccatgtttctaacttatgttccattttgaagtcccgagtgtttcaaaaagtgctagcagctagacgtgcctagcaacctaggtggtgctcaggcgttgcttgacatttgtactttctatggacagtatgccatgttgaataaagtattttttggcatgacatatcagaacaaaaaacattttaccatgctcccttgtgtaatatgactgtagtttatgttcctccatctctaatttgctatgttcatgcatacatcagacctgtaacacccttgtccaggaaaaaaagcctagacaaaatggctaggtgcttggtgagacagtgcagcactgcctaggttgaatgacagtttttcccctcagtatgtatgatatggtataacgcataacaataaattctgccaggctcttatgttcaactttta

SEQ ID NO: 2518 - DNA, 1101 bp, Zea Mays
acacgagtatgaacagacgggggctcttgggtgggtctgggcagggcatctccggactcccacacagctcctcttggtggcgccctctgacatctcctttttcctcgccttcgatcggtggccgccgccctcctcgacttccgtcccgccgccatgaagggacccggcctcttctccgacatcggcaagaaggaaggatctactcacctacgactagaagctgtccatctccaccgccagcgcctctggagtggcgcccagacccggcaatccgttagaatccgttcgtcgcagaggccatgagctcggcgcaggatccgttctacatcgtccgggaggagatccaggagtcgattgataaattgcaaagtaccttccaccgctgggagcaaactgcttcaaacacaggagaatatgttcatctgacaaaggagcttctgatcagctgtgaaagtatcgagtggcaggtagatgagctagaaaagacaatctcagttgcatcaagggatccggcatactatggacttgatgaagttgagctttccagacgaagaaactggactggttcttctcataagcaggtcggtacagtcaagagagctattgaaaagggcaagagcaatgcagcaacttcaaaataccaggatacaagcaggaccaaccactattctgcccaagataatgatgactttctttcttcagaatcagatagacagcttctactcatgaggtgagtttaatttgttacttttaatgaactttacaaacatgtttgttagaatatgttgccgctcagcattcaacatatgctgtctattgtaagtagctagtagacagtccataaatttgctgttttcctagccaaagttcgccttagtggcacataaaccttgtattcctcctcaattgttctagttagtgtcttcgcttctcctccttgaatattacattggtttacttatctttgctcactgattcttgtgtttccaccagcacataattattaattttgtgcaaatgtaagtaactgtactaagtttttttctgttcctttcttgttgtagtaagtaggtcacgcgtgctagaatatcaaaatctcag

SEQ ID NO: 2519 - DNA, 1710 bp, Zea Mays
accgctgctgccatcgcagccgcattcgcttctccgccgcttacgcttcaagaaaccccaccggtactccgtggccatcgacgccgccaagtggcgcttagcagccgcagcacatacccggacctgaccgctgagaagggcaacgcggacgcgccgagatgcagagcatgtcggcgtcctgctcgtccgccgtctccgtctctacctctagagtctgggccgcggcgcgccgctcgccctcgccccgatccctaccctcgttgcgccacgtcgccttctggccctctccatcctcctcctacccctcttcttctcatggctgtcgctggccgatcgccggcgccggcgcaccggcgctcccgctcggcattcgcgggggcctgcgccggctgccctcgcctctgcttgcgccggacgcccccagtgccggcgcggcggcgaggacgcgggcggccgcggccgcggcgtctccggcagcagccggtaagcaggagggcgccgccggcatttcgcagaccctgcaactcgggacaatgatcctcgtctggttctgaaagccatacctttcccttacaccatcaccaccttccatttcgcatccggaaccttcttcatcacactcatgtggctgctcaatctgcatcccaaaccgaggctctccctcaaacagtatgcaaagctcctgcctttggccttgatccacatgcttggaaatgttttcaccaatatgagtttgggtaaggtgtctgtctccttcacccacaccatcaaggccatggagcccttcttctcggtcctcctctctatcctattcctaggagagacaccttctctaccagtgttgggctcacttgtccctattgttggtggagttgtattggcgtcgatgactgaagtttcattcaactggattggattctggagtgccatgacttcgaatcttatgaatcaatcgcggaacgtttacagcaagaaaattctcgctgataaagaggacagtttggatgatataaatctcttctcaataataactgtcatggcattcttgttatctgctccactgatgctatgtgtagaaggaatcaagtttagcccatcgtatctacagaatgctggagttaatgtaaaagaattatttataagagcggcacttgctgggacatctttctatttttaccaacaggtttcgtacagtttattggctagagtatctcccgtgacccattcggttgccaactctcttaaacgtgtggtggtcattgtgtcatccgttctcttctttagaactctaatttcacctataaatgccttaggaaccggtgttgctcttgctggagtgttcctgtactcgcagttcaaaaagtcaaaaccaaaggctacggctgcatgaagacaacccctgatgatgaggttctttggatgtgagaagcttgtacgtcagtttcctggacaaggtgtggtggaacacgtgaacaacgaagatatagcattattagatttcaagagaatacaaattttggaatatacttcaatgtcattgaaactgacagaatgctctcacttacatatattctttacgtcaaaatatggttcaatgttttcttactattatatatattctttacgaactttgtgttttttgctgaaagaaaaacaaaaggaatatcctggttcctggatatggtatatatgaaatagacagaatctcag

SEQ ID NO: 2520 - DNA, 4397 bp, Zea Mays
ctctaatccccttgctgcaaacaacaagaccgtaggtatttctgctggctcgctgatggaaacagtggaaacgcaggtcaactagtcttacaccacaggagagcaaccgtttagagacttcgggtaagacacgagcccaataccacggccctgccagcgatggccacattggcgccaccggcggtggaggtggagccggaggccgatgccatggccctggcgtcggaagccgcggcgcctgagctcccatcgtcgcattcgcagctcgattttttcaagaccagagttcaattattgtgtgaaagtaacacgagagattttgatgcttgggtatcattaataaatgctgcagagggaacatcagcagatgacatagaagttatgagcttggtataccataacttcttgttggaatttcctttgtgctacggttactggatcaaatatgcagctcataaggcacgactatgcacaaccagatatgtaatggatgtttatgaacaagctgtccatgctgtacctcattctgttgatatttgggtcaactactgtgagtttggtatatgtgcatttgaagaacctgctcatgtcagaagtttatttgagagggctttatctcttgttggaaaggactatttgtgttatcacctgtgggacaagtatatagaatttgaaagctctcagaagcagctgattcatcttgccaccatttttatcaacacactaaaatttcccacaaagaagttgcacatgtattatgaaagttttagaaagtttgtaacattattggaacaagaggtgacaagttgtgttgctgaaatattatcagaaaaagtgcatgcttctgaaatggtgggcatcttagtcctgaagcattgaagcattacttatctgctggggagaagctctacaaaatgtccagcaagatttacaaagaaatctgttatttcgaggcatccataaaaaggcctttttttaatgtcaagacacttgatgatgatcagcttgaaaactggcaccagtatcttgactttgttgagaagaatggggattttgactgggctgtaaaactttatgagaggtgtttgatcccttgcgctaattattcggaattttggatccgctattcagagtatgttgacgctaaaggtggccgagaaattgcaaaccatgctctgggtcgagcatcatcatgttttgcgaaggaggttccagctttctgcatgtattatgcgttgtttaaagagcaaattggtgatgcactggttgcacgctctgtttttactaaaacaagaagttacttcacttcagggttttatgcaaatattaataggctggccaacatggaaaaacgaatgggaaatactaaagcagcttctgagatatacgagacagcaattgaggatgcaatgcagaagaacaacatagagttgcttcctgacctgtacagcaattttgctcagttcatatatgtggcaagtcatagcattattcaggctaaacaagtctttgtcgacggaataaatcgtgcaccttgtaaaccattgattaagggattcatacagttcatgagtacacatggagggcctaaagacatacctcttcttgattctgttatttctaatgccgtgactccaggatctgacgtatccacagctttaagcagagaggaccgcgaagatatctcactgttgtttttggagtttgttgatctctatgggggtattaaagaactcagaaaggcatgggctcggcatagtatactgtttcctcacagcactgggaacatttcacgacattattctactatggggaatagccttcaagagactaagaagaggagaaacacagaacctttgatgattgctcgtgatcattctttagaagatacaatgaaactgaaacagacactcaaaaccgatgatttttctcttatagttgataaagagagtgagccacaagtagacaaggacattgtggattcaggaaaaagacatggggatgcgggagcgcagaaagctttagatttggtcaattcacacaaagagaccatcacgacagctcaggaatgcactgacatggtttacagtgaacatatcctggacaaaaacagaatagagaagcaaatgaattcacatgccaaagaagatattaatcaagacctaatcttgcatgaacaaaatgatgagaaaacaaattctcatgaggcggagactcctgtagctgagtcaggtgactgtgattctccttccaaagcaattgctagctctgagaacatcaattttcagggcaaggtcattgaggtatctgcaagcagccatctagaaacagtatgctcaaaatatgactcgccgtctggaccaaacatgcacaaagaaggaagttcttctggtccagctcgaatatctccagagctggaggaaaggcaccatgtggaggttcaggtaaaagtcgacacagagcatcatttttctgtcagtaatgcaaacctagagatatcttttgatggtccaaatccaactgaatgtgacaaggaaatctctgccattggtcatgggagtcaagactatattcaatcttcgcagtcacatcaactctcagcctgtgcaaaaccttggagcttggactcagcgaaaacaaaatcggatactgtcagtattcaagctcaacttcgaaaccagttggagaatgctcaaacatatcaatctaataacctttcacaaaacatgcaacaacaagagcttacaatgcctcacaatgttcaaacatctgcacaaattcaagatcaattgcttgcacagcctaatcacagaaaccaacagtatctccaaatgatgcaagggtatgcaacacaaatgggggaatattaccaacaacaactgtattacctgcaggctcagcacaatcaacagatgcagagtctgcaacagcaacagctcccgactgagcatcttcagcaaacttttatgcagcaagtacagcagctgaaccagcaattggtactttggcagcaacaagtgcaacagcagccacaagtagtactgcaacaggcactgccagttcagcaacttcctgacgaaaaacagggtcagtgtccttccggggatagcaaacacggccaaaataaacagcagcaacaagcacctcaaatggatcaacaaagccagcagttgcagcaacaacagcttctttatcttcagcagcaacaacaaatgtatcttatacagcagcagcagatgtatcaacaacagcaagctcagcagcaacagctcttacagcagcagttaatgcaacaacaacagtatgtactgcagatgccacagcaccagcaagactcagttcggcagcaacaacagcaactgtttgagcaacagcagcagcagatgatgcttcttcagcgacagcaacaacatattatgcaacaacagatccaaccgtacgtgcaacagcaacaaaaccaacaagggcccaaggatcagacttacaagtcaaatcatcaggatggaaggaacaggcaaatggagcatggacaactgtctgaagcttcacagagcgatggttccaaactgcgcagcggtgagcaatctgagttatcctacccgtcaactcctcagtcagaacgctcaaatcactaaggccttgttcggttattcccaatacacatgaattggatgagattggaaaaaattaagaagtttgacttgtttgggattcaaacccatccaatcctactcaatccacatagattgagagctaaccgaacaagcactaaatcactcaggatcatgtatcaaggaacatacttaagaaacatggaagcatgcatccatttccttgccctgctgccagtggaggctgattccatactgtgtcagagtgatgatgatgtgctgaccttcccgaatggtgatgaagctccatctccacggtgctctcttctttctaaattataaggcatttcaactttttttgagagtcaaaacatctcaattataatgccagctatggtttgatagcttggtattagattctcagtaatgctcgcatgtaaggggcgatgtgatgtgttggagacttcagtcaagcagttacatatcaagaacatatttggatgaagcgtgtgatatcttgtcatgactcatatgtatatgtatacgatatcctttatggtatagctctcggcatctgcactggcacgatagggctgattagacagcaactagcataagcctggaaatttacagttctgtcgtcagcctggtggtacacatttttgcctggatcaaactgccgttgtgctcattcattcacaggaattcacctcggcatattagcgatgtgtcaacgtcatgggtggatgcgcgtgcgatgaagccggaagagcaagcttgtaaacc

SEQ ID NO: 2521 - DNA, 1194 bp, Zea Mays
gctaaatggacgtaagaatttcccttcgaatgttttcacgcgtcgccaatgccaccatcacgtcacacaaaagttggaaggactcaattatgagaggaggatacagattgcggggccaatctgcaagaaacgcaccctgacatatgggctcccgtgatgccatctggggccactagagttgaccggcaaactgattacgcgattatttaacagcacgatcgcgtgaggacagaagctcagatgccgccttcatttgaagctcccaaagcccaacacctctcctagcctccttccgtcccgccgccactcccgtcatgggcgattccgcggcgggcgcgccggagccgagcaggttcggcaggatctgcgtcttctgcggcagcaaccccggcaatcgcgccgtctacggggacgcagcgctcgacctcggcaaagagctggtggcgaaggggatcgatttggtctacggcggcgggagcgtcgggctcatgggcctgatcgcgcagacggtccttggtggcggctgcagtgtcctcggagtgattccgagagcactcatgccgcttgagatatctggtgctagcgttggagaagttaaggttgtctccgacatgcacgagaggaaagctgagatggcacggcaagctgatgccttcatagctcttcctggagggtacggaacaatggaagaactgttagagatgataacgtggtcacagctcggaattcatgacaaaccagtcggtttgctgaacgttgatggctactacgacccgctgctcatgctgtttgatagaggggcaacggaaggctttatcaagctagattgcagagatataattgtttcagcgccaactgcccatgagttactgaagaagatggagcactacactcggtcgcaccaggaggtcgccccacggacgagctgggagatgtcagagctgggctatggaaaagcgtcggagtcatagcgtacgcttaccaagatgaaatcgtcgtccctggagtacgttcttcgtctagcatctagttgttactcgactgcaggcattggcattcaagcatcatctttagatctacccttttagctgtcactcatggtaattattacgttttgctgaacaatctgaagcactcctgttgatcacccccttcgattccttaggggatcaaaacagggcaacaaagttagag

SEQ ID NO: 2522 - DNA, 1770 bp, Zea Mays
ttaaccctaaccttaactttacttgtcctcttgttcctccgcatctcttgccatccgctggagaagagtcaatcgcggcggccccgttcaatggtctcacgacggctaccgtgaacacgacgacgcacccgcgcgagatggcgacctcctcggcgtctatctatggcttggttgctggcgaggctagtggcgatcttgttgccctccctcaggcgggtgagtcttgcggcgggcgcaaacacagcgggtgagctaatggcagccaatgcaaccggttaagggcacacgtccggcaatggcgccccgtactgtagtgcctatagtggtcagcgccaagccctatcaggtctggataaatcttggatctggagcccagactcgctctcatgaactcaggtaacagtacataaatctgcaacgcacggacttgttcttctgaactcacctgcctgatagcgcttaaatctgcaatgtgatggcggtcagactacaccaccaacaagggcgccaacgggcggccgcatggcaagaagaatcaagcgttggctcggcccaaggcgacgccgtccaagtgggacgacgcgcagaaatggcttgtgggcatgtcgaacggccacgcggacggaacccacggtgccagagtcaagcctaggagctctaacgccgacgacaggcgcctcctcggctcggcctcgcagaacggccgcgtgtcctgcagcagcgtggatggcgccttggagtacagcatggtggtggccgcgccctcgacaccgccgcaggccgccgagggcggcggcgacatggaggaaaccaagaagatcgactgcatggtgcagctgcatgactcgccccaagcggtgatgcggtccgtgtgcctgcgggacatggggacggaaatgacccccatcgccagcaaggagccgtccaggacacccacgccccggcgcgcctgcacgcccgttgcgctgagcccgatggcctcaaggtcgtccaccccggtgagaagacgccaggaagggcccgtgggcgtgaccacggccattgtagcagggacgctgaccgagcaggtagcggcagcagacgaggtcgcttgcgtcggggacgagcgccccgtggctggtcatgtgcccagcgtgaactctctggagtctcgcgcggcagcctgggatgaggctgaacgggccaagttcatggcgaggtataaacgtgaagaggtaaagatacaggcctgggagaaccatgagaagagaaaagccgagacaaagatgaagaaaatgcagatgaaggctgatcagatgaaagcacggggccaagaggagctgtccaaccggctggccaccacgcgtcggatggctgaggagaagcgggcgagcgctgaggcgaagctcaatgagcgtgcggccaggacatcggagaaggccaactacatcaggaggactgggcacctgccgtcctccttcaagatttcttgcttgtgcggctcgagctttgagtaacagaataacaattattagtccaaataatacaatgaagatagtccaactcaacttcaaattcttcctcttcaacatggtgcttctcattcttctacctgaacgatgacaaatatgtggtctctatttttctcttatgatggatttattaaattttgtgcagttgagaataaacaatatacccccgatggtctagccaaaatacgcctgaattgtacatgttaattatgctacaatttgaatacttatgtagtgaaactctacaatacaatctaca

SEQ ID NO: 2523 - DNA, 2602 bp, Zea Mays
aagggaccaaaacctcccccttcctttccaaccaaggtcaccgcgcgcctcccatggccacggcgcccctcgccttccgcctccccttccccttctcattcccctccgcctcccgccctcctccttccagaatcctagcccctccgaccccgcgccggctccccctacgcctcgccgccgcggccgcacgacggttccgcccgcccaccgccgacgacgaaccccctgaggccgcggaggactcttctcatggcctaacccgctatgaccagcttgcgcgaagcgtggagcgcgcccggatccgccagccggagatcacccctgacaacccgctcttctcgtccccctccactgcaggaggcggcggcggaggcagctacgacccagacgacgagttcttcgacgaaattgaccgcgctatcgctgagaagcgggaggagttcacgcggcgcgggctcatcaagccatcccctgcttcgccgccgccgtcgcaatcgcagccggaggacgaggacctcaccgacgagctctcccctgaggaggtgatcgatctcgatgagattcggaagcttcagggactcagtgttgtatccgtggccgacgaggaggatgaggaggtggaggggggcgaggacgaggacgatggattgccgctcgatgaggacggggaaggctttgacgtggccgaggagctcggcctcgagggtgccaggatgcgacaaccggctttccgcatgacgctggctgagctccttgacgagagcaagctcgtcccggtggccgtgacgggcgaccaggatgtcgccctcgcaggagtgcagcgcgacgccagcctggtggcggccggcgacctgtttgtgtgcgtgggagaggacgggctcgcggggctcaccgaagccgacaagcgtggggccgttgccgtcgtagctgatcaggacctcaacattgagggcaccctggcctgtcgcgcgctggtcattgtagacgacattttgactgcgctccgggtactccctgcctgcttgtacagccggccgtcgatgaacatggctatcataggtgtcactggcacagatggcgtaactaccacaactcacctcgtgaaagcaatgtacgaggctatgggggtgaggactggcttggtgggtgttcttgggacctatgccttcagcagcaacaagctcgatgcacgccctgatgcatctagtgaccccattgctgcgcagaagctgatggcaacaatgttacacaatggcactgaggcagtggtgttggagaaaggcactgatgggatgcctccatctggtgtggacagtgagatagattatgatattgctgttttgactaatgttaggcacactgatgaagagaatggcatgacctacgaggagtatatgagcagaatggcctctcttttctccagaatggtggaccctgagcgccatcgtaaggtggtgaacatcgatgatccaagtgccccatttttcgccgcacaaggagggcatgatgtccctgtggtaacatattcatttgagaacaagaaggctgatgtgcacacgcttaaataccagctttccctgtttgagacggaggttctggtacagacaccacatgggatcctcgagatctcctctgggctgcttggaagagataacatctacagcatccttgcaactgtggcagttggcattgcagtgggtgcaccactggaggacatagtcaggggcatagaagaggtggatgcgatcccaggtcggtgtgagctaatcgatgaggagcaagcctttggggtaatcgttgatcatgcaaggacaccagaagctctgtcaaggcttctggatggtgtaagggagctgggaccacgccggattgtcactgttgttggatgttgcggagagaaagaaagagggaagaggcccgtgatgacaaagatcgcagctgataaaagtgatgttgtcatgttgacatcagacaatccagcaaatgaagatccatgttatcactggcaaagggaatgatacctatcagattgaaggcgataaaaatgaattttttgatgacagagaagagtgccgagaagcattacaatacgtcgatcaattgcaccgagctggaatagacacctcagagttcccttggcggttaccagaaagccactgattttgatttaggcaagatagtcgagtttatcaactgaagagcaacaccagactcccaatttaaagaacgtgtgcttttttaggatttgaggatatgatatccaagtcctgcaagaaaattactccttacgtgctgagttttctaacccaagtgctaatggctaacaaattgctagcttatcagctattcagttacactgccatactagttagtagataaccagatggcccagtaaatgttgtattagttcatgcacgtaaatgaggtgtagctgtgaaagtagatcgatgaaggttcctgatgtgaaaaagtcaaaagacaatgtaggagcttctgggtcacagtttcaaaagattttgtcccttggcagtgattgtaagatcttttggaagttatgccttttgttgttctgccatctagattgtgtttcactgaatgcctt

SEQ ID NO: 2524 - DNA, 1036 bp, Zea Mays
agcatggagccatgggccatggcgtgcggggggacgcggcgttctgcagcgaggactgcagggacgagcagaaggacatggacgaggcgctccacgcggcggcgcggcgccaccgcctccttcgctctccgtcggcgtcctcctcctcgcaggcggcagctgaggccgcggcgtcgaccaggccgccgcccgtgatgcgccgccgccccaccatcgccaacctcgccgcgcgcaacccgcccgtggcagccagctagctagtagctacacggcgggcagcactcgtgattcgaacatcgaccgtcctcgatcgtgcagtggtgatttttttttgccgcctgccatgcgtggggttggggtccggatcaggtgtgtgtgctctgccgccttggacgagttgcagctggacctccggcggttagctaggtaggtagagctatacggagcatgcacggactgacgatgaagaacgacatgcatctggaggacgaagctacgtagaggcgcggcggagagaaggaaatgaataacgaaagctttgttgtgacgacctagctagctgtacatgtacaaaaccacagtagcaaatgaacagatcgatcgattatcaccatgtatatatgtgttcttgagcttcattagttccatcttcgctttaccagctagagcggaaagagtaaaattgaacaaaaaaaatcatgactaaagggtaaaaattagaaaaacgtcagaacttttttaaacagccctttatttaatttcctgctcctttttcttcctacgaggtcgatcgaggtgacttctgaaatgggcagaacaatgcgagtttggattctaagtgactaaactttactagtcccgtttggattcaggacatggtctcgaggtgccacggcgtccacacagcacacgcacttgtcttatattaataactgttgaagtatactcagcggcaaatgagaattgagagagaaacaaataaccgaactgtttgtattccacagatcattacacttatatacaagtgaaggggtgt

SEQ ID NO: 2525 - DNA, 2353 bp, Zea Mays
catgccatatatctagtttcgctagttagagtggctagccaaatttgactagttaggggatcaatttgaaaagttagatagattgacgggttagatgattaatctgttgaaaagttgttttgctgttgagtatttaaaatttaaattaacaaatcatttagctagtctattgaagatgctataaacgagcggcaatgtaccggtcgacccaaataagcaaatttgcccagctccgggcccaactgagtccaaacgtccaagtggacgcgaaccactcttctgaaccctaaaccctcgcgctttcgcctcccataccgccgaaactgacaacccatgaccacctcgcttcccctccttcctcgtcctctttggttggactgaggtgtggattcatccatcgctggtgaggacgccgggcttgtttttgttgttttttccctttctcttttcgtttatcgattttgtgggtcttcaaattcaatgtattgtttattggattggcgcttcagtttgtggcgggtttattttcaggttcgcttagtatcaatccaggctctgatttggtggctgaagctctgtttctccatggcgcttcgtttcgagatattaggaagattcaatcgcgcccgcgcagctcgcttaactcttcccccactttacttgtcaaacaccactttttatgcctgttggaactcaaggtacaataaaagggttaaccactgaccagttagaggagataggttgccagattatacttggaaacacctaccatcttgaattacgtccagggtctcaacttattgatgatttgggtggcctgcacaaatttatgaattggaaaagggcattgctgactgactctggtttcgttgctgcatttggctgatattactgaggaaggagttacgtttcagtcacctgttgatgggaagcccatgctcttgacacctgaggaatctattcatattcagaacaatattggagctgatatcatcatggcacttgatgatgttgtaaagaccacaattactggcccgaggataaaagaagctatgtatcgcaccattcgttggattgacaggtgcatagctgatatgcaattggtggtcttgctggtggcgaagacaaggattcattttggcgtgttgttgcccaatgcactgctggattgcctgaaaataaaccacgatatgtcatgggtgttggctatccacttgatattgtagtatgcagtgctttaggtgcagatatgtatgactgtgtttatccaacacggactgctcgttttgggactgcacttgtgcctgagggtgtcctaaagttgaaacataattcaatggcgactgatgaacggccaattgatcatacgtgttcatgcatggtctgcaaaaaatatacgcgcgcctacttacattgcctggtcacaaaagatgctatgggttctcagctgctgtcatatcataacttatcatttatgatgcggttaagtagagacctccacatgtctattcttgaaggacgatttccagagtatgctcttatcaaacccaaatttgtctgaactgctactgaaaatttgcatgggggggaaaatgacatgatttttattttgtgccatcctgtagattcgtgcgaggattcttgagggtgcaggtctgtgctgcttcttttgtcgtatcgtacacgttctgtcagtcatgttcctagagaaacagacttgaattgaaaaattagcctggattacttcgccgaaactacagaaacttgactatgatatcttactgcttgaacgatgctatgcagtttccaacgggagacgttccgcagtgggttcgcaacgcgatggaggtcgctggcattgacatatccgagtgctgtgcttccaccaatgtctgacaccaagcgtataggggccacctttaactgtaccggttgactgcaaatggagttgtgccgagttaagactcttcggcaagcaaaagacgacgacaggctttcacaaagaagtttttttccgtcatacatgtagggtctcacacggattcagcataggattttccaatagtatgctgaagcttggcgacaggttttgttagtgttttgtgttgtgtttggaaaccgcagaggtatgctatgctattcttctggggtctaggttatgcttcgtcttaatcactggatgtgatttttagtggtacggtcagatcaaaggaaggtgtacccaactctgacgaatattttttgttataacgaaaagaatgttatagtccttgcaatgatctgaacctgactggctgactgggtctgcagcatgcagcagctggaacagtccagtcccggcgtgctgctgctg

SEQ ID NO: 2526 - DNA, 1638 bp, Zea Mays
cgaagctagagtagcagagttcgctgttccagggggctggctggactgagttcagatggcagatgggcagggtttggatgtgacagtacaacagtgataaacatacttactcatcgcgattcggtgcagcgtggactcattcaacaggaatacagggctatgtatcatgaggaactctcccaccgtatttcatctgaactcagtggaaaccacaagaaagctatgtcgctgtggattcttgatcctgctggacgtgatgcaactgttttgagagaagctctaaatggtgacactatggatctgagagcagccactgagattatatgttccaggacaccatcacagttgcaaataatgaaacagacttattatgctagattcggtacttatcttgagcatgacattgctcaccacacatccggtgatcaccagaagcttttacttgcatatatggggattccacgctatgaaggtcccgaggttgatcctacaattgtgacacatgatgcaaaggatttgtacaaagctggtgagaaaaggctgggtacggacgagaagatttttatccgtgttttcactgaacgcagttgggcacacttggcatctgtttcttctgcttaccatcatatgtatgaccggaaattagagaaggttatcaagagcgaaacttctggaaactttgaatttgcacttttgactatcctcagatgcgcggaaaacccagcaaagtattttgctaagctcttacgaaaggccatgaaaggtttaggcactgatgacatgacacttataagggtggtggtgacgaggaccgagattgacatgcaatatatcaaggcagagtacttgaagaagtacaagaagccattagctgaggctatcaactccgagacatcaggaaactatcggacgttccttctttcacttgttggtcatggccattaggctatgtttcgaccatgggacatgatatttctatcgatccaccctaaatgcagcgacctacctggaaaacttatgatgttgccatttatctgtcgtgactcctggatctaactgccacatatcacatatgcggttcctagtatgcttgtttaaagtattcgtgtatatatttccatccgggtttcttgttggaagattctggatgggataccagatcagctgttgctggtcacagtgggcttgactggtgtctctatgacgccaatattattatgtcatgttcttgtggtatttccttcatttgttattctgtttttcgctgcttatcccatatccctgttttctccgtccttcacggagaccaacgtcttaggacataacccagagatataggggtacgtttcttggagtataaaagataggttttgtatcttattgtaagatatgactcatacgagggttgtatatatgaagctgtttgttggacttaaaagaaccgtgttaaagatatgtcattgttagaacaactactccctccgtttctttttatttgttgctggatagtgtaattttacactatacaccgacaaataaaaagaaacagagggagtacaagagcttcctaaaaagttgttccccaaaacatcatattaggggctgctgaaaaacaaactcctctaaaaaaaatctaaa

SEQ ID NO: 2527 - DNA, 864 bp, Zea Mays
aaacgaagcctctcctccttggccttgagcccttgagcattcatcgtccgactccgacggcttctattgcagttgcaggtttaagtggctagctggtgatccatttccttcaagtggtttgtccattgccatggtgcaaccaatcactgaagagcagaaagggcattcagtattaagcttaattggaggccgataactgctagagtctggttttataaggaagacaagtgaggagagaatttcgaatcgttagaacaaacactcaagcctggaccaatcctggcagcaactgaaaagagggaaacggaaagtgggtagacgaatccgatgggctgtgcatctgtatggagtcctctgagtttggctactatctgttctacataaggcgcagaaagttggggcttaaaaatgacggcgagcgcgcacgcgatcccgcgggaagggaataaggaaaagcgatgttgacaaagctggatgggaatcctgcgcttttttggaggcgaagatgagaaggaatatatcgcctgtgtcgacctcgccggcctgcttcttctgttccgtggcttggttgtgctcccgctggatcgtgccagccgccagcaggatgatgagcacgtgtgaaccctggcgtgggtatgttgttgtttgctctgggagtgttttgctcagtagtcgttctttgtttatttgtacaaactcgtccatttgtgtcggttgcagaaatacgaaaacacttcaaatggtacgaattggaatttggaaagtacagagtatagaccgctggataagctgtttttattgtttggcgtaatgaactggtgatccatatgttcgccttaaaaaaaaagacctgatggttcaagt

SEQ ID NO: 2528 - DNA, 1047 bp, Zea Mays
atatcaaaccgacaaattggttggagcaaatgttgtttagcttttgtgaggaaagaggcggcggcggcggcggtgattgtttagcaggagaagatccccttctgcactcatcgaacggccgccgccacctagatcagttgggagtgtctcctgtgccttttctagcacagattgtaggtacttcccttgtgcttcaatgcggagttgcaaatgtctttgtacctgttgaaaggcgtcgtttatgtgtaaggtttaagtggctagctggtgatccatttccttcaagtggtttgtccattgccatggtgcaaccaatcactgaagagcagaaagggcattcagtattaagcttaattggaggccgataactgctagatgttatgcagagtctggttttataaggaagacaagtgaggagagaatttcgaatcgttagaacaaacactcaagcctggaccaatcctggcagcaactgaaaagagggaaacggaaagtgggtagacgaatccgatgggctgtgcatctgtatggagtcctctgagtttggctactatctgttctacataaggcgcagaaagttggggcttaaaaatgacggcgagcgcgcacgcgatcccgcgggaagggaataaggaaaagcgatgttgacaaagctggatgggaatcctgcgcttttttggaggcgaagatgagaaggaatatatcgcctgtgtcgacctcgccggcctgcttcttctgttccgtggcttggttgtgctcccgctggatcgtgccagccgccagcaggatgatgagcacgtgtgaaccctggcgtgggtatgttgttgtttgctctgggagtgttttgctcagtagtcgttctttgtttatttgtacaaactcgtccatttgtgtcggttgcagaaatacgaaaacacttcaaatggtacgaattggaatttggaaagtacagagtatagaccgctggataagctgtttttattgtttggcgtaatgaactggtgatccatatgttcgccttaaaaaaaaagacctgatggttcaagt

SEQ ID NO: 2529 - DNA, 1431 bp, Zea Mays
tgttgctggcaattcgttatgcgatgagggaaatgagcttagctgcccttcttttctgggggcgatttgattgccactgattttcggcctagaggttccccatggcatcagttacttatattgatgatagccatgctgaggttattgatcctccaaagaatgaggaaatgctggatgccactgaacttgttggtgatcatattcagaattcaccaaaaccaaatgtggcaagctatggcaacgtgcgtgagctactggaatgccctgtgtgtttgagtgccatgtatcctccaattcatcagtgctccaacggacatactctgtgttctggatgcaagccaagggttcataatcgctgtccaacatgcaggcatgaactgggtaacataagatgccttgctctggaaaaggtggctgcatcactagagcttccatgcaagtaccagaactttgggtgcttgggcatatatccttactattgcaagctgaaacacgaatcgcaatgccaatacagaccatatacttgtccatatgctggatctgaatgcacggttgctggtgatattccgtatctagtaaatcacttgaaagatgaccataaggtcgacatgcacaatggaagcaccttcaatcatcgttatgtcaagtcaaatcctcatgaagtcgagaatgctacctggatgctcacggttttcagctgcttcggccagtacttctgcctgcacttcgaggctttccagctgggcatggcgcccgtgtacatcgccttcctccggttcatgggggacgacgctgaggccaagaactacagctacagcctggaggtcgggggcagcgggcgcaagatgacatggcagggcgtgcctcggagcatcagagacagccaccggaaggtccgggacagctacgacgggctcatcatccagcgcaacatggcgctcttcttctcgggtggcgacaggaaggagctcaagctgcgggtcaccgggaggatctggaaggagcagtgagtcgcgtgcatgcagtgcaggtgcaggcagcagctcgacgcatgcggcgttgcgtgtgttccttctccggtgttaccatgacctgaagcatggaatccaggaaccttgtagggtggtgtaggtggtagttggaatctttgagtcgtgggtggttcttgtgtcgttgtgtggtagtggtaccgactgatttagagaactggaggcaattctctcctttgctttgaacctgtcgagagctggtcatgatgggcacggctgtggactccatgaaatgtaaatgatgtatcccggctcactctgtctgtggatcagactcgctctctatcggcggaccacaattgttcctgagtttggccaatgagttaggtcccaaccattctctgctccagctggtacacgtagttttagtgagatctgtttg

SEQ ID NO: 2530 - DNA, 2278 bp, Zea Mays
gtatttcaaatcccctcgcatccaaacacttccgtggaaaaaaaacaattaataatttattactggcagaagggggaagaagagatggtggacgaggcatgggagcgggcggtggaggcggcgctgcacgccggcggcgaggggagctcgtcgccggcgcggagcctgacgcttgacggcgccgtcaagtgcacgcacgggcggctgccggcggcagagatactggagcggcaccagagcctggagcacctttcgatcgctggcgtcggggtcacgtcgctcgagggtttcccgcggctgcggaacctcacgcggctcaccctctccgacaaccgcatcgccggcggtctcgaccacctcgtcgccgctggcctgtcctcgctgcgggacctcgacctcagcaacaaccgcatccaggacgttgacgacctcgcgccactcgccgacctgcgcctcgtctcgctcgacctctacgagtgccccgttacccgtgtcaaggactacagatccagggtcttcgagatgatccggacgctcaaatacctggacaagatggatgccgacgagaacgagcgccccgagtccgatgacgacgatgacgacggcgagggcgatggcgagggcgatggcgacgatgatgacgaagatgaagaagacgaggaagaccctgggagcggcgaggtagcgaacggcggcgtcgcccatgcgcgcgcgggcgtgccctcgcacccggtggaggtgaatggggtgatcgatgtggacgaggaggagagcgacgctgacgaggtcatcccgaacggtggtgtcgagcacagccatggcgcaaacgggtttcgtgtcgcggctgctggcgaagcccgtggcgaggaggatgaggacgtggaggaagatgacgacgacgacgatgactttgaggaggaggatttgggggaggagattgatgaggatgttgatgacgaggatgctgttgtggaggtgcatgatgtaccaagtagtgacgaggaggaagatggcgtggaggaggatgaggaagaagaggatgaggacgaagatgatgaagaagaggaggaggttgaggatgaaggtgaagaggcggagccacagagcagtggtagggttgccatgatgacaggcgaggatgaaggagaagagatagatgggcatgaacatggagaaggggacgatgaggatgaaaatggtgagattggtgaagaggatgaggagggattggaggtggggaatgatgacgacgaagacgacgcagatgcggatgatgaggatgaagatactgaatatcttgtgcaaccaatcgctcagcctcaagccatggctattggaagtgaattagatggagttgaccctgatgatgctgacgaggacaaggaagaagtcgacaacgatgatgatggggccacagatcagccttcatcctcgcatggagccaagcggaagagagatgatgatgatctgtcaggcagtggtgatgacagtgaggatgacggtgttgaggacttgaggcccttcaagcacaagtgatggagcagccaatgtacatggatccctccctcccccttcttcagctagaagtaagcagcaagatcagcagcagcaggaggaggcagcaggaacagaaatatgttagcaagaagaaggatgccgcggacggggccaaggaggccacagcggaggcggcgaagccggccgcggccgccaagccaaagaaggccgcggcgctgccgctgccggagatgatgcagcaggagatcatcccaccgctgaaggatgccttggaggcggaggacgacgtgtcccaggtgcagctcgccttccaaaacaacacgctggagggatccttcataaagaacgacgtcccttattatttttgggccttctttccaaaaggagacctcacagggctttgcgctatcgtcctacagcaacgaagtgagcaccatcgagccgttcctgatcgatgagaagaggataacggccaagtacgtggtgttctgggtctacaagaggctggctgggcaaggcatccttccggtctggaaggaagaggagggggaggaggaggccgcgaagtagtaggttgcgcaggcgcatacgcatacacatacacacacacagggtgctgccgtgaacatacacatgtaacgctgtaaagttcatctgctagtaaaagttcatctgctgtgaacatacacatgtaacacagatacttcagtttcagcagttaaaaacctaccgtcgttattcttctggtgtgagataagaa

SEQ ID NO: 2531 - DNA, 1644 bp, Zea Mays
gtggtccaaacaaccaaacagccgctatatagcggactaggggctcgttggagagaaaacttattacaaccgaccaacgcgctttgtaacgcctccgctgcaatcagcccccgcggcgagcttgccctgcccctgattgctagttctcgccgttacgtaaggcttcttggccttgcgtcctccgtctttcgttgctgatacatcgaggcatggcgatttatcggtccaacggtgacgccggctccgtcgctttcgtcgtggtatcttatctcgacctggtggccctgttcgcctgcttgcgctactacgagcagttggatcagcagcactcccaaaagcgcgcgagggtcaaggctggggtttggagcctcacgaccctccttactatcatgttcagttacaaggtggctgagattatgcccctgccagtcaaacttgttgtctggtcgatggcagccgctaccacctgtggcggcttctacgctttcttcgtccacagcgagaagcctgtcatgccagcggtggcgccacggcccgccgcggccaaggatgcagcctccaactagcttgccggcgtggacagactggcagatctggagctcggcgcgaccagatccggtgctgctgtgcccgatggcagaggagatctctctggtttactctgctaagagtcaaagaggagctgatgacgacaactaagcttgggttaccgataattgagcctgttctctgcacgagaagaaatttccggcctcacctagtactaataagtatgctggatagtcccccagcacgggagttaattgtatcaagagaagtggagaccaagggcagagtagaactacagaggatatctttgtatatggaggctacatgtgaacaagaaaggagaggaggaagactgtatagatctgaagaacctaaggagaaacaatcagagtacttgctggaacacatatatcttccatgataaaagttagatttcttgtttggtgctcatgcatgggttccatatgttcttcccgtcttattagaacatatctattggactaccatgcataaaaagccgtcgtttcataaactattgggactatacggcaccaatgaagctattgatgctggccggcaagctgacagcgaggtgaaagcttttcaaaacgatattccgagtggaagagaaaagaaaataaaagaaatagcaggttattttagaaaaaaatagttggcccatatgtaacgcgcggtagctttaagattattatgtccagcagcttattcatatattatacatatattcaaatttcactctgtgaatagtagtctaaaatacagtagtgttttgagtaaactatggataaactgctggacaaggtctaagataagtgctgcgtggtggcaacaaacgacacttagtcttgtttggtggcaatgatattggaggggctaaagttttttcgctcctaaacaagctcctaaacaagctcctaagaatcttacgtgttatgttgcattatggaatatctatgtatctgcaaactctctgtagtctgtatgtacctcggatgtgctctatgtggctttgtaattctgaacggaggaagtaataataagataaatggatggcgtaacaagataaaaaaaaga

SEQ ID NO: 2532 - DNA, 1665 bp, Zea Mays
gtggtccaaacaaccaaacagccgctatatagcggactaggggctcgttggagagaaaacttattacaaccgaccaacgcgctttgtaacgcctccgctgcaatcagcccccgcggcgagcttgccctgcccctgattgctagttctcgccgttacgtaaggcttcttggccttgcgtcctccgtctttcgttgctgatacatcgaggcatggcgatttatcggtccaacggtgacgccggctccgtcgctttcgtcgtggtatcttatctcgacctggtggccctgttcgcctgcttgcgctactacgagcagttggatcagcagcactcccaaaagcgcgcgagggtcaaggctggggtttggagcctcacgaccctccttactatcatgttcagttacaaggtggctgagattatgcccctgccagtcaaacttgttgtctggtcgatggcagccgctaccacctgtggcggcttctacgctttcttcgtccacagcgagaagcctgtcatgccagcggtggcgccacggcccgccgcggccaaggatgcagcctccaactagctgtcgcctcggttgttttagcttgccggcgtggacagactggcagatctggagctcggcgcgaccagatccggtgctgctgtgcccgatggcagaggagatctctctggtttactctgctaagagtcaaagaggagctgatgacgacaactaagcttgggttaccgataattgagcctgttctctgcacgagaagaaatttccggcctcacctagtactaataagtatgctggatagtcccccagcacgggagttaattgtatcaagagaagtggagaccaagggcagagtagaactacagaggatatctttgtatatggaggctacatgtgaacaagaaaggagaggaggaagactgtatagatctgaagaacctaaggagaaacaatcagagtacttgctggaacacatatatcttccatgataaaagttagatttcttgtttggtgctcatgcatgggttccatatgttcttcccgtcttattagaacatatctattggactaccatgcataaaaagccgtcgtttcataaactattgggactatacggcaccaatgaagctattgatgctggccggcaagctgacagcgaggtgaaagcttttcaaaacgatattccgagtggaagagaaaagaaaataaaagaaatagcaggttattttagaaaaaaatagttggcccatatgtaacgcgcggtagctttaagattattatgtccagcagcttattcatatattatacatatattcaaatttcactctgtgaatagtagtctaaaatacagtagtgttttgagtaaactatggataaactgctggacaaggtctaagataagtgctgcgtggtggcaacaaacgacacttagtcttgtttggtggcaatgatattggaggggctaaagttttttcgctcctaaacaagctcctaaacaagctcctaagaatcttacgtgttatgttgcattatggaatatctatgtatctgcaaactctctgtagtctgtatgtacctcggatgtgctctatgtggctttgtaattctgaacggaggaagtaataataagataaatggatggcgtaacaagataaaaaaaaga

SEQ ID NO: 2533 - DNA, 3959 bp, Zea Mays
cgacgatcggcgtcggcagcggcgcgtccctgctgtccctcctgcatgcttgccacccagcttcgcctcgccacgcgtctcgtggaccattgcgcgcgtccctcgtgccacggcgcacccgcagccatgagtgccagcgctcccgtctcccgactcccgagcaaatcgctcggcgcctactactagcccgaaacctaggtggtgggaactcgggatacgaggtcctcttctccgccgcttgtcctcggcaagcacaaacgcggtaagccaccaaccgcctttcgatcgccgggctccatccctaagccatctcgccgcctcgtgagtcgtgagccgtgagccaaccgacctgccatcatcaattagtgacttcctgaacctgcttcgtgcgtcctaccactccaaagttccaacaatcaagagatttaaacaaagccttccataacttgttgccaataagtgcaggatttggaggccactgggctttggaaattcaaagtagactgcttggatcataacgagagagcacaaagggcctgggttttgtaaacagttggctttcactagagtcgatccattccatactgagcttttgcatatcatcaattcatcacacaatggatggtgtgcgatgcatggagtccccagctgctggtgatgccccgcatagttctttccgaacccttgggccaacactcctggtttcaatggggtatcttgacttcggaaaatggttggtggcagtggaagctgggtctcggtttggctatgatcttgtcctgctcgtgctgctttttaatctatcagctattctgtgtcagtacctctcgagctgtatcggcattgtcaccaaaaagaatcttgcggagatttgccaccaggagtatgatcagaaaatatgtgttgttcttggtcttcaagcaggactgtccttgctaacttctgaatttaccatgattgcaggcatcgtagttgggttcaaccttgtatttgaaagcaacaatcccatcacagtcgtatgttttacaagtgttgtagttaatctgctaccatatacactctcccttctggacaagaggaaggctggaatgtttaatgcctacgcatctggctttacactagtttgttttgtgcttggtttattagtgagccatcccaaaacccctgtcaataccaacgtaatgttccccaagttgagtggtgaaagtgcttactcactgatggtactacttggcacaaatataatagtacacaacttttatactcattcatcagttgttcaggttcagagaagatttcagggtcatacccttggtactctgtttcatgatcaccttttttctgtactatttgcattttctggtatctttcttgtgaattatattctgatgagttcagcagttgatgagtccaaaaacacaatggccattaacttccaagatgctagacagctaatgaatcaggtgttcacaagtcctgtggcgccaattgtattattagtggtccttctcttttcaggccacatcgtgtcaatgacatgtattattggtagtgatgtaatttcagaggatctcttcggcataaagctgcctctttttgtgcaccatctgttacctaaggtttttgccatgattactactatataccatgcgaaggttgtgggttttgaagggttatatcagttactcatggtctgcccaattatccaagctatgctccttccttcgtctgttatacctgttttccgcatttcctcgtcgagatcattgatgggaagataccggatatctcgatgtgttgaaatattgtgcttcctagcatttcttctaacactgtttacaaatatcatttttgtggcggaagttctttttggtgatagcacttggacaaatgacctgaaagggaacactgaaaaccctattctacttccatatatcgtcgtagtcctgatatcatgtggatctattggttttgcactgttccttgctgttactccactaaaatcagcatgtaatgaagctgagagagcgttgtctgtgcactcataacagagagaaacgttggatgccactcgtcacagcaaaaccgacttctctgagaatagggcacatgaagcatatgaagaacagaggtccttagccatccttgttccacaggattcactgaaaggtgatagaaataattttcgtagcatatccgtcatctcaaattagcttttgatcacaagggcagtttctgacgctactctacatgcaaatcatatgtctagtaatccagaagttcatccttagcattgactggacagagcctatgtcaactgaaggttgtgcccttaaaattgactggacagagagcctatgtcaactgaaaaaggttgtgcaaatagactcggatgcctgcacggacaacgctctgtttgtggagaagtctgaatatttcttttatcaatcactatttctcttccatttaaattcacaattaacaggatggttcttatcatgactgtacctctgtttgtgggagtggaagtgttggcttatctacctattactcaaagaaacaccactgtctcacctgacacctccggtgattgctgcaaacagaatgctttgttggttgttgaatgaagcaaattaatgtggacagtggtactgcaaatcaggtggttcctctataggatacaccatgtgtggagtctgcaacaaggttctagtctcaacttgcacatatggtggctcttgcgagttgtgacatgatcgtctgacatcaaagcgtgaaagacgttaataaatctgttcaggagaagcagtcatctagcgtggcaagcttggaattgacaatgagtgaggtggacactggtagatctagtagcagggtcaaaggatgatttcttttaccaagtatgcttgcattcgtgaggcaaatcaatgatacattatttagagcgtgattggttgcctgctcggcccagcctgagcgtatccagtcattcaggcccatggcggcatgctaaagaggtgcaataggctattgtttggttactttgtttcatctcatgatggcccattagagcttgcctttggttgcaaggctgtacagacacttgagcatggcaagcctcccaactagagaacagaagacaccagtcatgacaacgatgttctttctcctcactaagtatgcaccttttcctcttgttgcctgccgcagacccactagtagcacctgcagctgcctcctagctcttcggagcctccccaaacagccttgaaacatcatcaaccttcatggcatctgtttgtagtgagctctcagcaaagtaagatgtggtacccattgcaaacttgccagttgcaagaccattgccaaagatcacttccatctgcttgtaattttctatttggcatgtttaagtactcagcattcttagcccttcagggtgtgcctatattgcaagctcacaaatgttagtgtaaggctggaattaggttagtgggcacttaggaaaggttacaaaatcacagatacaattaacatacatcttgatatggccacctatagtgcacttcatctagactgatcatgtgtcattcatcatcatcatcacaaaggggctatttgtttcggtttttcgctagattttagccgtcatagtcgacttctagataccagacacagaaaaccgaacgcttcgcatctcagtgcgcttcaatgaaaatcatttttttttgtaaaaatcgcctaaatctgttggaactttgttccatatgctcttggcaagttggtggtgcgataaggcattgggaagcaagagtgcagcatggcaaagcgacctagattggtgatgctgggaatggttaggtttagcggtgcaggtgcagggcggcgactagtcactagagcgtgagctcttgcgtgctcagaggagatttcatacattatttgctccgtacaacaaa

SEQ ID NO: 2534 - DNA, 4794 bp, Zea Mays
cgacgatcggcgtcggcagcggcgcgtccctgctgtccctcctgcatgcttgccacccagcttcgcctcgccacgcgtctcgtggaccattgcgcgcgtccctcgtgccacggcgcacccgcagccatgagtgccagcgctcccgtctcccgactcccgagcaaatcgctcggcgcctactactagcccgaaacctaggtggtgggaactcgggatacgaggtcctcttctccgccgcttgtcctcggcaagcacaaacgcggtaagccaccaaccgcctttcgatcgccgggctccatccctaagccatctcgccgcctcgtgagtcgtgagccgtgagccaaccgacctgccatcatcaattagtgacttcctgaacctgcttcgtgcgtcctaccactccaaagttccaacaatcaagagatttaaacaaagccttccataacttgttgccaataagtgcaggatttggaggccactgggctttggaaattcaaagtagactgcttggatcataacgagagagcacaaagggcctgggttttgtaaacagttggctttcactagagtcgatccattccatactgagcttttgcatatcatcaattcatcacacaatggatggtgtgcgatgcatggagtccccagctgctggtgatgccccgcatagttctttccgaacccttgggccaacactcctggtttcaatggggtatcttgacttcggaaaatggttggtggcagtggaagctgggtctcggtttggctatgatcttgtcctgctcgtgctgctttttaatctatcagctattctgtgtcagtacctctcgagctgtatcggcattgtcaccaaaaagaatcttgcggagatttgccaccaggagtatgatcagaaaatatgtgttgttcttggtcttcaagcaggactgtccttgctaacttctgaatttaccatgattgcaggcatcgtagttgggttcaaccttgtatttgaaagcaacaatcccatcacagtcgtatgttttacaagtgttgtagttaatctgctaccatatacactctcccttctggacaagaggaaggctggaatgtttaatgcctacgcatctggctttacactagtttgttttgtgcttggtttattagtgagccatcccaaaacccctgtcaataccaacgtaatgttccccaagttgagtggtgaaagtgcttactcactgatggtactacttggcacaaatataatagtacacaacttttatactcattcatcagttgttcaggttcagagaagatttcagggtcatacccttggtactctgtttcatgatcaccttttttctgtactatttgcattttctggtatctttcttgtgaattatattctgatgagttcagcagttgatgagtccaaaaacacaatggccattaacttccaagatgctagacagctaatgaatcaggttcatgtcattgttctcttcttatccgtcaagtcttttgtttaattggctatttgttctccgttcaccttcctattaatgtaaagagcagcattcgaattctcaaattataagacatgaccataggtttggtgttgtggcatgctactatacttgcatgtttggattttcaactttgtgaagttattgtattataagtacattacctattttttgggttgaccaaatggtgcacgagtttcaatattttactatggtcaaaaggacctaattggagtagcagagttttaggaaaaatatagttctagtatatttggggttcaagttatagatattagaaatcctatagtgtgtgtttgctttgtggaagtgcctcatgctagatcaggtcgtgtatcatgagtttattccatgaatttttgggtggaacaaacccattcttcatgtgtatacattagcttgtgagaattgagttggtgatgcatcaactcattctattctacagaccaaacaaaaagtgatcatgatggatcaccatattactcaaacccaatacacgttgttctaaacaagggctaaggttgggagaaatgatgtgttctagggaagccactggggacactctcttaggctcattccctgaatagggacataaagactgagttataagtaagctgctgggatgctctttttctcttcaactttcttgaaaacttagcctccgcatgaactggccagcgcatattcaataaaaatagtatccctttgagcttggagtgtgcattgaaggaggaagctccttcctgaatttcgtctggattcttgtattttgcaggtgttcacaagtcctgtggcgccaattgtattattagtggtccttctcttttcaggccacatcgtgtcaatgacatgtattattggtagtgatgtaatttcagaggatctcttcggcataaagctgcctctttttgtgcaccatctgttacctaaggtttttgccatgattactactatataccatgcgaaggttgtgggttttgaagggttatatcagttactcatggtctgcccaattatccaagctatgctccttccttcgtctgttatacctgttttccgcatttcctcgtcgagatcattgatgggaagataccggatatctcgatgtgttgaaatattgtgcttcctagcatttcttctaacactgtttacaaatatcatttttgtggcggaagttctttttggtgatagcacttggacaaatgacctgaaagggaacactgaaaaccctattctacttccatatatcgtcgtagtcctgatatcatgtggatctattggttttgcactgttccttgctgttactccactaaaatcagcatgtaatgaagctgagagagcgttgtctgtgcactcataacagagagaaacgttggatgccactcgtcacagcaaaaccgacttctctgagaatagggcacatgaagcatatgaagaacagaggtccttagccatccttgttccacaggattcactgaaaggtgatagaaataattttcgtagcatatccgtcatctcaaattagcttttgatcacaagggcagtttctgacgctactctacatgcaaatcatatgtctagtaatccagaagttcatccttagcattgactggacagagcctatgtcaactgaaggttgtgcccttaaaattgactggacagagagcctatgtcaactgaaaaaggttgtgcaaatagactcggatgcctgcacggacaacgctctgtttgtggagaagtctgaatatttcttttatcaatcactatttctcttccatttaaattcacaattaacaggatggttcttatcatgactgtacctctgtttgtgggagtggaagtgttggcttatctacctattactcaaagaaacaccactgtctcacctgacacctccggtgattgctgcaaacagaatgctttgttggttgttgaatgaagcaaattaatgtggacagtggtactgcaaatcaggtggttcctctataggatacaccatgtgtggagtctgcaacaaggttctagtctcaacttgcacatatggtggctcttgcgagttgtgacatgatcgtctgacatcaaagcgtgaaagacgttaataaatctgttcaggagaagcagtcatctagcgtggcaagcttggaattgacaatgagtgaggtggacactggtagatctagtagcagggtcaaaggatgatttcttttaccaagtatgcttgcattcgtgaggcaaatcaatgatacattatttagagcgtgattggttgcctgctcggcccagcctgagcgtatccagtcattcaggcccatggcggcatgctaaagaggtgcaataggctattgtttggttactttgtttcatctcatgatggcccattagagcttgcctttggttgcaaggctgtacagacacttgagcatggcaagcctcccaactagagaacagaagacaccagtcatgacaacgatgttctttctcctcactaagtatgcaccttttcctcttgttgcctgccgcagacccactagtagcacctgcagctgcctcctagctcttcggagcctccccaaacagccttgaaacatcatcaaccttcatggcatctgtttgtagtgagctctcagcaaagtaagatgtggtacccattgcaaacttgccagttgcaagaccattgccaaagatcacttccatctgcttgtaattttctatttggcatgtttaagtactcagcattcttagcccttcagggtgtgcctatattgcaagctcacaaatgttagtgtaaggctggaattaggttagtgggcacttaggaaaggttacaaaatcacagatacaattaacatacatcttgatatggccacctatagtgcacttcatctagactgatcatgtgtcattcatcatcatcatcacaaaggggctatttgtttcggtttttcgctagattttagccgtcatagtcgacttctagataccagacacagaaaaccgaacgcttcgcatctcagtgcgcttcaatgaaaatcatttttttttgtaaaaatcgcctaaatctgttggaactttgttccatatgctcttggcaagttggtggtgcgataaggcattgggaagcaagagtgcagcatggcaaagcgacctagattggtgatgctgggaatggttaggtttagcggtgcaggtgcagggcggcgactagtcactagagcgtgagctcttgcgtgctcagaggagatttcatacattatttgctccgtacaacaaa

SEQ ID NO: 2535 - DNA, 1828 bp, Zea Mays
ctcttctttccctctgtataccgcgagcgcccgcagctagctgctagccgcgcgcccgccgctacctgcccgcctccagcgcgcccgccgcgcgtgccccgccgccacccctcgcggtgatctgtgtgggcgacgtccacagctacatcacgaagctggagagcctctggtccaacctctaggccgcactccccgccgacgccttggccaccgcgctggtcatcttcctcggcgactacaacgaccgcggcccgcacacccgcagggtcctcaacttcctcctcgcgctcccgacgcgctacccagcgcagcgccatgtcttcctctgcggcaaccacgacctcgccttcacggcgttcgttggggcgccgccgccgccgcccaacggctccccgttcttcggccacctgcgcagcgccatctctctttcctccctatctcgctgctccctcccctgccgccctgcttatttacgcccatttcttaagagaggatttgatggcctgtcagaataaaagagctcgaggaaattgcggcggccggaaatcctggtgatggtgccacacaaacacgagaatctgcttcgtcctcggcggaattgccgtcggggtcgggcgattcttcggaggacaagtgcctctgtttcgttgagctggctaggtccatggggattagtcaggacactcatgagtcgatggcaacagatgcagccaattacctttgccaccagcttcagcatcttcttgggcctatctcttctgcgacgagccaaagtggcccctgggaggagaggtcggtgatggttaggttgactcagaagctgcagaaatctaagagaaataagtggtggcggcagaggagaaggaagcatgttgcagagctttttcagaaggagcgtgcggattatgatagagttgaccaggaagctgatgaatggagggctaagcaaatagccaaggacattgcaaagcggagggtggaaagcatgcagcagattgctagaaagaaaacaaatgaggaaagaaagcgcctagaatctgagactggaaatgctttgggtgattcagatactgagccaaggaacacaaagtacatgtcactgggagacgaccgcagcctgtgcatggaatgcctggggtctgcggtcatggacaccggtgaatgccagcccctgtaccattctatcagggactactacgaggggatgaaaatgaagctggaccagcagatacccatgctcttggttgagcagcaagcgcttaacgaagccatggaaggagagagtagaggcccacaccacatgcctgagacaaggggcctgtgtctgtcggaggagcagactgtgagcagtatacttaggaggcccaggattggtggaaaccggttactggacatgagaactcagccacaaaaactgactaggagatgtgaattgaggtgtcccagtgggtcaaggctatgatttgaccgaaacttgtgctggagcagctttcactgaatgggatgacaccacttgctgctatgtgaaggattccggctcccatcaagtgactccttcccctcacgttgactttgcggacagatgtctcaattctagtggtagagctacgaacaacaatctgatgtcctgatcgagagttgaacttgtgtatttgaacttgtgaactatggatgtgaacttgtgtgaatttgtgaacttatgtatttggaattatgtgaatttgcgaacttatatatttggacttgtgtgaatttgtgatatgaacatatatcaatgtgtttgaaatctgtattgtatgtgatatattgtgttgcatgtgatattttg

SEQ ID NO: 2536 - DNA, 2121 bp, Zea Mays
ctcttctttccctctgtataccgcgagcgcccgcagctagctgctagccgcgcgcccgccgctacctgcccgcctccagcgcgcccgccgcgcgtgccccgccgccacccctcgcggtgatctgtgtgggcgacgtccacagctacatcacgaagctggagagcctctggtccaacctctaggccgcactccccgccgacgccttggccaccgcgctggtcatcttcctcggcgactacaacgaccgcggcccgcacacccgcagggtcctcaacttcctcctcgcgctcccgacgcgctacccagcgcagcgccatgtcttcctctgcggcaaccacgacctcgccttcacggcgttcgttggggcgccgccgccgccgcccaacggctccccgttcttcggccacctgcgcagcgccatctctctttcctccctatctcgctgctccctcccctgccgccctgcttatttacgcccatttcttaagagaggatttgatggcctgtcagaataaaagagctcgaggaaattgcggcggccggaaatcctggtgatggtgccacacaaacacgagaatctgcttcgtcctcggcggaattgccgtcggggtcgggcgattcttcggaggacaagtgcctctgtttcgttgagctggctaggtccatggggattagtcaggacactcatgagtcgatggcaacagatgcagccaattacctttgccaccagcttcagcatcttcttgggcctatctcttctgcgacgagccaaagtggcccctgggaggagaggtcggtgatggttaggttgactcagaagctgcagaaatctaagagaaataagtggtggcggcagaggagaaggaagcatgttgcagagctttttcagaaggagcgtgcggattatgatagagttgaccaggaagctgatgaatggagggctaagcaaatagccaaggacattgcaaagcggagggtggaaagcatgcagcagattgctagaaagaaaacaaatgaggaaagaaagcgcctagaatctgaggttgacttggatttggagaattatgagtgtttcatagatgttactctgacgagggataacaatattaccactagaaatatatactagtctgtcattgagaaggagagaaggggtgattatattggaaagactttatagctgtgctacaaggagctgcaccatccgaaatgcgacgtctgccttcagtttattccaacgaacaggagtggcctgatagagtacagatcccacccgttctagggccagaagtattgcccttcgcatgagcacgacaggacgccacgttgctgcagctgtgagaaaatggagccaaggaacacaaagtacatgtcactgggagacgaccgcagcctgtgcatggaatgcctggggtctgcggtcatggacaccggtgaatgccagcccctgtaccattctatcagggactactacgaggggatgaaaatgaagctggaccagcagatacccatgctcttggttgagcagcaagcgcttaacgaagccatggaaggagagagtagaggcccacaccacatgcctgagacaaggggcctgtgtctgtcggaggagcagactgtgagcagtatacttaggaggcccaggattggtggaaaccggttactggacatgagaactcagccacaaaaactgactaggagatgtgaattgagggtgattcctctggtaagtgtcccagtgggtcaaggctatgatttgaccgaaacttgtgctggagcagctttcactgaatgggatgacaccacttgctgctatgtgaaggattccggctcccatcaagtgactccttcccctcacgttgactttgcggacagatgtctcaattctagtggtagagctacgaacaacaatctgatgtcctgatcgagagttgaacttgtgtatttgaacttgtgaactatggatgtgaacttgtgtgaatttgtgaacttatgtatttggaattatgtgaatttgcgaacttatatatttggacttgtgtgaatttgtgatatgaacatatatcaatgtgtttgaaatctgtattgtatgtgatatattgtgttgcatgtgatattttg

SEQ ID NO: 2537 - DNA, 2265 bp, Zea Mays
ctcttctttccctctgtataccgcgagcgcccgcagctagctgctagccgcgcgcccgccgctacctgcccgcctccagcgcgcccgccgcgcgtgccccgccgccacccctcgcggtgatctgtgtgggcgacgtccacagctacatcacgaagctggagagcctctggtccaacctctaggccgcactccccgccgacgccttggccaccgcgctggtcatcttcctcggcgactacaacgaccgcggcccgcacacccgcagggtcctcaacttcctcctcgcgctcccgacgcgctacccagcgcagcgccatgtcttcctctgcggcaaccacgacctcgccttcacggcgttcgttggggcgccgccgccgccgcccaacggctccccgttcttcggccacctgcgcagcgccatctctctttcctccctatctcgctgctccctcccctgccgccctgcttatttacgcccatttcttaagagaggatttgatggcctgtcagaataaaagagctcgaggaaattgcggcggccggaaatcctggtgatggtgccacacaaacacgagaatctgcttcgtcctcggcggaattgccgtcggggtcgggcgattcttcggaggacaagtgcctctgtttcgttgagctggctaggtccatggggattagtcaggacactcatgagtcgatggcaacagatgcagccaattacctttgccaccagcttcagcatcttcttgggcctatctcttctgcgacgagccaaagtggcccctgggaggagaggtcggtgatggttaggttgactcagaagctgcagaaatctaagagaaataagtggtggcggcagaggagaaggaagcatgttgcagagctttttcagaaggagcgtgcggattatgatagagttgaccaggaagctgatgaatggagggctaagcaaatagccaaggacattgcaaagcggagggtggaaagcatgcagcagattgctagaaagaaaacaaatgaggaaagaaagcgcctagaatctgagactggaaatgctttgggtgattcagatactgagccaaggaacacaaagtacatgtcactgggagacgaccgcagcctgtgcatggaatgcctggggtctgcggtcatggacaccggtgaatgccagcccctgtaccattctatcagggactactacgaggggatgaaaatgaagctggaccagcagatacccatgctcttggttgagcagcaagcgcttaacgaagccatggaaggagagagtagaggcccacaccacatgcctgagacaaggggcctgtgtctgtcggaggagcagactgtgagcagtatacttaggaggcccaggattggtggaaaccggttactggacatgagaactcagccacaaaaactgactaggagatgtgaattgaggtgtcccagtgggtcaaggctatgatttgaccgaaacttgtgctggagcagctttcactgaatgggatgacaccacttgctgctatgtgaaggtttgttctacaaatttgatgtttgctggatctgttaacaaatgtagttgatattcatatgacagatgtagcagatgaaacctgcattaaataaaacaagtggtatatttaagcgtgtctgggagtgtcatgcttggcaccttttctggatccattttatcaaccacgtagcatagcatttaagttttttcaatggaatgctcaaacttttccattaaatacttgccccaatgaacacttccattttcttgaaaactgatctctttccagcatgtccagtccttaattatctgaaatatgttccttttttcgtcaaaccaatgtagcttgtttcatgggaagaaggtggttacaagatttctgattatccgatgccgagaggagaggtagtggttggcggacacagtacaacaaaaggctataggactaactgtattgattccggctcccatcaagtgactccttcccctcacgttgactttgcggacagatgtctcaattctagtggtagagctacgaacaacaatctgatgtcctgatcgagagttgaacttgtgtatttgaacttgtgaactatggatgtgaacttgtgtgaatttgtgaacttatgtatttggaattatgtgaatttgcgaacttatatatttggacttgtgtgaatttgtgatatgaacatatatcaatgtgtttgaaatctgtattgtatgtgatatattgtgttgcatgtgatattttg

SEQ ID NO: 2538 - DNA, 1772 bp, Zea Mays
ggaggctcctgtggtggctgtgggggcgagagcgggagcgccatgaggggcggtggccgtggcggcggcgggaggtagccttcgtatgcggcgtcggatggggcggatgcggcggcgatcccggtcgcctcaaggaagatggtgcagagcctcaaggggatcctggccgaccgctcggagggagagatctacgccacgctctgcgactgcggaatggaccccgacatagccgtcgagaggctcatctcccagacccctgcacaactaaggtggagccttacaaagcaagagtggttgcttgcaaccggcctcacagagttttgaagctttgaaccccagagccgttgctgttgtgatagaccccatccagaagaggacgatcgattttcgattttgtaggagagctgttaaacctctccggctccgccactttcgtttccgtttctgcgctttgtttggtgccgaattttctgcacgttttaccaattctgaacgaaaattccctttctgttttgccgactgtagggctgttgaatccgtatgggctatggtcgccgaggcactcgcagtcggacgtgtcttcatcggagatggagtttggtacagcgcgccagtacgacaccaccgaccttgatgaagcacttcaaagagagagttttgaagctttgaaccccagagccgttgctgttgtgatagaccccatccagaagaggacgatcgattttcgattttggctgttgaatccgtatgggctatggtcgccgaggcactcgcagtcggacgtgtcttcatcggagatggagtttggtacagcgcgccagtacgacaccaccgaccttgatgaagcacttcaaagagagcaaacacatttgatcgatgtcttgtgtgggtatcatgcactttttgcgtgggttccacctccactgcgcgggctgtatatagagccgcccacctgccccacaccatgtcgtcaccgagttgtgagtggggcatccgtcgcctctaatccaaataaggaggagctgcggccagacatgggcggcagagtagtatctggatccgctgaacacccaccggtggtatctagctttcctatcaatcagtggctttcaaaggtactctgtgttatctcgtctactcatgaacttcctgggactgaaatagtgggtcgtattgatgcctttattgctgtgatggcacatacacatgtaattgcaaatggccctatcagctgatgttcttgctgctgccaacacaacaacagaagttgcaatgaggcttgtgagacctgagacgaagtgtctaggatgaagtttcagatatgtcagctgatttcagtttcagagctgcggattttagtttcaaagctgcagatttcaggctgcaagatttctacagaatgtgaagactatgctatcaaaaaaagcttttctaatttacctaggatgaagttcaggattgtttaggatgaatcatgtgtttatctatcttcaataatatttttttaccccatttaactcggaagcggatggaaagaagattcagatccagctgacagggttcatggaaaagaacacagtgaagttcatgaaggagctctggagccttctcctcagtgcgcagcagaatgccagtggggtgcctcaacagtttctggatgaaaaggaggctgagatacatcagaaaaaggcataggatgacaggagtgcgcaggagatccaaaagaagccagaaaaggagggaatggactcagaactggaaaagaacaaaac

SEQ ID NO: 2539 - DNA, 2389 bp, Zea Mays
ggaggctcctgtggtggctgtgggggcgagagcgggagcgccatgaggggcggtggccgtggcggcggcgggaggtagccttcgtatgcggcgtcggatggggcggatgcggcggcgatcccggtcgcctcaaggaagatggtgcagagcctcaaggggatcctggccgaccgctcggagggagagatctacgccacgctctgcgactgcggaatggaccccgacatagccgtcgagaggctcatctcccagacccctgcacaactaaggtggagccttacaaagcaagagtggttgcttgcaaccggcctcacagggctgttgaatccgtatgggctatggtcgccgaggcactcgcagtcggacgtgtcttcatcggagatggagtttggtacagcgcgccagtacgacaccaccgaccttgatgaagcacttcaaagagagagccgcccacctgccccacaccatgtcgtcaccgagttgtgagtggggcatccgtcgcctctaatccaaataagttccccatcccaatccaatcctaaataggaggagctgcggccagacatgggcggcagagtagtatctggatccgctgaacacccaccggtggtatctagctttcctatcaatcagtggctttcaaagctgatgttcttgctgctgccaacacaacaacagaagttgcaatgaggcttgtgagacctgagacgaagtgtctaggatgaagtttcagatatgtcagctgatttcagtttcagagctgcggattttagtttcaaagctgcagatttcaggctgcaagatttctacagaatgtgaagactatgctatcaaaaaaagcttttctaatttacctaggatgaagttcaggattgtttaggatgaatcatgtgtttatctatcttcaataatatttttttaccccatttaactcggtgcggactgtatctgcaatttgctggagctgtttttttctttgaggcaccccacgtttcttctgattttagacattaattgtctgtatcaaagatggtagcttatggcaatgaggtgtgtttatgtttttggtttgttaatggcaggaagcggatggaaagaagattcagatccagctgacagggttcatggaaaagaacacagtgaagttcatgaaggagctctggagccttctcctcagtgcgcagcagaatgccagtggggtgcctcaacagtttctggatgaaaaggaggctgagatacatcagaaaaaggcataggatgacaggagtgcgcaggagatccaaaagaagccagaaaaggagggaatggactcagaactggaaaagaacaaaacgatggatggggatgttggtaactcaagatcctatggtgatccagttgcctctgctttaaacagtacaaatttcaatatcgaggaagaaaaggacaatgatttcaagcgcacctcaagaccaaaaaataggttcgttatcactttcttgcataatcttgtagggttttactacaacttagatgcatgctttgcattagatgctgttactaggtgcccatatttaggttgtaaggatgccacaaaaatgatgcttgatgttaaggagatattcacatgccaaattcaggttgaacttccaaaaaccaatccagtatacctcatgctacgcacatcatttggtttctcagctaaaggaaccgggcttaaagctcttgaatttgccctctccatctgtgacagttttgatatgtatggcttcaccgtagacccaggttacaaggaatgctggtgaaaatccattcaccgatgcaaggagatcctggcaggacagtgaggtggctgcctaccaaggctaccatcgaggctgctagagttgcttccgagaagttgttgaagagacctggtgctggaagtgatgatcctctggggacttgcaccatgataaagaagcgcaggaaagggaaggcgccaaacagatctggtctacgagatgctgccatgaagcacctcgaggacatgaaaggtgccaccaggtatcccttggagcgaaatgcagggggtggttacctctgcatgatcaatgatagatacgaccgcggctgattatggcatcagtgccccctccgcccctcccctccacttgagtcgaagaaaggaatgcttgtgataaacttgcagtttgagggaacgaaaaggtcgattctttgatttatgcagctggtgtacaacgtttgagtgtagtgaaagttaggtgtaatgttttgagtgtagagaaagctatatgttgtggatggatacgaatggtcaaattgtagcacttttggtgcttataatactaataggtgagcgcccgtacgttgcaacgaagacatataatatacacattttatatataag

SEQ ID NO: 2540 - DNA, 2390 bp, Zea Mays
ggaggctcctgtggtggctgtgggggcgagagcgggagcgccatgaggggcggtggccgtggcggcggcgggaggtagccttcgtatgcggcgtcggatggggcggatgcggcggcgatcccggtcgcctcaaggaagatggtgcagagcctcaaggggatcctggccgaccgctcggagggagagatctacgccacgctctgcgactgcggaatggaccccgacatagccgtcgagaggctcatctcccagacccctgcacaactaaggtggagccttacaaagcaagagtggttgcttgcaaccggcctcacagggctgttgaatccgtatgggctatggtcgccgaggcactcgcagtcggacgtgtcttcatcggagatggagtttggtacagcgcgccagtacgacaccaccgaccttgatgaagcacttcaaagagagagttttgaagctttgaaccccagagccgttgctgttgtgatagaccccatccagaagaggacgatcgattttcgattttggctgttgaatccgtatgggctatggtcgccgaggcactcgcagtcggacgtgtcttcatcggagatggagtttggtacagcgcgccagtacgacaccaccgaccttgatgaagcacttcaaagagagagccgcccacctgccccacaccatgtcgtcaccgagttgtgagtggggcatccgtcgcctctaatccaaataaggaggagctgcggccagacatgggcggcagagtagtatctggatccgctgaacacccaccggtggtatctagctttcctatcaatcagtggctttcaaaggtactctgtgttatctcgtctactcatgaacttcctgggactgaaatagtgggtcgtattgatgcctttattgctgtgatggcacatacacatgtaattgcaaatggccctatcagctgatgttcttgctgctgccaacacaacaacagaagttgcaatgaggcttgtgagacctgagacgaaggaagcggatggaaagaagattcagatccagctgacagggttcatggaaaagaacacagtgaagttcatgaaggagctctggagccttctcctcagtgcgcagcagaatgccagtggggtgcctcaacagtttctggatgaaaaggaggctgagatacatcagaaaaaggatggggatgttggtaactcaagatcctatggtgatccagttgcctctgctttaaacagtacaaatttcaatatcgaggaagaaaaggacaatgatttcaagcgcacctcaagaccaaaaaataggttgtaaggatgccacaaaaatgatgcttgatgttaaggagatattcacatgccaaattcaggttgtaaggatgccacaaaaatgaagacctttgttgtagtgacataaggagtttcgaaactgcaaggaattttaaatttgaatatttttcagtgagatgttaaggtagataaagttgttgagttagatgaaacaaaaaaaaagaggcactgatcgttaagacgacaatacatgatatcatgaaccaaatgattcgggaacttccaaaaaccaatccagtatacctcatgctacgcacatcatttggtttctcagctaaaggaaccgggcttaaagctcttgaatttgccctctccatctgtgacagttttgatatgtatggcttcaccgtagacccaggttacaaggaatgttctgtgcttacagctgaagttatctttcaggacaaggtacttctcagagaaaatcatgtgcagctggtgaaaatccattcaccgatgcaaggagatcctggcaggacagtgaggtggctgcctaccaaggctaccatcgaggctgctagagttgcttccgagaagttgttgaagagacctggtgctggaagtgatgatcctctggggacttgcaccatgataaagaagcgcaggaaagggaaggcgccaaacagatctggtctacgagatgctgccatgaagcacctcgaggacatgaaaggtgccaccaggtatcccttggagcgaaatgcagggggtggttacctctgcatgatcaatgatagatacgaccgcggctgattatggcatcagtgccccctccgcccctcccctccacttgagtcgaagaaaggaatgcttgtgataaacttgcagtttgagggaacgaaaaggtcgattctttgatttatgcagctggtgtacaacgtttgagtgtagtgaaagttaggtgtaatgttttgagtgtagagaaagctatatgttgtggatggatacgaatggtcaaattgtagcacttttggtgcttataatactaataggtgagcgcccgtacgttgcaacgaagacatataatatacacattttatatataag

SEQ ID NO: 2541 - DNA, 2449 bp, Zea Mays
ccccgcgccactgcgccaaatcgccgccccggatcgaggaggggaggagccggcggaggctcctgtggtggctgtgggggcgagagcgggagcgccatgaggggcggtggccgtggcggcggcgggaggtagccttcgtatgcggcgtcggatggggcggatgcggcggcgatcccggtcgcctcaaggaagatggtgcagagcctcaaggggatcctggccgaccgctcggagggagagatctacgccacgctctgcgactgcggaatggaccccgacatagccgtcgagaggctcatctcccagacccctgcacaactaaggtggagccttacaaagcaagagtggttgcttgcaaccggcctcacagagttttgaagctttgaaccccagagccgttgctgttgtgatagaccccatccagaagaggacgatcgattttcgattttgtaggagagctgttaaacctctccggctccgccactttcgtttccgtttctgcgctttgtttggtgccgaattttctgcacgttttaccaattctgaacgaaaattccctttctgttttgccgactgtagggctgttgaatccgtatgggctatggtcgccgaggcactcgcagtcggacgtgtcttcatcggagatggagtttggtacagcgcgccagtacgacaccaccgaccttgatgaagcacttcaaagagagagccgcccacctgccccacaccatgtcgtcaccgagttgtgagtggggcatccgtcgcctctaatccaaataaggaggagctgcggccagacatgggcggcagagtagtatctggatccgctgaacacccaccggtggtatctagctttcctatcaatcagtggctttcaaaggtactctgtgttatctcgtctactcatgaacttcctgggactgaaatagtgggtcgtattgatgcctttattgctgtgatggcacatacacatgtaattgcaaatggccctatcagctgatgttcttgctgctgccaacacaacaacagaagttgcaatgaggcttgtgagacctgagacgaaggaagcggatggaaagaagattcagatccagctgacagggttcatggaaaagaacacagtgaagttcatgaaggagctctggagccttctcctcagtgcgcagcagaatgccagtggggtgcctcaacagtttctggatgaaaaggaggctgagatacatcagaaaaaggcataggatgacaggagtgcgcaggagatccaaaagaagccagaaaaggagggaatggactcagaactggaaaagaacaaaacgatgtacaaatttcaatatcgaggaagaaaaggacaatgatttcaagcgcacctcaagaccaaaaaataggttgtaaggatgccacaaaaatgatgcttgatgttaaggagatattcacatgccaaattcaggttgtaaggatgccacaaaaatgaagacctttgttgtagtgacataaggagtttcgaaactgcaaggaattttaaatttgaatatttttcagtgagatgttaagaaacaaaaaaaaagaggcactgatcgttaagacgacaatacatgatatcatgaaccaaatgattcgggaacttccaaaaaccaatccagtatacctcatgctacgcacatcatttggtttctcagctaaaggaaccgggcttaaagctcttgaatttgccctctccatctgtgacagttttgatatgtatggcttcaccgtagacccaggttacaaggaatgttctgtgcttacagctgaagttatctttcaggacaaggtacttctcagagaaaatcatgtgcagctggtgaaaatccattcaccgatgcaaggagatcctggcaggacagtgaggtggctgcctaccaaggctaccatcgaggctgctagagttgcttccgagaagttgttgaagagacctggtgctggaagtgatgatcctctggggacttgcaccatgataaagaagcgcaggaaagggaaggcgccaaacagatctggtctacgagatgctgccatgaagcacctcgaggacatgaaaggtgccaccaggtatcccttggagcgaaatgcagggggtggttacctctgcatgatcaatgatagatacgaccgcggctgattatggcatcagtgccccctccgcccctcccctccacttgagtcgaagaaaggaatgcttgtgataaacttgcagtttgagggaacgaaaaggtcgattctttgatttatgcagctggtgtacaacgtttgagtgtagtgaaagttaggtgtaatgttttgagtgtagagaaagctatatgttgtggatggatacgaatggtcaaattgtagcacttttggtgcttataatactaataggtgagcgcccgtacgttgcaacgaagacatataatatacacattttatatataag

SEQ ID NO: 2542 - DNA, 2257 bp, Zea Mays
atagctggtaagcgtagtggaggaagagagggaagaaaacgaagcgaagccaaagcaaggtctgagccgccggagagggaggtggccgggtgggaaacctctctcgcgcgtcaggcgtcacgtgagaactcccgatccaccgggacgacggattcccgccgctcccccgcgcgcggcttcttccggtgcggtcggcggccgacggcggaagctactggcccaagcaaagtgagtgaattgcgagtccaggcggcgatggcggggcgctgcgattgacgtgcgacgactatgggcatccaagggaacaaggcggcgacgcacgagcacgacttcctctcgttgtacgccgccgccgccgcggccgccgccgccaaggacgctcctctcctgctccacgactccaagacgccgcctccttctcaaggtaattttctcttgaagacgcacgacttcctgcagccgttcgatcagaagccaggagcgccgccggagccgtcgccgctgcccgctccagccgcggagatcaggcaccggcagcaggtggcggtcgccaagcagcgcgcgctgccccttcccctgcccggcggcgtcggcaccttcagcatcagccccgcgcccgtgtcggtcgcgctgccgtcggccgtcgtcaagtcggagccgccgccgttcgtgctctggggccaacctgcagcgacgctgcagccgggcgcgcgagggcaccagcagcagtgggcgctccccttcgccggctccttgcaggtcagtccgccgccgcagcaggcgcaaccggataggaagggccgcggcggaggcggggtcatggattcaggctccagatccagcggcggagccgggttcgacgacgaagacggcctcaccacgcgccgcgaggtctcctcctcgctccaagcagatttggcagtaagggtggattggaagggtgggagctgcagcgatggcggtacaaatcaggggccaaacacaccacggtcaaaacactcggccacagagcagcgcagacgcagcaagatcaatgataggtttcagatacttagggagctgttgccacacaatgatcaaaagagagacaaagcaacatttctcttggaggttattgaatatatacgttttttgcaagagaaagcgcaaaaatacgaggcaacattcccagaatggaaccaagaaaatccaacgatgcttccgtggtcaaatatgtattttcgatcattctggaaaaatgcacagagtaaaggccaaatcccaggagattccccgcctgacccttcacatttcgtgagaaatggatcctcccctggatctaatttcactgggaaactcgatgataatcacacatctgcagctgcatcaggggcactggaccaggcagaaactaatcacgtggctagcggctgctacagatcatcagaaactccggcgaatattacaaataatgctatatctcagtcccaacctcaatggacaggtccgtcccctgtggatgactctgcagtgaaaagtgaaatgcttaacagccaggagttggcaatagatgaaggaatgatcagtgtgtccagtacctattcccaagagttacttatctcgttgtctcacgcccttcagagctcaggtgtggatctgtcccaaaccagcatctctgtgcagatcaacctgggaaagcgtgctggcaagagatctgcatctgctggtggtgtatcctccaactccaagccgatccagcatctagtaacgaactaggcggccatcacgtgacaacgttgggagctagcgctgacggtctcctcccccacgcgacgaaacggcataaacgggacaacagctgatgatgggcctctctcactccgcctcgttcccagacgacagacggattgatcattcttttttttttctcccagcccgacgggaggctctctcttggattggttgcacatcgcgtgctcggtgatgggctgagaccccggctgtattctttttgatttgatcgctcccgccgccatcccctgtctagcccattgtttttacgtagaggaacgaaccgtggagcttcccattgcggattgtgaagccgctcttcttgtacacaggcttccattcatctgagaagcttcttcccctccttgaacaggtctctccgcgttttagacctgtatactagcaacctgtaagatatgattatgatgtccagcagctctcccaggcacggcaccggccagtcaagttgttccgttatttctatgta

SEQ ID NO: 2543 - DNA, 1747 bp, Zea Mays
ttatgaaggacgtgagtgcatgacgggtttgacacaacccaaacgtggccctttctcaacccggcgccgcaagggaaaaccctcgcgccgcttcgctcgtttcaattccaaaaaaaaaggaaaaccctttgcagtcggggaactctcgcattccactattccagtcatcgagagcgcggctgcggcggcgagggaaacatcctttctcgcatcatggccacctctacggagccggagggcgcgccgcccgcggctaaggggcctaaaggagaggccaacacgaaggggagcaacgaacatagagaggtcggcgcaggcagcggcggcggctcgcagaagcggaagaggaaggaggtcttcatctacggcaactacaggaactactatggctaccggattgatcgcaatgttggtgaagatcctcgccttgaggcgttcaagaaacagtggtttgaaaagaaggattgtctcgatattggatgcaaccagggtttggtaacgattggcttagccatgaaatttaaatgtcaaagcattcttggcgttgatattgattcaggtttaattgagactgctaagtggaatctgcgaaggataatgcggcaggataaggtggctacaaacaacgtcaaagctcagaaatcatcggattctcctcagagctctccagaagaattggcatctgagttatcgaatgggaacaagcaccaagatctttttaaaattgtctcttttcgacgtgaaaattttgtagcgagtatggatggatgttcagaacagtatgacaccatactatgtttgagtgtgacaaaatggatccacctgaactggggcgacgatggcctagttacgttatttgtgaagatctggaggcttctaagaccgggaggtgtttttatcatggagcctcaaccatggagttcatacaagagaaacagattagtttcagaggctagaggcaactcttgaaaagccttcgttattatctgatgcactcctgatcctaaggtcgccagaaataacttcaacaccatctgtatatacccagggacatttcgcgagattcttctagacaaggttggatttaggtcggtggagttgcttgccgaaagattagtgggcaccgtcagtggtttcgatcgtccaatagaagtttaccacaagtgatgaaactggattaaggattgtggcatgcctgcccaattgcacactcacctgaccaaattattgtgttgagctttgaaatgctcactgcctgactaggtacaagtacaacaatgaagcaagtatggtgctggacttgcgtttgtaaaacagaatatcagatggcgaaggatcaagatggaagaagaggtggtaggatgttgtgttctctagatggaagtgctgggaattttgttaatgggtctgtttttgtataaaatggataatggataccgtaccctgaaagggaaagagtccttcatgagtatcattttgcctgctatggatatcatgatttctcttgcttattgtttgccactccccattttcaaaactgtaagtcattttggcttttgtagatacataattttccatgttgatgccttgtgcttatttatgtgcgcagtgaaaatgccttctttatgctggtttcatttttttatacgaaagctcagtatcaaaggtgctgaatgttgttgctgcaccttagtacagctgaagagagtacccagttcactagaagctgaccccattccgaaaggca

SEQ ID NO: 2544 - DNA, 1846 bp, Zea Mays
cttgccttagtttacaaacaaaagacagtcccgccaagcattgtcgaatcgaagccacgagcacaaaatatacacgcatcatctgatcatctccctcagaatcagagccgattcgtcagcacgaggttcatcagcggaaaaataatcatcatctccgcaattctgcttaaagtcgactgactgaagattgcagaggatgcgagtagagtagtgcaccatttttattttgtcatcttcagacttcagtaacataacagaagcgtcagaggactgaggtctgagcctctgaggagggggagggagagggacagagctacagaggatgctacgcctgcggttccggccagctcccctgtcactgaagctggccttcaccgtctccctcgccgtctccttctccgtctcctgctgcgcctcctcctcatactcgtcccgcacatcatccagatcgccgcaggccgtagccgcggacctcctctccgtgctcgccggccctcgcgccgcggcgcgggtaccggcggcggaggcctcgcggctccgcgcctgcctccggttcctcgccccggccaaccccacggcccaaaaggtctcgtcttggagccgcggaggcccccggaagttcctcctcgatggttgcgatgcgggggcggctgaggcggacgagatggtgatgtggccgccggccccggtcttggacctggcgcggctggccgttgactccggaggcgatcccggtgccatccaccgcgcgctcgacccaacaatgctgccggtgccagatgttgagggttcccagaagaataaatgccatctcacaagaacaccgtatgggaggcgctttgccaatgaggagatcaattcatattttgcattcttgttcgaattgattgtggcacgggcaccttcggttggattaaatgtatcactgaatcgctatgatttgttccatgggcatcttttccttgcatcggagacaggacggcttggaattctgaggagttgcgtgtcatttcattaagaggaagaaccgagtacagctagaggaaagtatcctcaaataccatacaacactctgaaaatagaataaagtaaaaaataacaacagaacaacccagatacaagactagcataggaatagatgtgtctttgatggatgtaatcctagcttgatcacagcccttatggtggctagggaagaggcggtcctctagtccatgactggagccaaggccctgtctttcctccaggttccatgctaaagaatacccagcatttaacaaggaattgtttccttataatttgggatattgccaggcaggatctaatgtaccatatgatgattcgatgaatttgcgcaatgtactttggttagcacctttgccatcaaaggagacaaaagcttggttagcaccaggagtactagttgtcttggacgcacatcctgatggaattatctatcaagagatgatacgtgactatgttcagattgttagaacagtatacgaagatgatcttggggagaacacagttgatgtcaattatctgaatgtggcaaatgcagctcccgtagatagaatttacatttgttgaagtcatatgtaccgctatttgttttcccatggtgtgatttgatttgatttctgagaaccggacgtcaatgcatcatcctcatgtccaccaaagcaattgttcccgttcccatgaccgctgctgtgtatttcacatgtttatttgtttaattaaaaatgctcaacgaagcaacgatttgttgttaagttttacagtgtgctgttttgtacattccgtacacttttatctttgattgtgttgagtttgagtgtacagg

SEQ ID NO: 2545 - DNA, 4275 bp, Zea Mays
tgtccgtcctccgtcgtctccgccggctcttcttcactcctcttttccgctggagtccccgatctcccccgcatttcccactcccacttctagcctcccccacgcccccatcctcagttcctcaccaccacttgccccgccaattcccaaatctcccaggggcttctccgcttaccacccccgcccgctcgcgatcccatcgcctcgacccgacccgagacttgctcgtcgcggagcgccaccaccacgcctcgccgccggcggcgagtggacaagcctagggcttatctacgggtgatggcggccgcgccggccgccgcaagctcgaccgtctcctagggcggcggttacccgaggctgagctcgtgcgcgcgcgtggggggatccttgtgctcagctcgcgaaaccctaggggcagcaggaggcgaagcttgcagggcggcgatggacgtggactcccgcatggcgacagagtccgactccgactccgacgctcgcggcggcgggtcggggtccgggagcgagacccccacggcgtccgcgtccgcgtccgcgtccccgtccacgtccgcgcccgcgcccgggacgcccacggccgcggccgcgtccccggggctggtggcggggcccaggccggcgccggggtacacggtggtggacgccgcgatggacaagaaggaggacgggccgggatgccggtgcgggcacacgctaacggcagtgccggcagtcggggaggagggctcgccggggtacgtgggcccgcgcctgatactctttggtggtgccaccgcgctcgagggcaactctgccacgccgccctcgccggctgggagcgccgggatccgccttgctggtgccaccgcagatgtccattgttatgatgtgttatcaaataagtggaccaggcttactccacttggtgaacctccttcaccaagagctgcacatgtagccactgctgttggtaccatggtggtcattcagggtggaattggccctgccggcttatctgctgaggaccttcatgttctggatcttacacaacaacgaccgcgatggcatagagtggtggttcaaggtcctggtcctggtccacggtatggacatgtgatggccttggttgggcagcgattcttattgacaattggtggcaatgatggaaaacggcccctggcagatgtatgggcccttgatactgcggctaagccatatgaatggagaaaacttgagccggaaggtgaaggaccaccaccatgcatgtatgcaactgctagtgcccgttctgatggtctccttttgctttgtggtggaagggatgccaatagtgtgcccctatcgagtgcatatgggcttgctaagcatagagatggtcgctgggagtgggcaatggcccctggtgtgtctccatcacccagatatcaacatgcagctgtttttgtcaatgcacggcttcatgtctcaggaggggctcttgggggtggtcgcatggtagaagattcctcaagcgttgcagtattggacactgctgctggagtttggtgtgataccaaatcagtagttacaactccaaggacaggaagatatagtgcagatgcagcaggtggtgatgcttctgtagagctcacacggcggtgcaggcatgcagcagccgctgttggtgatttgatatttgtttatggaggtttaaggggagcaattgcttcacaggtgtgctgctagatgacctcctagttgctgaagatcttgctgctgctgaaacaaccagtgcagctaatcatgcagcagcagcagctgcatccacaaatggacaaagagaacctggtagatatgcctacaacgatgaacaatcaggacaaactgttacagtttcaagtcctgatggagctgttgttcttgggactcctgttgctcctccggtcaatggggacatgtatactgatattagtcctgagaatgccattatccagggacagagaaaaatgagcaaaggtgttgattatttggttgaagcatcagctgcagaggctgaggcaatcagtgctactttagctgctgtaaaggctaggcaagttaatggtgagatggagcattcacctgatagggaacagtctccagatgctgcaccaagtaccaagcaaaattcaagcctcataaaaccagatgttgctcttgtcaacaattcaacagcacctcctggtgttcggttgcaccatagagcagttgtggtggctgcagaaactggaggtgccttaggtggcatggttaggcagttgtccattgatcagtttgagaatgaaggtagaagggtcatttatggaacccctgagaatgcaactgcggcaaggaaattattagatcgacaaatgtctattaatagtgtgcccaaaaaggtaattgcttctcttctgaaacctcgtggctggaagccccctgttcgaaggcagttctttcttgactgcaatgagattgcagatctatgtgatagtgctgaaagaatattttcaagtgaacctagtgtcttacagctgaaagctcccattaagatatttggtgatctgcatggtcaatttggtgacctcatgcgcttatttgatgaatatggcgctccttcaacagctggagacattgcttacattgattatcttttcttgggagattatgtcgatcgtggtcagcatagtctggagacaatcagtcttctccttgcactgaaggttgaatatcctcacaatgtacatttaattcgagggaatcatgaagcagcggatatcaatgctctttttgggttccgaatagagtgcatagagagaatgggtgagcgggatggaatctggacctggcaccgtgtgaacaggttatttaattggcttcctttggctgcactaatagaaaagaagataatttgtatgcatggtggtattggtcggtccatcaaccatatagagcaaattgaaaatcttcaaagaccaattaccatggaagcaggctcagttgttctgatggatcttctgtggtctgatccaactgagaatgatagcgtagagggactcaggccgaatgcacggggccctggtcttgttacctttgggcctgatagagttatggagttctgcaacaacaatgacctgcagttgattgtgcgagcacatgagtgtgtgatggatggctttgagcgattcgcccaaggtcacttgatcactcttttctcggcaacgaattactgtggaacggcaaacaacgcaggtgcaattttagttctcggaagggatctggtggttgttccgaaactcatccatcctttgccgcctgctatcacgtcacctgagacctctccggagcatcatattgaggacacatggatgcaggagttgaatgcaaacagaccaccaacaccaaccaggggccgccctcaagcccccaacaatgaccgaggctcccttgcctggatataacaggctggccatattattaaacaattgatttcttgtctcctatcattggcttgaggctaaaattatccatccattctggacacatggaagcactctgctgaaagcacacactggcccaaaacaatgtcgaaagaaaactgttcagggagcgagactaagcggtgctctgaaggcgaaggccagagaagagtcactgtcgacagcgctccccaaatcctttccacaaacaagtagaagagcagaaccaagtgttggtaaaccacaggatcttgcctgggatcgcgcctgtacatactcagacgccagcagatagaggaggggttgtgtatgtgttctttttgtcttagcgtcgaaagggatagcagcgtccattgtactaggtattcatttgctgtagattttgatttgttgcctcatgttgcaaagtatggagtgggaaagttggtttcctcgtgtgacggacggtggtctgtcaggtcttgtataatagcgttgtcggctgtttatgtttgcagcgcgtcagctgttacttagcacaccttacacctccctcatgttgtaattcccatcaccggtgctgatgaatgtgcacaatatattgttgtctgttgtccaaagttttgggtcctggacgggttaggtgatttgatttggtttattggagaagcaatacgttgtttgattttgagctgtatgctgtgcacctttgggatttattttattttgcaaatttgtgtactagcttacagttcagtggtcttgctttcagcaccgtgcaagcctactaccaaactcaggcaaacaacaccgcatagtcatg

SEQ ID NO: 2546 - DNA, 3229 bp, Zea Mays
cccagctcacctattatttctgcaaaaaagcataattttgacatttctaaataaattaccgtatttttttcgtctcatcccctctccatttctttcttggtttcctcctctatctctcgtctccctccgaccgaattaaaacgctcgacctgccaagccggactgaaccctaggccccgatccggcgtctcgccgtgctgcttggatttgatcgggcggggttggggtcgtatcggcggcgggatgaccatcccgagcgcggaggggttcctccaggcgtcgagctgcctcccgtgcacggcgacggaggagcgggaggtcgttgacgcgcttaccaaggaggccgagaagaatgtcaagcacggcgatctccgctatctcgtctcgcagagctggtggatggagtggcaaggatatgtgggtctagtcaattatggagaaagtggcaccgagcagtttcctcaggccacaaatagacctggagagattgataactcgaagcttgttttggcagaaaggatcaatggtagtgaggagccagagcttcaaaggaccttgagagaaggggagcactatactttggtgccgcaagaagtttggcaaaggctatatgaatggtataaaggtggaccagaaatccctagaaaagttatttttgacaatccaactgacaagacttacgtagtggatgtctaccctctctgtctaaaactaattgatgcaagggacgactctgagaaagtttttaggataagtagaaaggccaaagttcatgagctttactcaatggtttgctcgctcatgtcagtagagcagtctgagattgtcatctgggattattatcggaggacaaagggcaaggagttgactaatcaaaatgatacactagaagaagctcaacttagtatggaccaggagatcctcttggagatgaagctaggcgggggcagttcaggtttcagtgcaagatccacaaatgatgaattggcattaattccattagaaccctcaacatcatcattttctattgctggagggcctacattttcaaatggtttttcatctgggattggttctagtttttcgcaagataatagctttagtcctttattaagggatggagaagatggttacaatagtctcagcaatggaactaaagatgacactcacggattgagtggattacataacttgggtaatacatgcttcatgaatagtgccatacaatccttggttcatacacctccattggtacagtactttttggaggactatacttgtgaaataaacaaggaaaatccactaggcctccagggggaacttgcaatagcatttggagagctacttagaaaactttggtcgtctggtcgaacttctattgctccacgggcatttaaatcgaaactttctcgatttgccccccagttcagtggatataatcagcatgattctcaggagctacttgcgtttctgttggatggtctgcatgaagatctgaaccgtgtaaaagagaaaccatatattgaggcaaaagatgcagatggccgcccagatgatgaatttgctgaagaatgctggaattaccataaagctcgaaatgactccataattgttgataagtttcaaggtcaatacaagtccacattggtgtgcccagtttgtaacaaaatctctgttacctttgatccatttatgtatttgtcgctaccattgccatcaacagtttactcggatgattactgtaactgtattcagtggtacgggagatgttcttccaatgccttacactgtgactgtacagaaaaatggaaactgccgtgatcttactaaagcccttgctgatgtctgctgcttaaaaaattctgagacattgttgcttgcagaggtatacgaacgtcggatctaccgctacctaacaaatccaattgagggacttcatatcataaaagatgaagatatacttgttgcatacaggctccctgttggtcatgaaaaacttttgaggttggagattctgcattcgagggcagacagggttttgatggattggggtgagaaagagcatgggatgtacaatattgatcacatggatgtacttcctgaagtcttcaagcctggttttatgtcaaagaagacccgtcaagaagcagtcaatttattttcatgcttggatgcttttctgaaggaggagcctctagggccagatgatatgtggtactgtcctgggtgcaaggaacacaggcaagctagcaagaaactggacttgtggaggttgcctgagatattggtagttcatttgaaaaggttctcgtacagccggtatatgaagaataagcttgatacatttgtgaactttccgatccatgacctcaatatgagcaagtatgtgaagcctacatcaagaggtgaccagcaccccgtgtatgaactctatgcagtgataaatcattatggcggtctcggtggtggacactactctgcatatgcgaagctagttgaagaggacaattggtatcattttgatgacagtcatgtttcctctgttaatgaggatgagatcaggcgatctgcagcatatgttcttttctaccgacgagttggaggttcaagtacagcggcaaacggtggtccagttgacattgaaatggttgattcgctagagacatagttccccagatcaaagcctgagtataacatgtggatcgagatatggagatcagaagagttatggaatttgcatgtctgctccggaatggaatatttgtgtatgaagcctttgacattttgaggcatggcagacaactgaggtcgaaatagcgtggtagcttggatctgcacatctatatgattgagggcctggtgtttaggattataatctgcccagattatataacctatcttattttgaactaagtgttagttcaaaataagttagattatataatatggacaaattatattcccaatcaaacaggctatgattggacttactgatacccatttgagtagaactgatcttgacaggtatccgagaaaacgatgaccttaattgaaaattttgctgatacgctgatgcagcacttagggtctactattgttattggtgtagccaagggattgcaactgggaaaaatggtgtaaaaacgctgcatatttttttttgcctaagctacagctgtgctacagcaaattttgattacggttgtttttttaaaatgcccaatcatca

SEQ ID NO: 2547 - DNA, 1484 bp, Zea Mays
cctcactaacaaagacaagcgctccatctagattaggagaaataccataaaaacacatcaattgcaatgtttccagatctgcctggtcctaagagaacaagggaagtaagctctttttgggcaggaccatttaactgtataatttatccttgccaaatagtcatccaaggaagtatatccaagctgtggctatagatcctgaaggccaaccagaattgctttgcaaagacacatgtgattcagtaaacgctcaattgtttcttcgccttcatcacaaaggtgacatttaacaggctaggatacttcagcagtcagcacctacatttcaagaaatgtacccacacgagcaaagttcaggcatggaaacatgggttccacaacaacaaccagcagtgctacaagggacagaagaggaaccaacatcttatgaatcagatgctactgctggtcaggagccagagaccctaactgctgctgactacctgcgtgaactggaccaactccgagaaaaatccagcgatgttgacaaaatgagctttcaggatgaacatgcatcctgtcttgccacgtgcagcacaggagacattgaagatgatccatacccagcctcctactctgacgatatggaaggcataggtgaagattctggtgccttcacttcttgtgttggcactaggtggttcagggctcctgagcttttatatgggtcaacaaactatgggctagagattgatctctggtcgcttggatgcattttggcagaactgatgaaattggaggctttgttcccagggatatctgatattgatcagattagtagaatcatcaatgtcctgggcgatataacagaagaaacctttccaggctgttcaaacttgccagattacaacaagatttcctttaacaaagttgagaaaccgacaggccttgaagcatgtctgcctaacagatctcctactgaggttagcatcataaagcagctaatttgctatgacacagcaaagaggaccagtgctgttgatctgctgaatgatcggtactttaccgaagagcccttgccggcacctatagaaggattacatgtcccggcatcaaaggacgaggatgatgacagctcaactgaagaatggggtaattacagggatggtgtctctcgggttgactttgatgagtttggtagtatggatgccaccaaaactgagaagggtttcagcatacagttttcgtgacgaagaaagacgtagacgtacggaccatgcgtgccatgtccaaactaagaccatatcatggtatttatctacatgggagttgaattgctgtcaacatagacgaacatcagtaagcgatcaaaggttgtgcaatgttgctttgggtttaacatttttttagtttctatggaactttgtgattctttgtacggcagaaccagttttttccctggcaagaataaaactgtgtgtggtagtctgaagttcctatcgaga

SEQ ID NO: 2548 - DNA, 1542 bp, Zea Mays
atctgttgtcatccctgttctttgcccactttcaccttgctttccccatttcacacgctttccttccgcccattgacgagttgacgaccaacagacccaggcctccgaccagatcgaggtgagcgaacgtgccccgcctgcgctggtgacggtgagggtgaggccgcacgccatccgccatcctcactgatggttccgtcccgccgccatcggagagtgtagaagtggaagcaagcagataaaccccagtttaagatcaacggctactcggctaccaaatccatggcgaggacggactcgctcccgtccaagcggctggccgtgggagggtacgagtgggaggtccactacaccccaagcctcctcgtcgacggcagctacatgatagcgttcaggctcgtcctcctcggcgcgccgcgtcggaacgacgtgaaggcggcgttcagatgtcggctgctgtatccttccaccaactacggtcatcaacgcggtgcgtgcgtcagcgattcaatggggaacgtggaaggtcagatgtctcatgcgttcaagcgggcgaaggagagctcgggatggattccgctccgcaaaaggaatgttgtggaggcggcccgggtcatcgagaacgactctctcactgccgaatgtaccatcacggtggtcaccgagctacctgaacctgatacagcaaagactaacgccgtcttgccccgaattcggcgattgacgggcgtgcattccttgcaccatgatctcggtgagctcttgggcaagggaaccggatccgatgtcgtgctggtggtttgcggtgagtccttcgcagcgcacaaggccatacttgcatcgaggtccccggttttcatggcccagttctttggccccatgaaggagacgcactcgcagtcgcagagggtggagatcatggacatggaggcggccgtattcggggccatgcttcgcttcatgtacaccgacgtggtgcccgagcttgagcggcaggagaacggcgacgtcatcgcgcagcatctgcttgcagctgcggacagatatggactcgacaagctcaaatcgatgtgcgaggacaagctctgcggtggcaccacagtggagacagcagcgacgactctggcgctggcagagcagcacggttgcccaaagctcaaggcttggtgtgttgagttcatcgctgcaaaccttgatgccgtcatggtgaccgagggttacaagcatctgatgacaagctccccgttggttctgaatgaccttctgagagctgtgcgtggaacgaagaactgaagaacattggtagttgtattgtatctgctctctatgaattcggtgtttaagtttatattccttcccattgaggaagggtggattgctggaaggctgtcatttgagaacttggcttcatttctagtcgttgtcccagctcatgggtttatgggtattttctaggagaaaagaggtaagacttaactatcctaatgctacagaaaagatagttaatgaccattcgcacgtagtaaaaaacttttacagaaa

SEQ ID NO: 2549 - DNA, 2045 bp, Zea Mays
ggattgggacgcttcacaggcccacgcatcgaaccccgtgagtgttcgccgacgtggcccggcgtcagcgtcgcgtcgatctctctgccgaggacctcgctctccaccaagaggcggtcagcgctgcccgacggcaccgtcgcctctagggcatcgaacaccgtcgagtagtagcccatcgccgcggtcacccgctatggcaggtcatcggagcagtcgtcgctgccggtgctgttggcttccttctcaacgatggtcaccacggcggggttcatggatttaacccacttcaggaatgtaccttgacttcgtccgggagaagcagaaactggcactacaagctgtgcgttggccgttggctcgtcctccccgcctccccggcgacgtcgcgggggcagcaaccgtactaccacggcgcatatgcggagtccgggtccgaccgcttccactatgcgtaccagcgcgctggtagctccacagcatcggcgctgaggctgcgcatgaggggcgcgatgtccaaccgtaacatcacgctgtcagtcagcgcgcacaccaacctccttgccggcaacgaggaagggaacggtgaagtggaaatagtggctggcagcagtgaggaggatgaggcaaaggagtggagacggcgtacatcctccttgtcgggtgccatgcgagggtgaaatgggatctgcaagcctacatgggccctgattgttctttccttcttcttttttcaagtctcgtgaatccttctaagctcctgaccagcattgacgaacagatagcggaaagccagggaggagccgtccaggagagaaatcatggagaagataaacaagtggctgctggcttgcgaggaagagaaatggctggatgagtacaatatgataaagaccaggcaaactatattgaatgggagaggataaagccaatcaacatatgagaggtcgccgtcgcaggctgcgcagcaggtgtcgccccagcagcaatataggcggtggtggctgtgcgggcccaggcactggcccaggtgacgcgggcaagccaaagaggtcgggctgcaggctgtagctgccgccgagctgctcctggcgcttctggttccagtcgccaactcatcagatgtactatatagatatagaccgtgaactttgtattgatgattttctttgtggtgatgattacaaaataaatatttctgaactaatgaagatcagttcaataacctgcatgggattagccaattggaacatcaaaagtctgatgccctcgccttgtaccgtcttgagtacaagtcctctagctccaaaagaagcgtcaggtcaaaactgtccagtagtccactgaatgaaatccagcagcaaatgggcaggctgactgcagacagtcctgtggagaacaaacggactgctaggagcaagccaaaggctaaccagaaggataccaatgcaaatattcatccccatgttaacgcccccaatcaagttaatgctccaaatgcttatcaagcaacaccgcaggtgaaccaaatgacacttatgaatgggaacgttgtttatggacctcatctcccacattctgaagacgtcatctatggacctcatcttccacatggatactcagctgaaggaagcagcttcttttggaacacaagtgactatcaatatacataaaagttgctaacaaaaactatcacatttttctcaaagatcagttcaaattaaagtgctcttattctgtgtttaagcgacttatttctgtatattgcggaatgtctgaagcttatgttcactgtttgatctgctgctgctgaataatgttgccagcctagggttcatgtcacttttcatctgcatttttactacaagcatcctagaaatgagatggagtggtgttggaattgatgacacatgtgtgcgatttgaaaaacacctgttttgtgttgtgcttccttgcattctctacaacaatgtaatagattactatgccttttctgtaatactttttatctgaatttttttataatatttatatcttacaacaaa

SEQ ID NO: 2550 - DNA, 1044 bp, Zea Mays
agaagagatgcttcctcttccccgagacctattcgacattaggtattcagttcggttcttgggagagccagtctgctgctgcttgcggtgactggcaccagcgcgcaaggcttcctagagaccatctacctgcgccgttccgatgggttgcttcgggtgcttcgcgccggaggcggacgaggaccttaggccctccaagcacgacgattcgtcaggggctgatgcgaggaggaaggtcgcgccggatgtggccagcggctacgcgcacagcttcaccttcaaggatctgcttgtggcaactggctacttcaacgaggccaatttcataggagaaggtggattcgggaaggtgtacaagggcaagatcaacggacagcagctcgctcgagacgctcgagacggagttcttggtcgaggtgctcatgctgacggtgctcaaccatcgcaaccttgtcagcttggtcgggttctacgcgtggacgagaggctgttgcctgctggtctatgagtacatgccgttcggaagcctggagagccatctgtttgacaatcctaaggtctaaggatacagccgggtggcgttatggattcacggccttatttctttctgtgagatctttagaattctttcagggaatggaatgcatatggagcttttcttccatgttaaatggcagtgactctgtcatatctttctaccatccactatttgtggacccatctatacactaaacacacttaaatgttttctagaccgcggagcacgcacaatttactagttaagatatagtttagtttcacaacaatggccgatatagcagaagccaagtgttatgatgatttgttttttcaattctatgttgtgttattggttcagcatgcacatatattgacatgatttatggcatggcatctgccatctttgttatatttatgacatcgttcttgattgatgtgtgcgacatgaatgatggatctttttaacatcttgaccatcattgtgtaactcattattgtcttttgtatatcatttatgagttcacg

SEQ ID NO: 2551 - DNA, 1132 bp, Zea Mays
ctataccctaaccccgtcgcggttaattttctgtggccgactcgccgtcaactcaccgccatcaaaaccggcatgcagccattagaagagatgcttcctcttccccgagacctattcgacattaggtattcagttcggttcttgggagagccagtctgctgctgcttgcggtgactggcaccagcgcgcaaggcttcctagagaccatctacctgcgccgttccgatgggttgcttcgggtgcttcgcgccggaggcggacgaggaccttaggccctccaagcacgacgattcgtcaggggctgatgcgaggaggaaggtcgcgccggatgtggccagcggctacgcgcacagcttcaccttcaaggatctgcttgtggcaactggctacttcaacgaggccaatttcataggagaaggtggattcgggaaggtgtacaagggcaagatcaacggacagtgaagcagctcgctcgagacgctcgagacggagttcttggtcgaggtgctcatgctgacggtgctcaaccatcgcaaccttgtcagcttggtcgggttctacgcgtggacgagaggctgttgcctgctggtctatgagtacatgccgttcggaagcctggagagccatctgtttgacaatcctaaggtctaaggatacagccgggtggcgttatggattcacggccttatttctttctgtgagatctttagaattctttcagggaatggaatgcatatggagcttttcttccatgttaaatggcagtgactctgtcatatctttctaccatccactatttgtggacccatctatacactaaacacacttaaatgttttctagaccgcggagcacgcacaatttactagttaagatatagtttagtttcacaacaatggccgatatagcagaagccaagtgttatgatgatttgttttttcaattctatgttgtgttattggttcagcatgcacatatattgacatgatttatggcatggcatctgccatctttgttatatttatgacatcgttcttgattgatgtgtgcgacatgaatgatggatctttttaacatcttgaccatcattgtgtaactcattattgtcttttgtatatcatttatgagttcacg

SEQ ID NO: 2552 - DNA, 1000 bp, Zea Mays
ctcatgctggcgggaaagccaatggcatcaggtggtgtcacagaccaggtaacgtcaccaggtggtaacactgtgcacacattgaagggaaaatctggtgacaaatttgagtttaaagctccgaagggtggcatgtacaagttctgcttccataacccatatggagcacctgaaactgtttctttctacattcatgttgggcacatacccaatgagcacaatctggcgaaagatgagcacttggaccctatcaacgttaaaatcgcggagctgaaggaagtattagaatccgtcaccgccgagcagaagtacctaaaagcacgcgaagctcgtcatagacacactaatgagagcaccagaaagcgtgtcatgttctacacaatggcggagtacatagctttcgtggctgctagcacgttgcaagtcctctacatccgccgcatgttcagtaagaatgtgggatacaacagagtgtaggatacagctctacttcaaaggcgacagtggaagaagcaccacatggtcggaacgggaaacattctctgccaatttgacaaattgtagctctgcaccctctttctttttgttagtttacaagaaacacttttacatttatcatgtacttttagcaacacttgcgatatgttacgtgcatttgatgctgaacatagttccagaattaattttcagagaatttgtagtattgttctgcttccgatttttttgattgttaatcatgtggtgtctttaagaatgattatgcctcgatcccattgttaggagcagaagagtgttacatctgactgtaggaccatagcgacattgggaaacactgatgaacacaataatttgtttaatggaaaccatgtatatgtacttataaatcctgatcagaattccacatcacacttgcagtgcacatttcctggcatctggcacaggagggattaagtgtttttaactgtataaagaaatggcaaattggtaagcatggtcgact

SEQ ID NO: 2553 - DNA, 1582 bp, Zea Mays
atgagtcgagagaaagccctcacctccggcgcacgccatggtggagactcaccggagctccaccgccgccgccgggaagcgcacgtctccatcgccatcctcttcgtccgtacctcccccgaagcgccccaaggcggagtccttggggtcaccgacggcgtccgcgcccggcagggccgaggaggattctgtggcgggagcggcacccgcgaggagcgccggctcggtcgatgacgcggcagcggtcgcacaaaaaggtggggcgacttttgggcattttgggggtcctatggtcaaggagtcgataagccgtcttccgctgctgcagagagttcaaagcggaggaaggagtaggagcaacagcaacccgcagtgccatgggcgaagctgctctcggagtgctcacaggttcgtggacgaggtcggcgccgccaccgagctgacacaagcgacaagcatcagccgccgagagagggaactgcttctggaagataatccttctggtcttaccactatactgaaggggccattgaaagctgattattgcttctctcataatcatctgcacttgatggttactttgagccgaacatcacctgatgcccagatatacgggacagaagctggcctaataatgctactctctcatgtatgtgaaaatctgatacggaatttgaagacaggaaaagttgatcaaactcttagcttgagtggggggaaaacaacctgcattgcttgccagccaacgcttccaattctggttaccgcgttagatgacaggattgtatgtttttgggatgccagtatctataggcttgaggaaaaagtaaaaattatgggtagctatgctctcgaattggttttcatcgccgatattaatggcagcgcaagtagccgtgtgcctttgctctctgtagtaactagacgatgccatggcatattaggacttggaaaagtctataaaaccgtagttcgaccaccagttttccataaacagccacatactgctgccaaggtgctccagcaactggcgatagaagatggagtgacgttagtcttggaatttatgaaaggaaccatgtacgatatatgggatgagtttagagatcaaatagaccacgtaacaactttgatgggagggagcatgagctttagcctaccagttattcagattgagaacacttctcagttcagcccatggatctacaagcaattatttccgagaagtcgttttgaaaatcaaataaaacagcacattgataatcgtgctgcaatggctaaggagatcaaatctactgaggatgaaggctatgatgattattcttatgaagtattttttagacgaaggctttttgacttcattgtaatgtggaatgccaccagcatcaggaatgttgaaactcgtgctcttgacccttcagcagccattgaagagacatcgagtttcttggagctgattgcaataagatatcatcaggcacgccgaggagaacaggggcctcctctccgcctcctccttcgacaggcagctgctgcggaaggagttggtgaggagggtcaaggccgcggtggcgggacgtga

SEQ ID NO: 2554 - DNA, 2157 bp, Zea Mays
actcgtctccctcctcgcttgcgctctgtttcggtgtttcctgtttcggtgtttcctgtctctggtggcgacgactgggcggccgacgctgccaccgccctacgccagtggcggaaatttgatgagttagagcttattactggtctgatactcctatacgatgtcactgaaacttccaattccgcaagggctttccttcttaagaagtgttggatggtttgaggaccggaaggttgattcagcagccaaacagcagttatccccaacgttgaaactccagacagataaggagacgtacagacctggtgattcagtcactgtgactatcgaaatctgtagcccagctagtttgaaggatgatgttgggcaggcagtgtcaggcgaggatgccccctcgctgttgttagatgtgctatcatttgaacttaaagggattgagaagctggatactcaatggttctctgttcctaagcccttaccagggtctaaacaaaggcgaggtgaacatatgtttctggattgttcggcaccatcactggtctctaaagtaataattggtgcagggcgaacaaaaacgtacattgcacgtgtggagctcccaaagactttgccgccatcttataggggcatcagtatccgctatttttattatgttaggaccacattatttggaaggccagttatgttgggtaatggagaccaatataaaggtcttgtgaataatgcaattcatctggaagctagagtcccattgcagatacgtgtttcccagaaaagcagcagcctactaaatgaagaagggaatctgcctttttcggtggatcaaccgagcatattttggaagggaaaagatgaagattcagaatggagcaaagcaaatgataatgttgatctagaagaaggatatgatagttctaaagatgaagtttcatctgtttcctcatacaatccttcaaaagcacatcctgaattctccctaaggagctcgttgtcaatgcattctctgtcatcacggctctccacgagtgagctattttacaatcaagtggaacgacctaatttcccatcatacaatccaattcctcgattgtcagtgtcagagatttcagatgatcatgacggaggtttagtggcatctcaaaggaaactaaacattttgctaccagaccatacatcgaatgggcaaagggtttctccagattctgatcactcaaaagatgatgctggactcccccttacgccaaaaaatgttgatccagctggatctgaaggctttacgacaggaagatcttataatataagaattgatgaccaagttttgcttcggttttcaccaaagaattctgactcaacctattactttggtgatatgattggtggagcacttaccttctttcacggaactggaaaacggaggtgcctcgaggtatctatagccctggaaacatctgaaacaattaatcctcgcgcattacatccttcaagaaggggctcaccaacaataaccaagctacacagtgaacatcatgaggttgttgcggatcttcaccagacaagctttctgttttccattcccattgatggccctatgtctttttgtacctcaaaggtcactgtacagtggtctcttcgatttgagttcttcacaactccggaaggaacagacccagctaggtacgagcacccactccttgttgataaaagagagaagggtgaatgggtgctcccggtaactgtttacacacctccattgcgcagacgagctactcatgagaggaatggtagatctgtctcacctggaaatatcttcaactcttgaagtgcactgttgccgaagtatagttactttcagctggaaaggatttacagactattctgactggtacaattgcatcaaaaggattttctcgctgtaaattgttataggatttgcaatgcgatgtctatttttttaatagagaacaaatggagtgaaatacttgacttgcaccaaatggatttattggaccatttgtttcatcgatttgtatcccatgagagatgcatcctggccaaaatttggtgttcagtgcattcattatttagcttatagttgaccttgaccaaagtatgagagcttaccacgacgcaaccatttggttctctcgaatagtacac

SEQ ID NO: 2555 - DNA, 2170 bp, Zea Mays
aggcactcgtctccctcctcgcttgcgctctgtttcggtgtttcctgtttcggtgtttcctgtctctggtggcgacgactgggcggccgacgctgccaccgccctacgccagtggcggaaatttgatgagttagagcttattactggtctgatactcctatacgatgtcactgaaacttccaattccgcaagggctttccttcttaagaagtgttggatggtttgaggaccggaaggttgattcagcagccaaacagcagttatccccaacgttgaaactccagacagataaggagacgtacagacctggtgattcagtcactgtgactatcgaaatctgtagcccagctagtttgaaggatgatgttgggcaggcagtgtcaggcgaggatgccccctcgctgttgttagatgtgctatcatttgaacttaaagggattgagaagctggatactcaatggttctctgttcctaagcccttaccagggtctaaacaaaggcgaggtgaacatatgtttctggattgttcggcaccatcactggtctctaaagtaataattggtgcagggcgaacaaaaacgtacattgcacgtgtggagctcccaaagactttgccgccatcttataggggcatcagtatccgctatttttattatgttaggaccacattatttggaaggccagttatgttgggtaatggagaccaatataaaggtcttgtgaataatgcaattcatctggaagctagagtcccattgcagatacgtgtttcccagaaaagcagcagcctactaaatgaagaagatgttttagggaatctgcctttttcggtggatcaaccgagcatattttggaagggaaaagatgaagattcagaatggagcaaagcaaatgataatgttgatctagaagaaggatatgatagttctaaagatgaagtttcatctgtttcctcatacaatccttcaaaagcacatcctgaattctccctaaggagctcgttgtcaatgcattctctgtcatcacggctctccacgagtgagctattttacaatcaagtggaacgacctaatttcccatcatacaatccaattcctcgattgtcagtgtcagagatttcagatgatcatgacggaggtttagtggcatctcaaaggaaactaaacattttgctaccagaccatacatcgaatgggcaaagggtttctccagattctgatcactcaaaagatgatgctggactcccccttacgccaaaaaatgttgatccagctggatctgaaggctttacgacaggaagatcttataatataagaattgatgaccaagttttgcttcggttttcaccaaagaattctgactcaacctattactttggtgatatgattggtggagcacttaccttctttcacggaactggaaaacggaggtgcctcgaggtatctatagccctggaaacatctgaaacaattaatcctcgcgcattacatccttcaagaaggggctcaccaacaataaccaagctacacagtgaacatcatgaggttgttgcggatcttcaccagacaagctttctgttttccattcccattgatggccctatgtctttttgtacctcaaaggtcactgtacagtggtctcttcgatttgagttcttcacaactccggaaggaacagacccagctaggtacgagcacccactccttgttgataaaagagagaagggtgaatgggtgctcccggtaactgtttacacacctccattgcgcagacgagctactcatgagaggaatggtagatctgtctcacctggaaatatcttcaactcttgaagtgcactgttgccgaagtatagttactttcagctggaaaggatttacagactattctgactggtacaattgcatcaaaaggattttctcgctgtaaattgttataggatttgcaatgcgatgtctatttttttaatagagaacaaatggagtgaaatacttgacttgcaccaaatggatttattggaccatttgtttcatcgatttgtatcccatgagagatgcatcctggccaaaatttggtgttcagtgcattcattatttagcttatagttgaccttgaccaaagtatgagagcttaccacgacgcaaccatttggttctctcgaatagtacac

SEQ ID NO: 2556 - DNA, 2325 bp, Zea Mays
ggcccctggtctcctactctcctccccactcctccctcggcctggagtccagtcctcgactccgcctgccgcctgctgcctgacaagccacgcgctgcggcagccgtacgggcactagggttttcttccacttcgaccgcgggctcgggatctcgcgccgcaccgcaatgcagcacacgtgccgctgatcccgtggccgcctccttcctttcctcctcctgcggtcctgcgccgcctctgctgcagcgggcagccgccatggcgcggcgccacgggtggcagctccccgcccacaccctgcaggtggtggctataacagtgtactctgtgctttgtatagcattctatgctttcttctctccatttcttgggaaggacttgtatcaatatatcgctgtcggtatttatagttttttggctttatctgtgctgattctatatgtcagatgtactgcgattgatcctgctgactctggcatcctgatttccatggatgacatactaatttataaatcagaagcacatgtagacactcaagatgaagctggtaagccaggattgaggaacgatgaggatatccgaaagcataaatcatgctttggaagggtttgtttttgttgcgctatttttacaactggggactgtcgcggaggggatgaagctaaccatcaagaagattatggtgaagaggcactcttttgcaccctttgcaacgcagaggtgcgcaaacatagcaagcactgtcgaagttgcgacaagtgtgttgatgggtttgatcatcactgccggtggctgaacaattgtgttggaagaaaaaattatatcacatttttatgccttatggctgtgagtctggcttggcttgctgctgagtgtggagttggtattgctgtttttgttcgttgcttcactgacaagacagtcatagaagatcagattggggaaaagctgggttacggtctttcacgtgcaccctttgcaaccattgtagccctggctacagctctttcaatgcttgcttcagtaccactaggagaactatttttcttccatatgatattaatccggaagggcataacaacttatgaatatgttgtggccatgagggctcagagtgaacctcctggaccttctgtcaatgatgaccaacaaagcttggcatcttctccaatgagttctgcaccaacagcttttagtgggagctcgtttgcacggcactacaaaggcgcatggtgcactcccccacgtatcttcattgaccaggacgaaatcatcccacacctggagcctggccgagttccttcaactgttgatcctgataccacagacccaatggaaagaaccaaaacccatcctaaacggccagtccgcatcagtgcgtggaagcttgcgaagctcgattcaaatgaggccatgaaagcagcagcgaaagccagagcctcttcgtccgtgctgaaaccgatcaatactcgcaaccagtatgaggcagacagtgatagcctcagtagcagaaacagtgtcataagtgctgataccggacaccataggtaccctcggtcttgcgggaattcgcagtacaagccctcttatccaccaagcagagcaagtgcagatgacatcgagttgtacccccagacaccgagcagcttccagagcaactcacggacttcaactcccatagccgagcaccatccatccaagcatttcaacccaatctaccagacatcagcaaacaggtctccattctcagcaaaagcaagtgtcagtgaagctcctgtctctgaaatcaccaatgcagggaggtcctaccccccaccacaagcggacagatcctcccggtcatctgtttactgggatcaggaagctggcagatcccgcagcaagaagcttcagagatcctggtggctcgagccaaaggtctgccgggcctcggtcgcaccagctcccggtgttcgttcccagtgacccccagaaagatcagctgtccaggttaccgtgaaatgctatatcttttttttttggggggggggggggggtagtagtcttccgaaacacatgttgccctgccgggttattaatgtatagttattagctcttagacctgacagaatagttcatgactttgtatcgggttcatggaaattaagacctatttaggcactatcaaccataagcactgaagttatggaagtgctgcggagtagtagtgaagtgaaactgacaaggatgttctgtcaccaaacctaattagcttcacctcgccatatactcaaaacaaggcgataactaccaacgtgctccttattaaaaaaaactacaaatgtg

SEQ ID NO: 2557 - DNA, 2469 bp, Zea Mays
cccacacctcttctgcagttctacttcacgtcttgaccacgtccgcctcggcccctggtctcctactctcctccccactcctccctcggcctggagtccagtcctcgactccgcctgccgcctgctgcctgacaagccacgcgctgcggcagccgtacgggcactagggttttcttccacttcgaccgcgggctcgggatctcgcgccgcaccgcaatgcagcacacgtgccgctgatcccgtggccgcctccttcctttcctcctcctgcggtcctgcgccgcctctgctgcagcgggcagccgccatggcgcggcgccacgggtggcagctccccgcccacaccctgcaggtggtggctataacagtgtactctgtgctttgtatagcattctatgctttcttctctccatttcttgggaaggacttgtatcaatatatcgctgtcggtatttatagttttttggctttatctgtgctgattctatatgtcagatgtactgcgattgatcctgctgactctggcatcctgatttccatggatgacatactaatttataaatcagaagacactcaagatgaagctggtaagccaggattgaggaacgatgaggatatccgaaagcataaatcatgctttggaagggtttgtttttgttgcgctatttttacaactggggactgtcgcggaggggatgaagctaaccatcaagaagattatggtgaagaggcactcttttgcaccctttgcaacgcagaggtgcgcaaacatagcaagcactgtcgaagttgcgacaagtgtgttgatgggtttgatcatcactgccggtggctgaacaattgtgttggaagaaaaaattatatcacatttttatgccttatggctgtgagtctggcttggcttgctgctgagtgtggagttggtattgctgtttttgttcgttgcttcactgacaagacagtcatagaagatcagattggggaaaagctgggttacggtctttcacgtgcaccctttgcaaccattgtagccctggctacagctctttcaatgcttgcttcagtaccactaggagaactatttttcttccatatgatattaatccggaagggcataacaacttatgaatatgttgtggccatgagggctcagagtgaacctcctggaccttctgtcaatgatgaccaacaaagcttggcatcttctccaatgagttctgcaccaacagcttttagtgggagctcgtttgcacggcactacaaaggcgcatggtgcactcccccacgtatcttcattgaccaggacgaaatcatcccacacctggagcctggccgagttccttcaactgttgatcctgataccacagacccaatggaaagaaccaaaacccatcctaaacggccagtccgcatcagtgcgtggaagcttgcgaagctcgattcaaatgaggccatgaaagcagcagcgaaagccagagcctcttcgtccgtgctgaaaccgatcaatactcgcaaccagtatgaggcagacagtgatagcctcagtagcagaaacagtgtcataagtgctgataccggacaccataggtaccctcggtcttgcgggaattcgcagtacaagccctcttatccaccaagcagagcaagtgcagatgacatcgagttgtacccccagacaccgagcagcttccagagcaactcacggacttcaactcccatagccgagcaccatccatccaagcatttcaacccaatctaccagacatcagcaaacaggtctccattctcagcaaaagcaagtgtcagtgaagctcctgtctctgaaatcaccaatgcagggaggtcctaccccccaccacaagcggacagatcctcccggtcatctgtttactgggatcaggaagctggcaggttcgtgtctgctcaggcaaaccagggatctagctctcgccctgcctatcctgatcttctatacaccgggcagaatatattctttggtggacctctgattgcagatcccgcagcaagaagcttcagagatcctggtggctcgagccaaaggtctgccgggcctcggtcgcaccagctcccggtgttcgttcccagtgacccccagaaagatcagctgtccaggttaccgtgaaatgctatatcttttttttttggggggggggggggggtagtagtcttccgaaacacatgttgccctgccgggttattaatgtatagttattagctcttagacctgacagaatagttcatgactttgtatcgggttcatggaaattaagacctatttaggcactatcaaccataagcactgaagttatggaagtgctgcggagtagtagtgaagtgaaactgacaaggatgttctgtcaccaaacctaattagcttcacctcgccatatactcaaaacaaggcgataactaccaacgtgctccttattaaaaaaaactacaaatgtg

SEQ ID NO: 2558 - DNA, 1867 bp, Zea Mays
ggagttctaccaccatcaccgcctcgtgtgcagcgtgctcgcccacctcctctgtcgacactcagggtactgacgcaccaccccgaagccctcccgccgcgctcgcagggtgttcgacccttcgcccgcgcgccctcacgacatggcctcctccgtctccgccgccgccaaggccgccgcggcgttcgcgcacaaggtccagaaggagctggccgcgccggcgcagcgccgcgcgggcttgacccgccggaccaagccgtgcagcgtgcgcgccgtcgcttcgcccgcgcgcgccctgtcgtccaccggctcggtgaagagcgcgatgacgatgacggagaagatactggcgcgggcgtcggagcgcgcggcgctggagcccggggagaacgtgtgggtcgacgtcgacgtgctcatgacgcacgacgtctgcgggcccggcgccttcgacatcttcaagaaggagttcggggaggacgccagggtctgggaccgcgagaagctcgtcgtcatcccggaccactacatcttcaccagcgacggccgtgccaaacgcaacgtcgacatcctcagggacttctgtgcggagcagaacatcaagtacttctatgacatcaaggacctcagcgatttcagggctaatccggactacaaaggcgtctgccacatcgcacttgctcaggaaggccactgccgaccaggcgaggttctcttgggcactgattctcatacatgcaatgctggagcttttggtcagtttgcaactggaatcggaaacactgatgcaggttttgtgttgggcactggaaaggctcttctcaaggtgccacctactatcaggtttatattagatggagagatgccgccttatttacttgcgaaggatctgattttgcaaattattggagagatttcagtatctggtgcgacctacaaatcaatggagtttgttggatcaactgtagaaagtctaaccatggaagagcgtatgacactatgcaacatggttattgaagctggtggaaagaacggtgttgtgcctgctgatgaaactacatttaaataccttgagggtaagacatcagtcgattatgaacctgtctacagtgatgctcaagccagattttttagcgactaccggtttgatgtatcaaaactggagccagtagttgccaagccacattcgcctgacaaccgtgctccagcaagagaatgcaaagatgtgaagatcgaccgagtctatattggttcttgcactggtggtaagaccgaggatttccttgctgctgcaaaggtgttcttagcctcgggaaagaaggttaaagttcccacatttcttgtccctgccacacaaaaggtgtggttggacatatatagcctccctgtaccaggatctggtggcaaaacttgctcccagatatttgaggaggctggttgtgacacaccagcaagtcctaattgtggtgcttgtttgggtggccctcgtgatacatatgcacggatgaatgaacctactgtctgcgtgtccaccacgaacaggaactttccgggcaggatgggccacaaggaagggcaaatctacctggcgtctccctacactgcggctgcctcagccctgacggggcatgtccttcgttgagaaataaactgcactagaataagcagcgacttctcgggagccatagcagatgtgacctcatatttatttgtgcaactttttttgtttttggctctgaagtcatgcaaggaaaccacataaaagagtgatttatgtatgtgtcagaatcaaacaataatttgatgtcaaaagctcaagatagacatagttctgtaataagaacacactacatgcagttggatgtagttg

SEQ ID NO: 2559 - DNA, 4250 bp, Zea Mays
ccgagatctaaagcacctctctcccgtcgtcattgcattctcccccctctgcccttctctctccctctctcgcgagtcccgagtcccgactcgcacctccagatccacctcctcctccctcttccagatccaccatctcttctccgttcctctccgcagctacagctggggagctcagcttagccgccgccgtggccgggcacgccgggccgggaggatgctgaccaagttcgaaacgaagagcaaccgggtgaagggcctgagtttccacccgcgtcggccatggatcctggcgagtctccacagcggggtgatccagatgtgggactaccgcatgggcaccctcctcgaccgcttcgacgagcacgacgggccggttcgcggcgtccacttccacgccacacagccgctcttcgtctccggaggtgatgattataagattaaggtctggaattacaagacacaccgttgccttttcacacttcacggacaccttgactacattcgcactgtgcaattccatcatgagtatccatggattgtaagtgctagtgacgatcagacaatccggatctggaactggcagtcacgcacctgtgtggctgtgctgactgggcataaccattacgtcatgtgtgcatctttccatcccaaagaagacctggttgtatcggcatcacttgatcagactgtacgtgtctgggatatcggagctctgaggaagaagacagtgtcacctgcagatgacatcctccgtctcacccagatgaacacagatctttttggaggtgttgatgctgtagtgaaatatgtcctggaaggccatgatcgtggggtcaactgggcctcatttcatcccactttgccactcattgtttctggggcagatgaccggcaggtgaagctatggagaatgaatgataccaaggcttgggaagttgatactttaaggggccacatgaataatgtgtcttgtgtgatgttccatgcgaagcaagacatcatcgtgtcaaactcagaagacaaaagcattcgcatttgggatgccacaaagagaactggtattcagacatttagacgggagcacgaccgtttctggattcttgctgctcaccctgaaatgaaccttcttgctgctggtcatgacagtggcatgattgtgttcaaattagagagggaacgcccagccttctgcgttagtggtgacactgtcttctatttgaaggatcggtttctccggttctttgaatactccacccagaaggaagttcaagtggctccaataagaagacctggatcagtcagcttgaaccaatcacccaggacgctgtcctacagcccaactgagaatgctgtcttgatttgctctgatgctgatgggggttcatatgaactctacattgttcccaaggattctgctggcaggtctgattacttgcaagaggcaaagaaaggagctggtggttctgctgtttttgtagcgcgcaacaggtttgcagtccttgagaagagtagcaatcaagttttggtgaagaatcttaagaatgaaattttgaagaaaagcccccttcccattgcgactgatgcaatatattatgctgggaccggtaacctgctgtgcaaaggtgaagacagggtggccatctttgatcttcagcaaagcatgcagtggttatagctagcaagaagcttgtccataagtgcacactgcatgaaaccatccgtgtgaaaagtggtgcctgggatgagaatggtgtgttcatttacactacactgaaccatatgaagtactgtcttcccaatggagatagtgggatcataaagactctcgatgttcctatttacataacgagggttgttgggaacaacattttctgcttagatcgtgatggaaaaaacaagctgattgcagttgatgcatcagagtacattttcaagctcgcccttctcagaaaacgctatgatcatgttatgagtatgattaagaactcccagctgtgtgggcaggctgtgatttcttatttacaacagaaaggtttcccagaagttgctctacactttgtgaaggatgagaagaccagatttaacctagctctcgagagtggtaacattcaaattgcagttgcttctgcaaaggagattgatgacaaggatcactggtacaagttgggaattgaagccctgaggcagggaaatgttggtatagtggaatatgcttaccaacgaacaaagaattttgagaggcttgcttttctgtatcttattactggttacttggacaaggtgggcttcatgtgcaaaattgctggacagaataacaatttgatgggacagttccacaatgcattgtatcttggggatgccaagaagcgggttgagatcctggagaatgctggacagctacctcttgcttatgttactgctgtcactcatgggctcacagaaattgctgagaggattgcttctgaattaggcgagaatgttccttctctgcctgaaggaaaatcccactcactactgatcccccctgcacctctcacagcgtgtggtgattggccattgcttagggtagtgcgcggtatttttgaaggtggactggatgctactggaagggcagatcttgaggaagacgatgaagctgctggtgctgattggggtgatgaagacttggatattgttgatgtaagtgaggtggtggcaaatggtggtgatggtgttgatgtagaagagggtgagccaaatgaggaggatggtgaggagggtggctgggacctggaagatctggaacttccgcctgaaactgagactccaaaagctgttggcaatgctcgatctgctttattcgttgctcctacaccaggtattcctgtcagccaaatttggacccagagatcttctctggctggggagcaagcggcagcagggaacttcgacacagcaatgaggttgcttagccgccagttgggtatcaagaactttgttccactgaagcccttgtttattgatctgcacatgggcagtcatacatatatgtgtgcgtttgccgctgcgcctgttatatcagttgcagtagagaaaggttggaatgagtctgcaagtcctaatgtgaggggccctcctgcacttgttttcagcttctcacaaatggaagatagactcaaggctgcctacaaagccacaactgagggcaagttccccgaagcactgagacagttccttagcatcttgcataccattccagttattgtggtggattcgcggagagaagttgatgaggtgaaggaattaatcgagatagtgagggagtatgttcttggtctgaggatggaactcaagagaaaggaattgagggatgatgtgacccgtcagcaggagttggctgcttacttcacgaactgcaagcttcagagagttcatatgaggcttgtgctcgcaagcgctatggctctttgcttcaagcagaaaaactatgcaactgcagcacactttgcaaggatgcttcttgagaatagccctcaggaggcccaagcaaagaaggctcgacaggtgctgcaagcctgccaggacaaggacgattctcaccaactgaactatgacttcagaaatccattcgttgtttgtggtgctacatatgttcctatctatcgtggccaaaaggacgtttcctgcccatactgtggatcccgatttgttccttccatcgaagggcagctttgtaccatatgtgagcttggtgcggttggggcagatgcttcaggtctcctctgctctcctacacaatcgagataagccatggtagttagagcccccctatattctttctagtgtcttaagttccaagacttaatcatatattttaccagggagtttagtgattgtaaggaataagtattatacatgtttttatcaagttttttttttcttttttcgtgttctgttaccataatttttgtttgcctagagggtgctgtcatcacctgccgtatggtttagacttctgatcaactttggaagctatgctggaaattgatgtatgagatgtctctttcactctttaaaattctttttttgggatgtctctgcgttgctttttagtttatagtctggaggtattctttgctcggtacgcgggctaatgtgctttatgtcaaaatacattaagcatggaagagtttacctgctagggtgccaatcccatctaaagagcagtgtcttcagaaaaacttgatattatatgaactgtggaaaat

SEQ ID NO: 2560 - DNA, 2709 bp, Zea Mays
gcgtccgacctccgacgctgccaccaacctcttcccccagccacgctccaccgcgccatagccgcaggaaaatatcaaatcggagccgcgatgcaccacagaaaaaaattccctagggtttccaagcaaaagccctcctgaattctccaattccgcgccttcccccgcttcgtgggcctcggatttagggtttatgcatggcttccgaccctcccggcgacggcgccggcggggaagagccgacgccgggccctgcccccgccgtggaggtgcttgctgctcccgccgttccgctcaggccgcgctgggccacggagatcaaggtctacacccgtaagcacccccgcaaaacccctaaacctcctccagaaccagctcccgcccccgcctccgtccctgcccctgcccttgctcctgccccggccccgaatcccctttccgaaaccttatcctcgattcgtcgctccatccgccgcgcggacacggttggcgctgcggcgcggcccgatccggcagcgccggcctcggttcccgcccgggggccacctggggaacgcggtgccgcctcgggggacccctcatctgaggtgaaccgtgtcggcggcggtatttctaacggccacggcgacgaccgggcggcggccgcggctgagaagtctgagaaagcacggaaacgcagggtgaggagtgagttgcggcgccgactggcgggggagctcgaccaggtccgcgtgctctccaagcggctgaaggaggctgccgaggccctggcgcagcaggaggcttctgagcctgcgcctttgcccatggtggtgctgccaacacagcagcaggtggtggatgctgggtatgtgcaactgcagttctcagctggtgatatggcggtgcccatgtctgctcagattgcagctgctgttactcctgcccgttccatgctgcagcgcagaccactaaccgtgtcggttgttcataatgaagcctttgagaaggtgaagcggacgccaaaggccaatcaattgtaccaaaattcggagttcttgcttgccaaggataggatccctccctcagattcacatgtgcgcaagaaatctaagcaccacaagaagaagcataggtccctagaatctcgtggcgcagactttgatgctgagcggcggctgtactctcatgcgttcaagaagtcctcgtcacttctaagccgtttaatgaagcacaagtttgggtgggtgtttaataagcctgttgatccagttgcacttggtttgcatgattattttactattatcaagcacccaatggatcttggcacgataaggggacggcttagccgcggacagtacaggaacccgaaggagtttgctgaggatgtccggctcactttccataatgcgatgacatataatcccaagggtcaggatgtgcattttatggcagagcagttgtcaggaatcttcgaggcacagtggcctgagattgaggctgaggttaactaccttgcatcgtgtcctccattgccgaagaagtttccacctccaccaattgacctgcacttcctagagaggtcagattcgatgagacaccacatggcattggacaccaattcaagaccgatcagtcatactcccacttacacccggactccatcaatgaagaaaccaagggcaaaggatccaaataagagggacatgacaatagacgagaagcgtaagcttagtgagaacctgcagaatttgccacctgagaagcttgatgctgttgtgcaagtcattaagaacaagaacctatcagttatgcagcatgatgatgagattgaggttgaaattgatagtatggatgctgagacactttgggagcttgaccggtttgtggccaactacaagaagaacctgagtaagcaaaagaggaaggccgagcgagcgatgcttgccagacaagatgcagagttgcgtgcgcagcgccttatacaacaaccgcaaccaaccccagtcccccaagaacctgttggtgaaaaatctctaaagcaagttgcaaaaggtgagcaactaccaacatctgcatcagagaaaaacgacgagaatagacagaacgtgagtggttcaagcaattcaagcagctccagcagtgactcaggatcatcgtctagtgactcagacagtgatagctcctcttcagatggatctgatgctgccaattcatcttgagatatagtatgtaggaaggcgattgccgtaagcattgtttcttccatctgttaactgactgatgaaagcattgacaaagccccgttggtgttcagtttgccaccatctttctgtggactacctgtaaccgctgtgggttcatcgccatgtgccaagtctttttgatgttgtaaattaaagtttgttgatgcatctgatgtttagcatcacgactattgacggtccgttcttatgttctgatttgaggaatgtttgcttggaagatggcttgttgacttaactgtctgtgtagcagcagttcggacctttgggtaggtagcaggtagccttccctccgctggtgactggtgtggtgagatggtttgtatgttgctggctgtgattgtaatatgctgttgtgccttgtcctttgaggtctgcaaaggaaaagtgaattctataggaaattttctatgtggtcttttggaacaaaggattgagttcctataaaatggctcattgtagtggg

SEQ ID NO: 2561 - DNA, 3257 bp, Zea Mays
gcttctgctgctgctattattattagcattagggacttcgcatccattgtgtctgatttcttctattcagagtgaattgcagaagtagactggtttcttcttcatccagtaagctcagtctgtaccctgcactgcaacaatggtgctaggcctccgaaccaagacaaggaaggattctgccttccatgtggatttcaatattctcatccaagaaatcagcccatggcccccttctgaatcgttgaagtctttgcgctccgtagtactcttctgggaaaatggcgagcgcaattcaggaaagacgagcactgttgcgccttcaattgggtcaggttccacagcagggaagattgaatttaatgagttcataaacttacaggctattttccagaaggaggggtcatccaagagtggaaagtggcagaagaacctgcttgaattgaacttgtatgagccgaggagggagaagctgaagggccagcatttggggtctgcaacactagaccttgcagagcatgcaatgtttcatgaggacaccagtgttcctgtgcctctcagttccaagagaagtttcaaaaacaatgcccaacccatggtttacctccgaatccagcctttggatggcgataactcaagcgtttcttcaagagatgcattatcacaagaggcatcagttgataaagattcaaaggaatttgtctcagcaacggtgagtgaggagtatactgaagatacagagtttgcttcctttactgatgaagaagaagcaactccatacctgtaccgctcgggtgtaactgctctcacaggtagcaatagatctcatgaatccctcaagggcaaggatatcaggttaactaataatgaaggtaccagctcatcgttggattctcaacatgaagcaacagtatcctgtatgaaagtgaggaatgaagaagttgaaaagtttccaattcaagtgcaaaagcaaaatggccatccagaaaatctgtctctctcatcagatttgcccagagaacaaagtccgtctcttccaccacacaatgcattcagaagtggtcgtaaaatgtcatttgcatatggtatgactgaatctaaccaaagacagtttggggagagaacttatagcactttaactactgatagagcaaggaatgcgaggttcagtatgagagttccagatgttaatggaagtatcataaataagaaagttgattcccaggatattgcaattactcatgagaataaggccagtgttgatgatggattgcaagtccaggaaccaatacgcatttcaaataatcgaaatgacaacaaagttcgagaactagaacttaaaattgagttgcttgaagcagagctaagggaagctgccgctgctgagataggcctttattcaataattgcagaacatggtagttcagtaaacaaggttcatacaccggcacggaggctctccaggcattttgtgcatgcactaaaaaactgttcaagagacaagatgggaagtgcagcaaggaacacaacctctgggctggttttggttgcaaaagcttgtggatatgacattgcaaggttgagtttctggttgtcaaactgtgttgtactgcgagcaattgttactgaaacttctaggcaatcgggcactgtaaatagcagcaattatggtgattataattccaaaacaacatacaggaaaaactctgcatcaatgtgggagtcacttaataggaagaaaggaaaattactttcccctgagtttgataactgggaagatgttgacacatttatagctgcactaaagaagatcgaatcatggatattttctcgaattgttgaaaccctttggtggcagacattcacaccacatatgcaatctgctgatataactggtggtttgagaagtactccaaatccaaaaaaaggctatggaaagattcctgttgtgggcaaccagcaacaagcaaccatatcaatggacatatggaagaaagcctttaaggaagcgtcagaacggctttgcccagtaagggcagctggtcatgagtgtggatgtctgcctatgttaaccaagttggtgatggagcagtgcatagctaggttggatgtagcaatgttcaatgctattttgcgtgaatcagatgatgaaattccaacagacccgctgtctgatcccataactgatcctaaagttcttccaatcccatctgggaaattcagcttcggtgctggggtccaactgaaaaatgctattggcagctggtctagatgtcttactgacttgtttggcatggatatggacgactatcaagaacttgacaatgaaggtggtgaaaatggctttggtgaatctgtaaagccattctatcacctgaatgcactgagtgatctcctaatgcttcccaaggatgtgctcatggataccagtagcaggaaagagctttgccctacctttagctcatcaatcatcaagaacatcctggatgtctttttaccagatgaattttgtccagatcccattcaaggttctttacttcaagcactagagttggaggaccacctggaggttaacaagggcatacggtcgatcccgtgcagcgcatcgccaattttgtacaatgcccctgtatctggggcaatactaagcgtcatcggtgatcctaggaagagcgggtccgccatccttcacaagtccaacacgagcgatgacgagcttgatgagctgagctccccacttaccttcatctccaacacctcatcagacccgcttgcgaagctgaagcggatcagcaactcgaccacagcgaggtataggcttctccatgaggtgtggaagctggatgaccagtaggacttgatcctatcaccaccatggttctcccctctgtatataggtttgtttttttgcatatgattccggctcatgtataagatttcagtctatttgttatgttatgttacaagaagatgaggggcaagcgttgaatcttaataaatccgctgtgtctaaatgcaagagtgttcggtatgtgttgtgctagggtgtgaatcatgtgttttgcagatgtaggcaattcaagtggcccaacgtgcaggcccatttcttctactccccacccgcagtgcagcggtgctgacgcagtgaaaatttattgtagtcccatactgctggccggtgatctgatagacaagtgtaacggtcagaggggttctatgtaacacctgcacccatgtgctattctatccctaaaccttac

SEQ ID NO: 2562 - DNA, 1548 bp, Zea Mays
gtccgattggaggcctcttcctggagtcctggaccatcatctatcgtcaatcgtcgcgactcgcgacgaggcgcgccttctccctccgcttccgctccgtttggtttccaccctttccgcgtactccacgtcgccttctcccatctcctctttcctacccaccgccgccgctccagggccccgaaatgtcggacgaaggcggcaccggcgagccgctcagcgacagccagaagcgggagatcgccgtctggttcctctccaacgcacccgccggcgagatccactacgtcgccaaagatgtgcgcgcgctgctaggggacgacgcggtgtacgaggccgccgccgcggaggccttcccggagtacaacaaggcccgcctcgtgtccctcgagctccccgaccgcagtggcgacataatcatcacagcttatggggagattgacaagaacaattatctggaccccaggactgcgcaagttgctagtatagatcatatgaaacaggctttattgttgttgttgccttctcatgataaaagacttgtacgaaactgaggcccgctgaagatgaagagcttccatcggcttacattgaagagtttaggtgtgctttagatgttgaattgtcaaaatatgttgctgaagcttatcccaaagggacctgtgccgtttattgtactagtggaaaggatatagagggaccaggagcagatttctgtttcgcagcagttatttctgctactaagcgtagcccacagaacttttgcaatggcagttggcgttcaatttggactatggaattcaattatgagttgcagtttgttgatattaaaggaaatatacaggtagatgctcactattttgaagagggaaatgtccagctggatactaacattgatcgcaaggactccaccataatgcagtcacctgacgactgtgcagtttcaataactagcatcattcgacatcacgagtctgaatatttgtcatctctcgaggaatcttacttaaatttgtctgatgcaactttcaaggatcttcggagaaaacttccagtgacccgtactcttttcccatggcataacacactggcagtcagtcttacgagagaccttgccaaacaattagcgcttggaaaatgaagtctttgcaggccatgtcaccggatggcttcaagtgtttttttaatatccatgtgctgttctgtagtaatcagcattcttcatctctgagcttcccaatcccattgtaaatcaagaacacacttttttttttgtggagatgtaaaagatttcgccttccctagggtttctttggatgccgttaggaaccaaacagcctcttactgacgggtgtgaatcatatgtttcttcatcaatgctccaatctgatggattattgtaggtgttctgtatgagtttaaaaacaaggaccattcaaaaggaatgtgtgcgaaactatcctttggatagagattgatctttgagctcagacgaaggatgcacatatgtggtaacaattaggaaatgcttcgagggtggtgtttgtg

SEQ ID NO: 2563 - DNA, 1806 bp, Zea Mays
atgggcttttgacgaggatctcttggagagagcctaagagcaactctaataggaacactaaacataaacaaattcaaatatagggtcataatcttattttagtgaaatttatctaaactttttgaggtccaacttgaaggatagcatctttgcgactcagagagcgacggccctatacgattcgcgttgttccaacctccacagacatttcatatgtatcttcgtcgccaccatctcccatccagttgtcgccaatatgctcccaattcgctgccacatgtttgtcctgttctcagatcagatcgtgagcgctcttgttcccatctcggcgtcgtagaaggccctcggctctctccatcctcccgcctcacagttataacacctgggttccatgccttattcatagaagctatggtgaggacatttacgagatgttcagagagaacaatatcaaagcttgaggagcttactgaaagtgaaggccgtgaacaaaattcgactattgtggaccttgaagctgagttctccaatttggcacttgatatcattggattgggtgtgttcaattttgattttgactcggttactaaggaatctcctgtaataaaggcagtgtatggaacacttttcgaagctgagcaccgttccaccttctacatcccctattggaatcttcctttgacaaaatggatagttccaaggcagcgcaagttccatagtgacctcaaagtgatcaacaattgccttgataaccttataaaaaatgcaaaggagacgagacaggaagctgatgtggaaaagctccagcaaagggactactcttctctgaaggatgccagcttgctgaggttccttgttgacatgaggggagctgacgctgatgatcgccagcttcgagatgatcttatgacaatgcttattgctggacatgaaacaactgctgctgttctgacatggtctgtttttttgctagcccagagccctaccaggatgagaaaagcccaggcagaggttgattctgttctcagcaatggggcaattactgtcgaatctcttaagaaactggagtacataaaactgattattcttgaagctcttcgcttgtatcctcagccaccattgttaatcaggcgttctctccggccagacaagttgccaggcgggtgcaatggagcaaaagagggatatgaaataccagctgggaccgatatatttgtttcggtatacaacctccacagatccccgtatttctgggaccggccaaatgagtttgaacccgagaggttttccgtcccgaagaaggacgagagcatagaaggctggtctggttttgaccctgaccggagtcctggcgcaatgtaccccaacgagatcatagcggacttcgctttcctccccttcggcggagggcctcgcaagtgcgtgggggaccagttcgcgctcctggagtcgacggtggctctggccctgctgctgcggaagttcgacgtggagctgagagggtcgcccgacgaagtggagatggtgacaggcgccacgatccacacgaagaacgggctgtggtgcaggctgaggagaaggacttgacgggccaacattagctttgcagtttgcactgagtgagaagtagctctcgtgcttgactcctgtgatgtgctttaggcgagctaaactgcatcgcagacagaccagtggatgggaaccgtgtacactgaaaacatatcttgtaggcttgtagcgtaacaggtgcaaccacaacaatatattatttatctatctatctaattgagcttgacattccggtgc

SEQ ID NO: 2564 - DNA, 1911 bp, Zea Mays
caggtccagtggccagtgaccacgctccaccccattgctctggctctgtgctgtgcagctgtgctgccgggctcctgcgccatggccgcggccacgctgctccagggcccagccgccgcctcgccgcgtctcggcgccgcggcttcagcgccgtccgcgtcccacgggaggcgtcgcctcaccttcagcttcaggtgccagtcgaccagcgtcgacaagcagcaggagcggccgcccaagccgaagcagcggaacctgctcgacaacgccagcaacctgctgaccaacttcctcagcggtggcaacctcggggccatgcccgtcgctgagggcgcggtcaccgacctcttcggcaagcccctcttcttctcgctttacgactggttcctcgagggagttctcgctgaaattttaaaacccataatggggaagggtcttatacccgctgaccttgatacctggaagcaaaggagaaaagttataacacctgggttccatgccttattcatagaagctatggtgaggacatttacgagatgttcagagagaacaatatcaaagcttgaggagcttactgaaagtgaaggccgtgaacaaaattcgactattgtggaccttgaagctgagttctccaatttggcacttgatatcattggattgggtgtgttcaattttgattttgactcggttactaaggaatctcctgtaataaaggcagtgtatggaacacttttcgaagctgagcaccgttccaccttctacatcccctattggaatcttcctttgacaaaatggatagttccaaggcagcgcaagttccatagtgacctcaaagtgatcaacaattgccttgataaccttataaaaaatgcaaaggagacgagacaggaagctgatgtggaaaagctccagcaaagggactactcttctctgaaggatgccagcttgctgaggttccttgttgacatgaggggagctgacgctgatgatcgccagcttcgagatgatcttatgacaatgcttattgctggacatgaaacaactgctgctgttctgacatggtctgtttttttgctagcccagagccctaccaggatgagaaaagcccaggcagaggttgattctgttctcagcaatggggcaattactgtcgaatctcttaagaaactggagtacataaaactgattattcttgaagctcttcgcttgtatcctcagccaccattgttaatcaggcgttctctccggccagacaagttgccaggcgggtgcaatggagcaaaagagggatatgaaataccagctgggaccgatatatttgtttcggtatacaacctccacagatccccgtatttctgggaccggccaaatgagtttgaacccgagaggttttccgtcccgaagaaggacgagagcatagaaggctggtctggttttgaccctgaccggagtcctggcgcaatgtaccccaacgagatcatagcggacttcgctttcctccccttcggcggagggcctcgcaagtgcgtgggggaccagttcgcgctcctggagtcgacggtggctctggccctgctgctgcggaagttcgacgtggagctgagagggtcgcccgacgaagtggagatggtgacaggcgccacgatccacacgaagaacgggctgtggtgcaggctgaggagaaggacttgacgggccaacattagctttgcagtttgcactgagtgagaagtagctctcgtgcttgactcctgtgatgtgctttaggcgagctaaactgcatcgcagacagaccagtggatgggaaccgtgtacactgaaaacatatcttgtaggcttgtagcgtaacaggtgcaaccacaacaatatattatttatctatctatctaattgagcttgacattccggtgc

SEQ ID NO: 2565 - DNA, 1997 bp, Zea Mays
caggtccagtggccagtgaccacgctccaccccattgctctggctctgtgctgtgcagctgtgctgccgggctcctgcgccatggccgcggccacgctgctccagggcccagccgccgcctcgccgcgtctcggcgccgcggcttcagcgccgtccgcgtcccacgggaggcgtcgcctcaccttcagcttcaggtgccagtcgaccagcgtcgacaagcagcaggagcggccgcccaagccgaagcagcggaacctgctcgacaacgccagcaacctgctgaccaacttcctcagcggtggcaacctcggggccatgcccgtcgctgagggcgcggtcaccgacctcttcggcaagcccctcttcttctcgctttacgactggttcctcgagcatggctctgtctacaagcttgcttttggacccaaatcgttcgttgttgtctctgaccctatcgttgctagacacatcctccgggagaacgctttctattatgataagggagttctcgctgaaattttaaaacccataatggggaagggtcttatacccgctgaccttgatacctggaagcaaaggagaaaagttataacacctgggttccatgccttattcatagaagctatggtgaggacatttacgagatgttcagagagaacaatatcaaagcttgaggagcttactgaaagtgaaggccgtgaacaaaattcgactattgtggaccttgaagctgagttctccaatttggcacttgatatcattggattgggtgtgttcaattttgattttgactcggttactaaggaatctcctgtaataaaggcagtgtatggaacacttttcgaagctgagcaccgttccaccttctacatcccctattggaatcttcctttgacaaaatggatagttccaaggcagcgcaagttccatagtgacctcaaagtgatcaacaattgccttgataaccttataaaaaatgcaaaggagacgagacaggaagctgatgtggaaaagctccagcaaagggactactcttctctgaaggatgccagcttgctgaggttccttgttgacatgaggggagctgacgctgatgatcgccagcttcgagatgatcttatgacaatgcttattgctggacatgaaacaactgctgctgttctgacatgagccctaccaggatgagaaaagcccaggcagaggttgattctgttctcagcaatggggcaattactgtcgaatctcttaagaaactggagtacataaaactgattattcttgaagctcttcgcttgtatcctcagccaccattgttaatcaggcgttctctccggccagacaagttgccaggcgggtgcaatggagcaaaagagggatatgaaataccagctgggaccgatatatttgtttcggtatacaacctccacagatccccgtatttctgggaccggccaaatgagtttgaacccgagaggttttccgtcccgaagaaggacgagagcatagaaggctggtctggttttgaccctgaccggagtcctggcgcaatgtaccccaacgagatcatagcggacttcgctttcctccccttcggcggagggcctcgcaagtgcgtgggggaccagttcgcgctcctggagtcgacggtggctctggccctgctgctgcggaagttcgacgtggagctgagagggtcgcccgacgaagtggagatggtgacaggcgccacgatccacacgaagaacgggctgtggtgcaggctgaggagaaggacttgacgggccaacattagctttgcagtttgcactgagtgagaagtagctctcgtgcttgactcctgtgatgtgctttaggcgagctaaactgcatcgcagacagaccagtggatgggaaccgtgtacactgaaaacatatcttgtaggcttgtagcgtaacaggtgcaaccacaacaatatattatttatctatctatctaattgagcttgacattccggtgc

SEQ ID NO: 2566 - DNA, 1328 bp, Zea Mays
gtgaactactagagttagaggatgcaacgagaaccctcagctgcaggagtttgaattccagaactttccgacttcttacctccgctgtgctgctcatcgtgttgcacaacattatggcttagagactatagtagcagatagtttagtagaaggctcagttagcaggattgttgcaagaaaaacagcagaaagcaggtatcctgcaatttttttatcagaagttcctagcaatcaagcaagaaatgatcatgaaacagctgagaagcttaagtttgtcatttatcaaaggcccaaagcattccaaaatggaagcgctgattctagaaacaagagtggtgtaccaaaaactgttgatgagagaatagaggaatataataaagcacgagcacgcatcttcaatggttccatttctgcagattctgatgctgcaagtattatgggaactctttctactggcaaagatgaaccagtaaatgttgacccttctgttgatgaaaccaaagtcagcacaatgaacagtcgttccagagttgctgtttttaaggatactgaaaaggatcgtagtgacccagactacgatcgaaactacaaaagtttatgcagtatgacattggttatgtgcaatctcctggcatgtccacaaaccagcatactatgtactttggccagcctgatctaacaatagggtcttctggagctgctgtttatcgacattggccaaccccaacaatgatgtatccccattgctatgataatgttagtccaatgatgtctcaggttcctctgtaccagtctttcaaccatgattaggagattctgcttgctggaaagttgggaacaattctctgttgaacttgctatgttgtgttgtcctatgttaagtggagttcctttagattcgagccgtttttattacaaaaaattgtataaggagtcctaattcgttgaaactatttcgtgaactagtctggaactgtgatgcttgtctaatgtctagttctcgtttgcaatttgctcccggtttatagttagtagtgtgctgcgactggtcttgaaccgtgtcgcgtggtcgtactggtagaaccaggttgctacttgccagcagtcattgctttgattccgattttttatttaacttctttttaatcaagtatttcaaataatctaccctagaagttacttttacatctagttgtgccagaccacaaggacgacaaaataagattgttaaaatatgaaatgtaaatagaatttgccattgtttttcccattgagtttagagttcaaatgtcacaccggtatattccttaaattttcttatattcctc

SEQ ID NO: 2567 - DNA, 1609 bp, Zea Mays
tatcatcttcatttgatggacgtccacaagcttagcaccactgacatgatctgtcaagtctgaggctaggtaggacgtattgcctccattggtggtattgctacgatgagagctacacctccaacacgaagactgcagctgtggccacctaccaggctatggtatcgatatcaactagtacatctacatgacgtcaacagatcatattacaagtaatctggacaagctagcagttcagaacaaggggacaaattggacctcacagccagcagggcaggttttgggtgtgctggctggcctaacttgcgtctttagaacacttgcaagctgtcatttagaaccctcagctgcaggagtttgaattccagaactttccgacttcttacctccgctgtgctgctcatcgtgttgcacaacattatggcttagagactatagtagcagatagtttagtagaaggctcagttagcaggattgttgcaagaaaaacagcagaaagcaggcccaaagcattccaaaatggaagcgctgattctagaaacaagagtggtgtaccaaaaactgttgatgagagaatagaggaatataataaagcacgagcacgcatcttcaatggttccatttctgcagattctgatgctgcaagtattatgggaactctttctactggcaaagatgaaccagtaaatgttgacccttctgttgatgaaaccaaagtcagcacaatgaacagtcgttccagagttgctgtttttaaggatactgaaaaggatcgtagtgacccagactacgatcgaaactacaaaaggtatgttaggagctcagtgcctggcttcaacttgagcccaggtgtttttaactttgttgtgcctcagtttatgcagtatgacattggttatgtgcaatctcctggcatgtccacaaaccagcatactatgtactttggccagcctgatctaacaatagggtcttctggagctgctgtttatcgacattggccaaccccaacaatgatgtatccccattgctatgataatgttagtccaatgatgtctcaggttcctctgtaccagtctttcaaccatgattaggagattctgcttgctggaaagttgggaacaattctctgttgaacttgctatgttgtgttgtcctatgttaagtggagttcctttagattcgagccgtttttattacaaaaaattgtataaggagtcctaattcgttgaaactatttcgtgaactagtctggaactgtgatgcttgtctaatgtctagttctcgtttgcaatttgctcccggtttatagttagtagtgtgctgcgactggtcttgaaccgtgtcgcgtggtcgtactggtagaaccaggttgctacttgccagcagtcattgctttgattccgattttttatttaacttctttttaatcaagtatttcaaataatctaccctagaagttacttttacatctagttgtgccagaccacaaggacgacaaaataagattgttaaaatatgaaatgtaaatagaatttgccattgtttttcccattgagtttagagttcaaatgtcacaccggtatattccttaaattttcttatattcctc

SEQ ID NO: 2568 - DNA, 2494 bp, Zea Mays
ccaagtccaaacccctctcctcccccgcgtcccgcgagctccgtcaccgccgccgctggcgagatgtcatcggtgacccgccctcagcgggaggccgactttgcacgcttcccgtcgtccacccccatcgtcatcgacaacggcgcttctaccttccgcatcgggtgggcgggcgaggcggagccgcgcctttcgttccgcaatgtcgtgcagaggccgcgccaccgcagcactgattcttgactatggctttgatcgattaggtgtcgattcagaggtgggccatccaattcttatgacagaatgtgaatgtaatccgtccttttctcgagcccgaatgtcagaactacttttcgagacatatggtgtaccatccatagcatttggcattgacaacgcgtttagttataagtacaatcagaaacttggaaactgtaacgaagacgggctggctatttcatgtgaacatggaacttgtcatgttgttccagacaggcctggcgcagtggtgagaagccttcccactgagccaaagtaccattttacattgaacagggcaagtatttcatgggaaaaggctgaagagctgaagaaggaacattgttatatagctcctgattatatggcagagttgcagatatttaaaaacaataaggaagaagctgatgagaaaatgaggtattggcagctaccatgggtccccccaccaaaggaagaaccaccatctgaggaagaacttgcaaggaaagcagctttgaaggaaaaggctggtcagcgtttgcgagacatggctgctgcaaagagatctcagaagatagtggaactagaaaaacaactttcctatctggaggaactaatggaacaacttgatgaagctgaggaagaagaagcaacagctattctaggtagctctggatatctttcccagcaggaaatcagatctgccattttaaaagcatcacaatctttaaggaaagcaaaaggggagtccaatggcaatgatgagaaaacagatgcctcagcagttgataagtatccacttgtatctgttcctgatgagacactgacgccagaacagttaaaggaaaagaagaaacagatattacttaaaaccacaacagagggcaaattgcgcgcaaagcagaaacgtgctgaagaggaggctttgcgggagaaacaagaagaaaagaggcgtgcggagaacccagagttataccttgaagagcttcgggcccgatattcagaactttctgataaatttgagcagaggaagcgacagaaagttaatggtagtcagacaaatgggaaccatagttcatctgcaggtgtaggccgtggagaaagactaaatgcagctcagaaagaaaggatgcggctgcttgcctcagctgcttttgatcggggcaaaggtgaggacacttttggaatgagagacgaggattggttagtgtacaacaagatgagcaaagacaatgatgatgacagcaatgatgatgatgaatcggaacttgttcgaatttcatcgaagctccaggagattgatcctacatttgtgtccaaatccgaagctgttcaactgactccggagccacccaaagtccggccactaaccgctgaggattacagaattgccattgggatcgagcggttccgttgccctgaagtcctcttccagccaggcatgattggaatcgaccaggccggcatcgatgagatggtcagcatctcactcaggagattaatggaggacgagtctgtgaaggagcgcctctgccagtcgatccttgtcactggcgggagctccctgttccctggcatgatccctcggctggagtctgggatacggcaatatcggccctaccttgctcccctgaagcttgtcggagcagctgaccccattttagacgcgtggaggggtgctgccgcctttgcggcatcaagcaagttcggcaaacaaacgttcagcctagctgattacggagagcatggagagaacctgtttcatcggtacaacattgtttactcactataaccggaaaatgacatagtgatcgaaccatctcagtcaggctatttatttaacagctgatacaaattgatgtagcaacaaagtttttcaaaactgcaattgatatttttatgtgattggaattggagggttcaaatggtgaaggaatttcataaacctataatatgtgtgcctttttttagtcttcccagggcacaacttgtttaagaacaggtgagctgaatcctctataaagctaaggtcactatcgactatatggatggataaaaagaacaaagttgtccatggttacttgcataggggcatttctttttcattttcttttttagtctctattttgttatatctaccattaattaaaaaaaggaacacagtcttatatagggggtatgcctttttattttatttttaaatcttctgtttcttcagggttcctaaatctattttttgttttctttaacacac

SEQ ID NO: 2569 - DNA, 2654 bp, Zea Mays
aggcaaggcaaggcaaggcaagcgaggcgaggcgccgaggccaggtgaagcatccgaacggtcccgaagaaagacgactcagcagtcagcacaaggacaaggttaccaaacgctccaagtccaaacccctctcctcccccgcgtcccgcgagctccgtcaccgccgccgctggcgagatgtcatcggtgacccgccctcagcgggaggccgactttgcacgcttcccgtcgtccacccccatcgtcatcgacaacggcgcttctaccttccgcatcgggtgggcgggcgaggcggagccgcgcctttcgttccgcaatgtcgtgcagaggccgcgccaccgcagcactgattcttgactatggctttgatcgattaggtgtcgattcagaggtgggccatccaattcttatgacagaatgtgaatgtaatccgtccttttctcgagcccgaatgtcagaactacttttcgagacatatggtgtaccatccatagcatttggcattgacaacgcgtttagttataagtacaatcagaaacttggaaactgtaacgaagacgggctggctatttcatgtgaacatggaacttgtcatgttgttccatttttgaaaggacagcctgtgttggggggcttgctgcagaaccaatatcggtggatttcacattactgattttctgaggcagcttctctgtctaaaatatccctatcacacggcaagtatttcatgggaaaaggctgaagagctgaagaaggaacattgttatatagctcctgattatatggcagagttgcagatatttaaaaacaataaggaagaagctgatgagaaaatgaggtattggcagctaccatgggtccccccaccaaaggaagaaccaccatctgaggaagaacttgcaaggaaagcagctttgaaggaaaaggctggtcagcgtttgcgagacatggctgctgcaaagagatctcagaagatagtggaactagaaaaacaactttcctatctggaggaactaatggaacaacttgatgaagctgaggaagaagaagcaacagctattctaggtagctctggatatctttcccagcaggaaatcagatctgccattttaaaagcatcacaatctttaaggaaagcaaaaggggagtccaatggcaatgatgagaaaacagatgcctcagcagttgataagtatccacttgtatctgttcctgatgagacactgacgccagaacagttaaaggaaaagaagaaacagatattacttaaaaccacaacagagggcaaattgcgcgcaaagcagaaacgtgctgaagaggaggctttgcgggagaaacaagaagaaaagaggcgtgcggagaacccagagttataccttgaagagcttcgggcccgatattcagaactttctgataaatttgagcagaggaagcgacagaaagttaatggtagtcagacaaatgggaaccatagttcatctgcaggtgtaggccgtggagaaagactaaatgcagctcagaaagaaaggatgcggctgcttgcctcagctgcttttgatcggggcaaaggtgaggacacttttggaatgagagacgaggattggttagtgtacaacaagatgagcaaagacaatgatgatgacagcaatgatgatgatgaatcggaacttgttcgaatttcatcgaagctccaggagattgatcctacatttgtgtccaaatccgaagctgttcaactgactccggagccacccaaagtccggccactaaccgctgaggattacagaattgccattgggatcgagcggttccgttgccctgaagtcctcttccagccaggcatgattggaatcgaccaggccggcatcgatgagatggtcagcatctcactcaggagattaatggaggacgagtctgtgaaggagcgcctctgccagtcgatccttgtcactggcgggagctccctgttccctggcatgatccctcggctggagtctgggatacggcaatatcggccctaccttgctcccctgaagcttgtcggagcagctgaccccattttagacgcgtggaggggtgctgccgcctttgcggcatcaagcaagttcggcaaacaaacgttcagcctagctgattacggagagcatggagagaacctgtttcatcggtacaacattgtttactcactataaccggaaaatgacatagtgatcgaaccatctcagtcaggctatttatttaacagctgatacaaattgatgtagcaacaaagtttttcaaaactgcaattgatatttttatgtgattggaattggagggttcaaatggtgaaggaatttcataaacctataatatgtgtgcctttttttagtcttcccagggcacaacttgtttaagaacaggtgagctgaatcctctataaagctaaggtcactatcgactatatggatggataaaaagaacaaagttgtccatggttacttgcataggggcatttctttttcattttcttttttagtctctattttgttatatctaccattaattaaaaaaaggaacacagtcttatatagggggtatgcctttttattttatttttaaatcttctgtttcttcagggttcctaaatctattttttgttttctttaacacac

SEQ ID NO: 2570 - DNA, 4690 bp, Zea Mays
cctgcattgtcaatggaagacattatcagagcttcaaagtgttagtggattcaagaaggtaataaattacacgaaaagagttgctgaggaacagaggtacaagagggcactatcacgtgaagaggttgaggtgcatgatgtgggcaaggagatggagctggatcttattaaacaatatagtcaggttgaacggatatttgctgatagggtcagcaaagctgatggagatgatctggttcctgaatatttagtcaaatggcaaggacttccttatgcagaatctacctgggaaaaagatacagatatcgattttgctcaagatgcaattgatgaatataaggctcgtgaagctgccacatctatacttgggaaaacagtagatttccaacgaaagaaaagcaaagctagtttgaggaggcttgatgatcagccagaatggctaaaagctggtaagcttcgtgattatcagctggaaggactaaactttctcgtgaatgggtggagaaatgatactaatgttatacttgctgatgaaatgggtctggggaaaactatccaatctgtttccatgcttggcttccttcataatgctcaagaaatcaatggtccatttcttgtagttgtgccactgtcaacattgtcgaactgggcaaaagaatttcggaagtggctgcccaacatgaatgttgtcatttatgttggcaaccgtgccagcagagagatgtgccagaagcatgagtttttttcagacaagaagggtgggcgtcatgtaaaattccatacgttgataactacatatgaggtgattctcaaggacaaagcggttctttccaagatcaaatggaactatcttatggttgatgaagcccaccggttgaaaaattgtgaagcatcactatatactacccttttggaattcagcactaagaataagctgcttatcactggaacacctttgcagaacagtgtggaagagctttgggcattacttcatttccttgatccagttaaattcaacagcaaggatagttttgttgaaagatacaaaaatttgagttccttcaatgaaaccgagcttgcgaatctgcataaggaattgaggcctcatattctaaggcgggttataaaagatgtcgagaagtctttacctcctaaaattgaacggattctacgtgtcgagatgtcaccccttcagaaacaatactacaagtggattttagagcggaatttccagaatctaaataaaggagtccgtgggaatcaggtatcacttttgaacattgttgttgaattgaagaaatgctgcaaccatccatttttgtttgaaagtgccgatcacggttatggtggagatagcattggcgatcggaataaagttgaacggattgttatgagtagtggtaaacttgtcttgttggacaaactattggtgagactacgggagactaaccatcgtgtgcttatattctcacagatggttaagatgttggacatccttgcagaatatctctcccttcggggatttcagtttcagaggcttgatggtagtacaagagcagatcttcgtcatcaagccatggaacattttaatgctcctggaagtgatgacttctgttttcttttatccacacgtgccggaggacttggtattaatcttgcaactgcagatacagtgataatttttgattcagattggaatccacaaaatgatctgcaggccatgagtagggcacataggattggccaacaggaaactgttaatatctaccgcttcgtcacatgcaaaagtgttgaagaggatattttggaacgcgcaaagaaaaagatggttcttgatcacttggttattcagaagctaaatgctgagggcaggcttgagaagaaagaatccaaaaagggtggctccatatttgacaagaatgaactttcggctatcttgaggtttggagcagaggaattgttcaaagaagacaagactgatgaagaggccaagagaaaccttgaaagtttggacattgatgaaattcttgagagagcagagaaagtcgagacaaagggtggtgaaggggaggaaggaaatgagcttcttagtgctttcaaggcatgtgatgtcgcaaacttttccagtggcgaggatgatgcaacattctggagtaggctaatacagccagatcctgcagatattattcaggaaactttggcgcctcgtgctgcacgtaataaaaagagttatgttgaagatccccagtttgacaaaaataataacaggaaaagacgtgcagttgaagcacaagaaaagccaaggaggcgttctggcagaacagtggaaacagttaattcagtaccattggttgatggagcagtagctcaagtacgagagtggtcttttggtaatattccaaagaaggatgcttctcgttttgtacgagcggttaaaaaatttgggaatgcaacccagattgacttaattgtggatgatgttggtggtgtactagagaaggcaccacatgaagcacaaatagagctatttgatttgttgattgatggttgtcagaaaagctgttaaagagaatacagatatcaagggcacagttttggattttttcggtgtagctgtgaaggcctatgaattgctagctcgtgttgaagagcttcagttgttgtcaaagcgcattgcacgatacaaagatccaatcaagcaataccgcatccaactaccttataaaaagcctcagtggtcagcaagctgtggatggactgaaactgatgatgctagattgatggttggaattcattggtatggctacgggaattgggagaaaatacgtttggatccaaagcttggcctgacaacaaaaattgcaccagcaacacttggtgagagagagacatttttaccacgtgctccaaacttggataaccgtgctagcgctctcctgcaaaaggaatatgctaagtttagcggtaatagctcaaaagtcaaaggaaatgcccgccagacagtcaataacgacagtaatagtggagctcgatcaatgagaggccgacaaaaggatgcaccagataaagaggataataagccgaacaaagatgacattcagaagcgcaaggtaatgatggaagctgaagcaagagaagaaggtgaaatttctgaatcagaggcagagacaaagtatcgtctggacaaagaggagaagtggctcgaatggtgctctgaagttttaaatgaggaacaggaaactttgaagcgcctggacaggctgcagaatacaagtgtaaacctcccaaaggaaaaggttctttcaagaatccgcaagtatctcctgataattggggacaaaattggtgaagttgtccggcaacacagtgaatcttataggcaatcccgtaagtgtagccgcacctcccgcatgaccatgaggttatggaattatgttgccaccttttcaaacatgtctggggagcaattgcatgatctctatttgaaacttagtcaagaccaactggaaggtggagttggcccatctcatggtgccaatttcacatccattccttccagcaagggaggtaactcaaatcaacttcatcctacaagaaaccataggccaaccaggtctctccagtacaattctgagtctttgcacaataatgagagctctggaagttctgaagcctggaagcgtcgacggagagcagaccctgataatcagtttgacacccagcctttgtatcaacctccaattatgacaaatggaaataggttgcaggaatctagtagttctgcaggaattcttggttggggtccagttgaaatgagacggtatggtaatgaaaggccaaagcgtggtgttcatcctagtcattttcctactgggcatggacctttgttgtagctgaaggaattagatgactcgaacaaccttgtccactttggcataactgttcccagtgaatttcagcttccatatagttacaaatggtggaactctgtcggaattgaaattcttttttccataacaagaaggaataaaaagcaagacctgacctggagcgcagtttgaatactgtccctcaaaggtaatgccaggactccagaggcgacgcagggatttgttaacagctacactgaatatccttctgacaacatcacagtaaaacgaatacatggtggcttgtcaactgccaagaggattaatcgaggaaattttgtcgattcagttttgtgatccaatagaaaagttgggggtcattaggaaaaagttcatctcaacaatgatctatagttcactctatacatgtattatgttttacattgcaatataatgaaatatggttcagttattcccactcagtgtgttttgtgcccttctgtattgatgtaatagatcaaagaaatgcatgttctcgttttttttttttttttttagaaaaccgcaggagaactgcgcatcttatatattagagaggaaaaaagacattacaaaagaggagaagttgcagagcaactctcccacctaataaagaagttgcagctgggggggcatagtatgtgttagtttcaatttctctaaatagaggaaatatatattttgttcacgcgatggaatcggtagatacttgaattgattccatagtatttttttcctgaggtgatgtgagaatgaggtgtgtggttatatgtatttcaaat

SEQ ID NO: 2571 - DNA, 6225 bp, Zea Mays
gcgaaaaggcgagagccggagagagagagacatacagagagaggggaaaaaacttatctgcccttcctaatcgcccttacccccttgtgttagataaccacccctctcccttgcgcgccgccgccgccgccgccgcgcctccccgccgggagcccgtctccggcgatcgccgccgtctagcccccctcctgtccccgccttcgatccgaatcctagacgaaaaatcgtggaaaataccgcaaaaaatcgcggaaattcgcccggttctgtttgaataaatcgcacgggcgttgcgccccgcccctctcgctcccctcccgccgccagccccgcggccgccggcgacggcgatcgcgcagacaaataggcgcccgcgtcgagccagaaaaacccgcctcgtgccggtccgagcattcgtctctgtcgtggggactgagcacccgttgcctgtccccgcccgcctgcccgccgcctcctgctcctctcgtcggccgcggcacaaggagtgatactgagcctgtgagaggtattccatataatgccataatctgggatggcattcttcagcaactccgggagcaaggctgattcaggagggtacaacctgaatgaaaaggccgaagatgagggcatctacgagtcagttcaggatgggaatgttgacctgagttctaggcagtggaacttaaatgagaaagcagatgatgcttaccattgtgaagcagagcaatatgaggcgggccagtcaggtttgtactcttctgagaaggcatcagggcagcatatccagaaaggaggcagatcttctggtggtccatggggcacaaattttctgaaggattccaggtccaaacagatggccgaggatgttccatcgaatagtggtagaggaatgaatgctgctagcttgcatgatggcttggatgatagtggagaggatgatgagctgaacagggcaaatggtgaggtgcctgctgaggaaatgctctccgatgactattatgagcaggacggagaggagcagattgaatcgttgcatcgtggcgggacgaagcaatcaagctgttccacttctgaagacgaccccgctgatgtggattttgagccagacagcgaaacggacaaagctactgataaggataagtttatggatagtgagaattctgatggcgacgatgatgatggccttgaactctcagatgatgatgatgactttgttgagaaccggaggcaacctaaacgacttaagattgtagcaactaaaacttccaagggaaggaagttgcccatgccagctcaacgaaaacgaggggtgtctcacagcgatgaagaatattcttcaggaaaagattcagatcttcccagtgatgctgatttcaaacacagatcgaaaagacctgacaggttgcatcagaaatctgtgggccgcagtgatgttgccccaatcaattctcataatgagcttcgaacttctggaaggaggacagtgaaaaagatctcatatgttgaaagcgaagaaagtgatgatagcgaggagaagtcaactaaacaacaaaaggaggagctggaagaggaagacggagaaacaattgaaaaagttctttggcatcaacccaagggtgtagctgaagaagcaataaagaatcaccaatcagctcaacctactgttgtcagcctaacatcggactttgatcaacagtgggatgaattagagttctatataaaatggaaaggccagtcttacctgcattgtcaatggaagacattatcagagcttcaaagtgttagtggattcaagaaggtaataaattacacgaaaagagttgctgaggaacagaggtacaagagggcactatcacgtgaagaggttgaggtgcatgatgtgggcaaggagatggagctggatcttattaaacaatatagtcaggttgaacggatatttgctgatagggtcagcaaagctgatggagatgatctggttcctgaatatttagtcaaatggcaaggacttccttatgcagaatctacctgggaaaaagatacagatatcgattttgctcaagatgcaattgatgaatataaggctcgtgaagctgccacatctatacttgggaaaacagtagatttccaacgaaagaaaagcaaagctagtttgaggaggcttgatgatcagccagaatggctaaaagctggtaagcttcgtgattatcagctggaaggactaaactttctcgtgaatgggtggagaaatgatactaatgttatacttgctgatgaaatgggtctggggaaaactatccaatctgtttccatgcttggcttccttcataatgctcaagaaatcaatggtccatttcttgtagttgtgccactgtcaacattgtcgaactgggcaaaagaatttcggaagtggctgcccaacatgaatgttgtcatttatgttggcaaccgtgccagcagagagatgtgccagaagcatgagtttttttcagacaagaagggtgggcgtcatgtaaaattccatacgttgataactacatatgaggtgattctcaaggacaaagcggttctttccaagatcaaatggaactatcttatggttgatgaagcccaccggttgaaaaattgtgaagcatcactatatactacccttttggaattcagcactaagaataagctgcttatcactggaacacctttgcagaacagtgtggaagagctttgggcattacttcatttccttgatccagttaaattcaacagcaaggatagttttgttgaaagatacaaaaatttgagttccttcaatgaaaccgagcttgcgaatctgcataaggaattgaggcctcatattctaaggcgggttataaaagatgtcgagaagtctttacctcctaaaattgaacggattctacgtgtcgagatgtcaccccttcagaaacaatactacaagtggattttagagcggaatttccagaatctaaataaaggagtccgtgggaatcaggtatcacttttgaacattgttgttgaattgaagaaatgctgcaaccatccatttttgtttgaaagtgccgatcacggttatggtggagatagcattggcgatcggaataaagttgaacggattgttatgagtagtggtaaacttgtcttgttggacaaactattgatggttaagatgttggacatccttgcagaatatctctcccttcggggatttcagtttcagaggcttgatggtagtacaagagcagatcttcgtcatcaagccatggaacattttaatgctcctggaagtgatgacttctgttttcttttatccacacgtgccggaggacttggtattaatcttgcaactgcagatacagtgataatttttgattcagattggaatccacaaaatgatctgcaggccatgagtagggcacataggattggccaacaggaaactgttaatatctaccgcttcgtcacatgcaaaagtgttgaagaggatattttggaacgcgcaaagaaaaagatggttcttgatcacttggttattcagaagctaaatgctgagggcaggcttgagaagaaagaatccaaaaagggtggctccatatttgacaagaatgaactttcggctatcttgaggtttggagcagaggaattgttcaaagaagacaagactgatgaagaggccaagagaaaccttgaaagtttggacattgatgaaattcttgagagagcagagaaagtcgagacaaagggtggtgaaggggaggaaggaaatgagcttcttagtgctttcaaggtcgcaaacttttccagtggcgaggatgatgcaacattctggagtaggctaatacagccagatcctgcagatattattcaggaaactttggcgcctcgtgctgcacgtaataaaaagagttatgttgaagatccccagtttgacaaaaataataacaggaaaagacgtgcagttgaagcacaagaaaagccaaggaggcgttctggcagaacagtggaaacagttaattcagtaccattggttgatggagcagtagctcaagtacgagagtggtcttttggtaatattccaaagaaggatgcttctcgttttgtacgagcgggcacagttttggattttttcggtgtagctgtgaaggcctatgaattgctagctcgtgttgaagagcttcagttgttgtcaaagcgcattgcacgatacaaagatccaatcaagcaataccgcatccaactaccttataaaaagcctcagtggtcagcaagctgtggatggactgaaactgatgatgctagattgatggttggaattcattggtatggctacgggaattgggagaaaatacgtttggatccaaagcttggcctgacaacaaaaattgcaccagcaacacttggtgagagagagacatttttaccacgtgctccaaacttggataaccgtgctagcgctctcctgcaaaaggaatatgctaagtttagcggtaatagctcaaaagtcaaaggaaatgcccgccagacagtcaataacgacagtaatagtggagctcgatcaatgagaggccgacaaaaggatgcaccagataaagaggataataagccgaacaaagatgacattcagaagcgcaaggtaatgatggaagctgaagcaagagaagaaggtgaaatttctgaatcagaggcagagacaaagtatcgtctggacaaagaggagaagtggctcgaatggtgctctgaagttttaaatgaggaacaggaaactttgaagcgcctggacaggctgcagaatacaagtgtaaacctcccaaaggaaaaggttctttcaagaatccgcaagtatctcctgataattggggacaaaattggtgaagttgtccggcaacacagtgaatcttataggcaatcccgtaagtgtagccgcacctcccgcatgaccatgaggttatggaattatgttgccaccttttcaaacatgtctggggagcaattgcatgatctctatttgaaacttagtcaagaccaactggaaggtggagttggcccatctcatggtgccaatttcacatccattccttccagcaagggaggtaactcaaatcaacttcatcctacaagaaaccataggccaaccaggtctctccagtacaattctgagtctttgcacaataatgagagctctggaagttctgaagcctggaagcgtcgacggagagcagaccctgataatcagtttgacacccagcctttgtatcaacctccaattatgacaaatggaaataggttgcaggaatctagtagttctgcaggaattcttggttggggtccagttgaaatgagacggtatggtaatgaaaggccaaagcgtggtgttcatcctagtcattttcctactgggcatggacctttgttgtagctgaaggaattagatgactcgaacaaccttgtccactttggcataactgttcccagtgaatttcagcttccatatagttacaaatggtggaactctgtcggaattgaaattcttttttccataacaagaaggaataaaaagcaagacctgacctggagcgcagtttgaatactgtccctcaaaggtaatgccaggactccagaggcgacgcagggatttgttaacagctacactgaatatccttctgacaacatcacagtaaaacgaatacatggtggcttgtcaactgccaagaggattaatcgaggaaattttgtcgattcagttttgtgatccaatagaaaagttgggggtcattaggaaaaagttcatctcaacaatgatctatagttcactctatacatgtattatgttttacattgcaatataatgaaatatggttcagttattcccactcagtgtgttttgtgcccttctgtattgatgtaatagatcaaagaaatgcatgttctcgttttttttttttttttttagaaaaccgcaggagaactgcgcatcttatatattagagaggaaaaaagacattacaaaagaggagaagttgcagagcaactctcccacctaataaagaagttgcagctgggggggcatagtatgtgttagtttcaatttctctaaatagaggaaatatatattttgttcacgcgatggaatcggtagatacttgaattgattccatagtatttttttcctgaggtgatgtgagaatgaggtgtgtggttatatgtatttcaaat

SEQ ID NO: 2572 - DNA, 2545 bp, Zea Mays
cggtggtagtgatacacaccgaagcacccaggaaagcatcctggctcctgtccctcctcgccatttcacgagctcccatttcacacgctcactccgtcactcgctcgcctccgccgtcgcaaagcctgccggaaccggcgtgtgcggtcagttccggtgccgcgcagggcctgaggaatgccgcactccgtcctggcccgtctgccccccggctccgtccggctcgtagctgccttcgggctgctgctcctcgtctcgctgctcgttctccaccgccgccccgggaggccccatgtggcggcggccgccgccagcgaccgactcactgatccctcccggtcccggctgttcctgtcgcagtcccccggggccaacgcgagcatcgcggctgacctccgcgcgctcaccgcggggccgcacctcgcggggacgcctgcgtcggcgggtgcagccgcgcacgtgctcgcccgcctccgcgccgcgggactccaaaccctaacgcgcgagtacgagccgctgctctcgtaccctgggcacgcctccctcgcgctgctccggcccgacgggtccctgctcgcgcgcctgtcgctcgaggagcccgcggacgaggggcgccgcgtcgtgcctccgtaccacgcgtacgcgccgtccggcggggccgtcgcggaggcggtgttcgtcaacctcggccgcgaggaggactacgtcgtgctcgagaggcttggagtgggcgtgcgcggccgcgtcgcggtggcgcgccgcgggggtgggtaccgcggcggggttgtggcgcgcgctgcggacaagggagccgtcgccgtgctcatcgcgggcaacgcggacggcggcgtcgagagaggagtcgttcttctcggcggccccggcgatccgctcacccccgggtgggccgccaccagcggtgcggagcgtttgaagttcgacgataaggcagtcaagcagcggtttccgagtatcccctccatgccggtgtcggccaagacggcagcagcgatcattcgaagcctgggcggtccggccataccggcggaatggaaggacggcctcggggtggataccggtggtcttggacctggccccacgctggtcaacttcacgtatcaggaggacaggaagttttataagatacgagacatttttggtatcataaaagggcaagaggaacctgaccgatatgtgatactcggtaaccacagagatgcatggacctatggagcagttgatcctaacagcgggacagctgcacttctagacattgctcggcgtcttggaataatgctgcaatcaggatggaaaccacggaggtccatcattctttgtagttgggacggtgaagaatttgggatgattggatcaactgaatgggttgaagacaaccttgaagatctgcattccaaagctgtagcttacttgaatgttgattgtgctgtgcaaggtgtgggattttttgctggttctactccccagttggacaaactcttggttgatattacaagacaggtaagggatcctgatgtcacgggaaagatggttcatgatacatggaatgaaatgagtggcggcatcaaaatagaaaggcttgccagaactgattccgattttgctccatttctacatcatgctggaattccatctgtagacttgtactacggagaagaatttcctggttaccatactgctcttgacacttataattggatggaaaagcatggcgatccattctttcttcgtcatttggctatcacagaaatttggggactattagctcttcgattggccaatgatcctgtgttaccttttgattatcaagcttacacttcgcagttacaggagcatataaaaacattgtctgccctgacgagcaatggccatgcagtaaatttgatgaatgggtgcgtcaatgatctttctggtgcagctatggaagttctgaaggagatgaagaagtggtgtttgaaactagctgatgacgtgctcctttgtatgttcggattcaaaatccagaaactacagcagatggatttatatgatgaacacgccaggatgagaaggcgattgttgaacgatcgcctcctacttgctgaaagaagcttcctgcaacctgaagggctccaaggaagaggatggtttaagcatctgttgtactcgcctccggaggactacgaaagcaagctgtcgttcttccctgggatcgctgacgccatctcacggtccgccaatctgagtgacaaggaacaggaggtggcaatgcagcatgaagtgtggaaagtctgccgtgcgattcaaagggctgcgagtgttcttagaggtgaattcagtgagcaaaaaccgacgaattttagttctttggtgaccccatgagatgtgtttgtgcaaacaaataacaaacaatggttatttagtatctgcgcgaaatggaagtgtgatgaagaatgtgatgcttttgggcgtacactttacagcgcagcgttggggcagcagcgagtagagggccgtttacgcatgtcaaaatggaattgtgatgaag

SEQ ID NO: 2573 - DNA, 2547 bp, Zea Mays
cggaaaagctccattaacgggggtcggggcgtaaagctgcgtacggcggcacggtggtagtgatacacaccgaagcacccaggaaagcatcctggctcctgtccctcctcgccatttcacgagctcccatttcacacgctcactccgtcactcgctcgcctccgccgtcgcaaagcctgccggaaccggcgtgtgcggtcagttccggtgccgcgcagggcctgaggaatgccgcactccgtcctggcccgtctgccccccggctccgtccggctcgtagctgccttcgggctgctgctcctcgtctcgctgctcgttctccaccgccgccccgggaggccccatgtggcggcggccgccgccagcgaccgactcactgatccctcccggtcccggctgttcctgtcgcagtcccccggggccaacgcgagcatcgcggctgacctccgcgcgctcaccgcggggccgcacctcgcggggacgcctgcgtcggcgggtgcagccgcgcacgtgctcgcccgcctccgcgccgcgggactccaaaccctaacgcgcgagtacgagccgctgctctcgtaccctgggcacgcctccctcgcgctgctccggcccgacgggtccctgctcgcgcgcctgtcgctcgaggagcccgcggacgaggggcgccgcgtcgtgcctccgtaccacgcgtacgcgccgtccggcggggccgtcgcggaggcggtgttcgtcaacctcggccgcgaggaggactacgtcgtgctcgagaggcttggagtgggcgtgcgcggccgcgtcgcggtggcgcgccgcgggggtgggtaccgcggcggggttgtggcgcgcgctgcggacaagggagccgtcgccgtgctcatcgcgggcaacgcggacggcggcgtcgagagaggagtcgttcttctcggcggccccggcgatccgctcacccccgggtgggccgccaccagcggtgcggagcgtttgaagttcgacgataaggcagtcaagcagcggtttccgagtatcccctccatgccggtgtcggccaagacggcagcagcgatcattcgaagcctgggcggtccggccataccggcggaatggaaggacggcctcggggtggataccggtggtcttggacctggccccacgctggtcaacttcacgtatcaggaggacaggaagttttataagatacgagacatttttggtatcataaaagggcaagaggaacctgaccgatatgtgatactcggtaaccacagagatgcatggacctatggagcagttgatcctaacagcgggacagctgcacttctagacattgctcggcgtcttggaataatgctgcaatcaggatggaaaccacggaggtccatcattctttgtagttgggacggtgaagaatttgggatgattggatcaactgaatgggttgaagacaaccttgaagatctgcattccaaagctgtagcttacttgaatgttgattgtgctgtgcaaggtgtgggattttttgctggttctactccccagttggacaaactcttggttgatattacaagacaggtaagggatcctgatgtcacgggaaagatggttcatgatacatggaatgaaatgagtggcggcatcaaaatagaaaggcttgccagaactgattccgattttgctccatttctacatcatgctggaattccatctgtagacttgtactacggagaagtgctaatgcagaatttcctggttaccatactgctcttgacacttataattggatggaaaagcatggcgatccattctttcttcgtcatttggctatcacagaaatttggggactattagctcttcgattggccaatgatcctgtgttaccttttgattatcaagcttacacttcgcagttacaggagcatataaaaacattgtctgccctgacgagcaatggccatgcagtaaatttgatgaatgggtgcgtcaatgatctttctggtgcagctatggaagttctgaaggagatgaagaaactacagcagatggatttatatgatgaacacgccaggatgagaaggcgattgttgaacgatcgcctcctacttgctgaaagaagcttcctgcaacctgaagggctccaaggaagaggatggtttaagcatctgttgtactcgcctccggaggactacgaaagcaagctgtcgttcttccctgggatcgctgacgccatctcacggtccgccaatctgagtgacaaggaacaggaggtggcaatgcagcatgaagtgtggaaagtctgccgtgcgattcaaagggctgcgagtgttcttagaggtgaattcagtgagcaaaaaccgacgaattttagttctttggtgaccccatgagatgtgtttgtgcaaacaaataacaaacaatggttatttagtatctgcgcgaaatggaagtgtgatgaagaatgtgatgcttttgggcgtacactttacagcgcagcgttggggcagcagcgagtagagggccgtttacgcatgtcaaaatggaattgtgatgaag

SEQ ID NO: 2574 - DNA, 2805 bp, Zea Mays
cagactcttgggaaagtgtgcaaactcaggaagtcactctatggactgaagcagccaccacgtgcatgattcaaacgagccatgtgttatatggaccattatcaatgaaatggagaccgcagtcttctacaaacatcaaggctcccgtatcattattctggctgtttatgttgatgatatagtgatcactggatatgatgtgaaggagattaagaaattgaaggaaaagctaagtagagcctttgagattggataacaatatcatgccattaggtggataacatttgacgtgctcctggtttgttcatttccgggcatcatcaaaatgtcaggaccgctgaattcaaacattagtgggggcccctcgaaccttagagattccacaggaaggccatttacatcatcgttttctggtcaatctggatcacttccaggttttcatcactcaggttcacacaacattcatggaaatcttaatcttgcaaatatctctggatcattagcaccacgaaataattcaatggcaggcattccgtctgcaggggttcaacaacccagtggtggcatttccagtggccgtttccctccaaataatcttcaagcttccttgtctcagattcctcatgggcattctgggattagcaacagaggaggtatgaatgttgggggaaatcctggatttggtagtagcatgaatgctattggtggttcaatacaaggtttatcctcaaacttggctaatgtgggtaaccgcaattctgctcctgggttggcagcttctccagtcttaggaaatttaggcccaagaatagcaagttctgggaatattttgggtgggagcaatattgggagaagtataagctctggaggactgtctatgcctggtattgcatctcgcatgaatttaagtggcaactctggtagtggggctatcaacattcaaggatccaaccgtattggtatgcttcaacaagcatccccacaatttatgaacttgcttggaagttcttacccaacacctggagggtcactatctcagaatcaagtacagtcaggaagtggttctttaggatcttctggaatgctatatgaaggaagctcaggtgacaatgctccatttgatattaatgactttcctcagttaactggacgacctaattctgctggaggtggtcaaggacaatatggatcactgagaaagcatggagtaagcgtcaatgccattgtacaacaaaaccaggaattcagcattcagaatgaagattttccagctttaccaggaaataaagttcctcagattatcctatggatattcatcacaaggaccaccttcaagagaatataaatattatgcaagcacaacattatcctatggctagaccatctggctttagcttgggaagcagttatccaccccgtcaacatcagcagagtgctaattcagttcaaaatgctgggctggaaactattggactaagaccggcaaattctccaagtctgtcaactaattcaggggtttatgagcaattcatgcagaagtaccatcaaccacagactcaaaattcacttaggttgcaggcagcttcaggtcctcaacagtacaaggatcagagccaaaaatccgttcagggaacacaggctgtgccggatccatatagcttacttggactgttgagtttaataagaatgaaagagcctggaccaacaactcttgctttagggattgatttgacctcgttggggttgaatttgaactcccaagataatctttacaagacatttggctctccgtggtcaagcgagccagctgtaggagaacctgattatcagatcccagcttgtttctctgcagagccaccaccagcactgcaaaagtttcaccctttgacactattctacatcttttacagcatgcctaaagatgccgctcagttatatgctgctaatgaactatacaataaagggtggttttaccacaaagactaccgtgtttggctaacaagagctcctaattccgcacctcttgtgaaaactccacttcatgaacgagggtcctacatttgttttgatccaagcatctgggatactgttcataaggacaactttgttctccattacgaagcagtggagaagagacctgtccttccttctgctggccaaaatattaggcgagaactataaggttctcctgcatttgaagttaatttggtttgatcagtagctgttgtcatggatgggctgagttcatacaaaatgattctataagaacttatgacccccaggtggcagttgtagaaatgtagctgagatttagattttcttcataatttgttggcattatttagtagggccattgttgtaccaatgttgtgacttgatttgttgttgttgttgttgtgacgcagtcaccgtgatgataataaatgttttgaccgttatgagtcagcatgaaaatataatgagacttttgatttgagatgtatgcgcctgtttgatgattggaattttgctgaattaacatgtgcatagctacagagaatatttatgattattccttgttaaacaatgaaggcttcacagatctgtttggctgtggaattgagcttacttaaacagctggatcgaacaactctgagcagatcagataaaaggatttcagtatcagtatgattggacgcttcactacacattagcaacgtgtgggtctgaactcttaagataaagctattaaaaggagaaaattgtggttactcttgttcaatcctatcacatggaaaaggtgatttggcggttgtttggtttgaa

SEQ ID NO: 2575 - DNA, 1435 bp, Zea Mays
ttagaaaaccaattgttgccatgttgatggaagttctagttaatccgaaaacatatagtggtttttccttatgggaatctaattagtttttttacaactgcttcggtgatgcttttctaagttcaatagtttgacatgtcatactcattacaatattcgttgcagggcaagaagcaaatactggacacccatctcctcctagctgttcactcttaagtgctggaagatcttttgctggaactcaaaatgtttcaagcctgcagaaggatgaagcatggaaagtgaatgtacgcatccatggttgtgatcttgatcagggttatctatgtggaacgatggaagcgcttaatgttccattagcagatacacctgttgtgactttctgggagggggagatagtggatgctaaaaattacacatttttcactggaaagtgggaggcatcaccagaggatgatataagacattggtccaagttcccatcatttacacctcttctgggtcagattgagacagatggtggcaagtctctggactttagcaactatccttatatatttatgagatggaaagagcaatattttgtcaatgttggagtcgactgtgggttaaccatcgctggtttctactacgtctgcttttcttgtagcgatggctccatcagtggattttattatgatccaaatagcagtccatttcagaagctcgagctgaagtgtaccaatgagaaaaaatccgggttcaccttttcatcctacgagctgcagtgacaggacacagatgtcctcgacagacaactttctgttagcatatagtgtgtgtactgaactcgtactccctaatgaaaggaatgagtggtcgtttacgtaacagtttgttttctagcaagacgaagcaaactgtcactttgtaatctgcagaagcatcctgtcctttctaaaatctaccttttgtattacgtttctattccacaattgttatctgcaattggggatttctatttatgatatacacattgtgcgtggttcctgattaaatgggtcgtgaatacatgtttctgatacaaatcatggtgccaagctttactgaaggtgaaacttcatcaaggtcgctgattgctttctctcactcaagttcctggtgcaaaagctgtggagaccttcctgcagctattgtatgttttcacctgtgacagttctatatgagcaagataaacttggggcatgttcttcgcctttgccttcagcttcttgacattgcaagcggggctcgggaccggtggattatgtcttggtgatgcttccaggaacacctcagacgccctctctgaatcgccctctgtaatgtgcacgatagaacacttattaacatgcatgctccaccatagtgatgccatgctacagtttggtgtctggactgaattcagctgatgtga

SEQ ID NO: 2576 - DNA, 1450 bp, Zea Mays
gacgaagtcgaatgtgtcgtgttttataatgtcaaaaatctcagcgacgaggggcaacagttttctcgaagaagggaaggcagcctcttcctcgtcgccggcgacgtcaccctcagcggctatcagggatgccggtcagggtggtagataccgccacgccttcctcccagccctccccagggcaagaagcaaatactggacacccatctcctcctagctgttcactcttaagtgctggaagatcttttgctggaactcaaaatgtttcaagcctgcagaaggatgaagcatggaaagtgaatgtacgcatccatggttgtgatcttgatcagggttatctatgtggaacgatggaagcgcttaatgttccattagcagatacacctgttgtgactttctgggagggggagatagtggatgctaaaaattacacatttttcactggaaagtgggaggcatcaccagaggatgatataagacattggtccaagttcccatcatttacacctcttctgggtcagattgagacagatggtggcaagtctctggactttagcaactatccttatatatttatgagatggaaagagcaatattttgtcaatgttggagtcgactgtgggttaaccatcgctggtttctactacgtctgcttttcttgtagcgatggctccatcagtggattttattatgatccaaatagcagtccatttcagaagctcgagctgaagtgtaccaatgagaaaaaatccgggttcaccttttcatcctacgagctgcagtgacaggacacagatgtcctcgacagacaactttctgttagcatatagtgtgtgtactgaactcgtactccctaatgaaaggaatgagtggtcgtttacgtaacagtttgttttctagcaagacgaagcaaactgtcactttgtaatctgcagaagcatcctgtcctttctaaaatctaccttttgtattacgtttctattccacaattgttatctgcaattggggatttctatttatgatatacacattgtgcgtggttcctgattaaatgggtcgtgaatacatgtttctgatacaaatcatggtgccaagctttactgaaggtgaaacttcatcaaggtcgctgattgctttctctcactcaagttcctggtgcaaaagctgtggagaccttcctgcagctattgtatgttttcacctgtgacagttctatatgagcaagataaacttggggcatgttcttcgcctttgccttcagcttcttgacattgcaagcggggctcgggaccggtggattatgtcttggtgatgcttccaggaacacctcagacgccctctctgaatcgccctctgtaatgtgcacgatagaacacttattaacatgcatgctccaccatagtgatgccatgctacagtttggtgtctggactgaattcagctgatgtga

SEQ ID NO: 2577 - DNA, 767 bp, Zea Mays
gttccctttctccatcgcttcctccaccatctcaccgatcccttgctgcgatcgccctgtcagtaggcgaaggatggtgacgccgaacgagttcacgtcggaccacagcatgagctccgctgccgacttgaatccaccgccctgctccgtgtagcggagtgttcccttactacggtctgctgctgaagggcggcttcgcaggctggtggccgttatgtcgtcttcaccaccacctagaagaaggcagcagatgcccaagcctcccagcttgctgacgaaattggcgtcaaggaggatgtttcccaggttcagatcgccgtgaacgatcggatatggcttgtgtgagtggatgaaggccaaggctgagcatatctccccgacgatccttgtgcgcgccttccatgtcagaggcggcatgcttttcttgcacgagagccaatcctcgagactgccgtttgggaggaattcggacaccagcgcgaagtcgtcgggacatactcctaccagcgtgacaatgttaggatgcctcaccctactgaggacagcaacctgcaggagcgagtgagtagtgatgtcactgctcgttcgaaaaagggggcggtaagaacttgaaggtctttaatctgcacgagcaatcaccacttccatgaccacctgtgatttgtattaaggaccaatggtgcagaaaaggaagaagaaaacataccctttgaaggtccatttcagctttccggattttgttagattcatcatcatcagcttcatcc

SEQ ID NO: 2578 - DNA, 1212 bp, Zea Mays
gttccctttctccatcgcttcctccaccatctcaccgatcccttgctgcgatcgccctgtcagtaggcgaaggatggtgacgccgaacgagttcacgtcggaccacagcatgagctccgctgccgacttgaatccaccgccctgctccgtgtagcggagtgttcccttactacggtctgctgctgaagggcggcttcgcaggctggtggccgttatgtcgtcttcaccaccacctagaagaaggcagcagatgcccaagcctcccagcttgctgacgaaattggcgtcaaggaggatgtttcccaggttcagatcgccgtgaacgatcggatatggcttgtgtgagtggatgaaggccaaggctgagcatatctccccgacgatccttgtgcgcgccttccatgtcagaggcggcatgcttttcttgcacgagagccaatcctcgagactgccgtttgggaggaattcggacaccagcgcgaagtcgtcgggacatactcctaccagcgtgacaatgttaggatgcctcaccctactgaggacagcaacctgcaggagcgagtgagtagtgatgtcactgctcgttcgaaaaagggggcggtaagaacttgaaggtctttaatctgcacgagcaatcaccacttccatgaccacctgtgatttgtattaaggaccaatggtgcagaaaaggaagaagaaaacataccctttgaagcggcgcgttgcttttttcaggtgatgcaagtatggcaggaaggctttcatttgcttccctggggagagttcttgtttaatgacacagtagattgggttcccagctgaaatggaatgtactattcgtagatatatagaagtctggaagtgctaaaaatttctggtgtcagctggacctcgccctttacctggtacatatcaaatgacctttacaagtaaaccacatcttgcatgatggagctgctgtcttgaaaagcttgagcgctgtcatcgactttggcgtgttcatttctctacagtttgagagcatctgttagaatgcgcgattgcaaggtcctcaagtgtgagagagtatggtgacgttctggttaatcattcagaatcatggaagtaagatgtgcatccaatttaaggaagtagagcgattttgttagtctgatccgtacctagagaagtgtcggtctgcagctgctcccatgacaaactcagttacgttat

SEQ ID NO: 2579 - DNA, 1451 bp, Zea Mays
cgagttgactttcaggcctgcgctgcacccacactcacaaccaagcggcggagagagagagtgtgtgtgtgtgtgacagagagggagctgtcttgagctgtgtataaaatcccccccacttcatctgcatgcctggcgcgagaggcaccagccacagcccacagttcccccatttcatttgtgtggtagccgaggactgggagggacctactcaaccttttttttttgtgtgtgtgaaagatcgagagcgccgctcaacgaatagagcggtttctctgccttgtgtctttcctctgtcctgtggtctgcggtggccgcagctgcggcgcgcggtgatggagttcacatctaaaaagacggcttcgcttgccctcctctgcctcaagctctcctgcctcctcctccttcttcttcttccccggtcttcctctgctgcgcctctgtccagaagcctgtcgctgacgaggaaccgcctgcagcccgcggatgaccctgctccggaggttcccgctcccgcccagcaggtcggtcgcgctcgctcgctcgctcgatctctttctcgtcctgcggcttggtagatttcgtcgcgtatccacaccacaacaactgcgcacaaaaagcttgtgcttgggggcaggggcactccactcacatgcactgttagctgggcatgcagggctgcaggccggccatagtgcaggtcacatgcatggccactcgcacacacagttgcaaacttgcaattcgcgtgccccaccccactcacgacacctttcccgccacaaaggcaaaaataaaggtttgtgcgtgcaacaacacaatcgtgtcaactttactacttgcacgctagctgtccgtcagttgactgctcgtcgatgtcatcatcaagtctttttgtaaatatctgacgcacacgcacgcactactaccaataacgaacccagctaatctttaaatttgtctgtgtacgtcgtcgtctctgtgtactatacagggtgcgggtgctggtgctgctgctgctgctgtcttgagagttttataagtagcgaagcgaaggagagtacattgcttgttgttagctatagaggtcaagggagagccttatcgtgtatttaattagcttgttaattattgctgcgtactccttgttaagagtcttcaacttaacggcggatcggatctgcttgagctagctactagcttttgctatctctgatctagaacaaaagcatcagttagtaacgtagcatcgtcaacagctatagtactcttgagatatttacttgagtcacattcgcctgcagaagactcgaccgagacctcctctgtcctctagtgtgtgccggtttcgcgcgcgccaatacgatgctcaagctcaagtgttaaagggtgtaacctgatgcgacgatggctatctcactgtctgcactgcccagcagagggggccagca

SEQ ID NO: 2580 - DNA, 3113 bp, Zea Mays
ggaaacgcaataaggagatccctccctgctgcttctctgtacgcgttacccccaaacccctcagccatcttggcgccctgcggatggagggcggcagcggcgctgcgcacaggccgtgggatacggcgtcgcagctgcagtacagcttcaggacgtccgtgagcagcctcagcgaggtggaggaggaggaggcgagcccgccaccggtggcggtggaggacagggtcttcgtggccgtccccgaggacgccaagaacggcaagagcaccctgctgtgggcgctggagaacccagccaaggactgcgccggggttgtcgtcgcccacgtccactgccccgcgcagatgatccccatgagtaaggttccattccgtcgcagatggcggggatgctgctgctgccgtctttgcatcctcggagcttcttgtgcaaaaggaaacgctttgggcgttgacatgactctatgtctctgtttcattttttgttgttgtgctattgccggtatggggaaaaactgtggcaaatactgaaagcgctctttacaccttaataggtttctatagaacctagttcatgatgcactgccttgagggttcagagttgacaggacttactctgttctttccagtgggggcaaaagttcatcacagcacggtgaatccacaacgggtcaacgaatacaggaagaaggtgcgagcggaggtggaggagaaactagatgaatacgtccttgtgtgcagaagacaaaaggtcagctgccagaaagttgtaatcgaaatggatgatgctgtacgagggcttgagcagctcatcactctccatggcgtcgctaagcttgttatgggagcagcagcagacaaacactactccaagaaaatgaaatcactgaaatccaagacggcgctcagactgacggaggtggcggccccatcgtgtaagatatggtttacctgtaaagggcgtctcatatgcaccagggaagcgaacacaactgttcccgccatgccaccaccatcacctgcactcacgagcgcatcaagatcatcagtaagcagcgttgctagccagctgagatcaatgttactcagtcgctcagagagtgacgggtcaagctcgaacggaagtccaaggcatgacctgaccaggtcgcgaacagaggcggggctgctgctgtatccctctcacgaaaccgtcaacatcggtacgccgtctcggctctatgaatcctacggcaggaggccgcctacgacagcatcagtgagttccagcgattcctggaacgaattcgggaggagatcgcagaactcgtggcacgatgatctatcgagaaacgacggtgcggccaccactactgtcgtcgtctccggatcagcgatgcaagaacctgacgacgagaacttctcgtccccttctcatgagctggaaaacccgggcgtcgatgctaacatatacagaagactcacggaggctctgagtgaagctgagcgctgcaggaaagaggcataccaagagtcggccaaacgcctgagagctgaactagacatggcttcggctcttgagaatgtaaacgagctgtatcagcacgaggtaaggcagcgcaaagcgatcgaggaaacgctggcgagacaagcgcaggagatggaggaaatgaagagacagcacggtgtggcatccaaggagctgcacgacgtcaaggagcagagactcgtcctggagcggcaagtaacagagatggcgtctgctgtccaaggctacgaagagaaggtggcagctgctgaaacgctgaacaccgccgagttctcctattctgagctggaacaagcgacccaaggctttgacgaggggctcaagatcggcgagggtggcttcggaagcgtctacagaggcttcctccgcaacacagccgtcgctgtgaagctgctggatccggaaagcatgcaaggcccgtcagagttcaaccaagaggttgctgttctcggtagagtgcggcatccaaacctcgtgacactgataggggcgtgccgggaggcgctcggcctggtgtacgagtacctccccaacgggagcctggaggaccggctggcgtgcaccaacgacacgccgccgctgacatggcaggtgcgcaccaggatcatctgcgagatgtgctcggcgctcatcttcctccactcgaacaggccgcacccggtagtgcacggcgacctcaagccgggcaacatcctgctggacgccaacctggtgagcaaactaggggacttcggcatctgccgcctgctgatgatgagccagtccaccaccactaccaccatgcccgtcgccaccacgaagctgcacaggacgaccaccccgaaggggaccttcgcgtacatggacccggagttcctgtccaccggcgagctcaccccgcggtccgacgtgtactcgctcggcatcatcatcctgcggctgctcacggggcggccgcccaagagcatcgcggaggtggtggaggacgcgctggagcgggggcagctgcacgccgtcctcgacgccgccgcgggggactggccgttcgtgcaggccaaccagctggcgcacatcggcctgcgctgcgcggagatgagccggcgccgccggcctgacctcgcgggggaggtgtggaaggtggtggcgcccctcacgatggccgccgccgggcggcctctgccgttcgcgccgtcgccgctggatgacgcccgcgcgccgtcctacttcgtctgcccgatcttccaggaggtgatgagcgatccccgcatcgccgcggacgggttcacgtacgaggccgaggcgatcacggggtggttcgacagcggccgcgacacgtcgccgatgaccaatctcaagctcgagcactgcgagctcacgccgaacagggcgctccgctccgcgattctcgagtggcggcagcagcagcagcggagataaccatttacgtaccgaagaaagcatgcgatctccgtggctgatgctaacaatctaatttcaactgcacatatgtagcgtttgtaatttgtattccattggtcaaaatttgtttaaattagaaagaaaaataaaagggaaatttcttagtgttgtgcaccggtagaaaagag

SEQ ID NO: 2581 - DNA, 1886 bp, Zea Mays
acatattcgttccttgccgcatgcatgcagatcgatggacggccttagctcccactatactactccatatataatgccctgctccttcctcacgagctagctcaccggccgctcagcatggacagctactatttgtactggcaggggaagtggtattggtggtcggggtactggaacgatcctaacgatagtacgcatgcggcggcagacgttacccagcagttaatatagttatattaactaatgcctccttcaactatgcgttgggcatgggagcattagccgaaccacctcaggacagctctgccgacggtgtgatcttgatcaaggatatggcggagtggcaaaagcactgggaccagactgctccatacaacaagctgctggtgtatgagttctacgaaaagaattcctcgctgtgcaaggccatggacaagccgttcgagaagctcgccacgcagtacaaaggcagggccgacttctgcaagctggacgtggacaactttgagcttttggcgcggatttgcggagtggagggagcgtatccgacgttcgtgctgttcaagaaatgcgcgcaggtgggcaaggtcgttggcctcaaggaggacgacctcgagcggatcgtccagcgagcgataataagctagggcgtgttcggctggctacaagccgacactgttgcagctgtttggattgctgcagctgcaatccatagagagaaaaatactgtagaagccgcagccgcagccggattgcagccgcagcaagccgcagcgaacaagctgctagctaggagtagtcgtcaactcgtcatgtagtaccacacagactcagttttcgtacgtgtgccaagacaaaactacaaaaggacatgactatgcgtacgcatcgatcggcacagtggcggatctacaccctctgtggctggggcttgatccatgtatctttatataagtctctatttaatacgatataaaatagttaagataaaatgaagatgagaaaatttggtagatttagtccggatcataaaaaaattctggatccatccctggatcggcatgctaccaaaaatatgtacgataaagcgtacgtggtacatatatatggtcggtctatcgtcgacctagctaggattttagtagagacataactattaaaagaaattcgtgaataaatttagtacttccaccaactagtcaaagttgttaattagtctttgcacgcgtactgccacactatttgtttcctgacacgtctcatgtatcaagtcttaactagatatactcctctgtaaattatggggatatctgcctgtcatgaatttatcagatattctataccttttctttctatctattctatatctatataatttcccccttagcgtcataacttcacgtgtcatcaatatatgtttcgttcataccttagattatatgctccttatggtgctcctcctacgttccctcccacctatggtgctcctcccacatgtggtacccctgctccttctcgtgctcccttaaaaacagtagtgctaccaagtagccagaatgatgcagactccaactagtccacgttctctggtgcatcatagtttcaatggcgacgggcctggactaagatggaggatcaaaggcttgtaaatacgcgtacacttttatgaattccatactttttgaaagtacaaaatattttttgagtttgtacaactgtaggtgcacgcgttgttaatgcattacattgacccgttgacggcaacaacaaaaaggattgatcttttggggttaaatagcggctatgtacaactctactatagagcctccttgttaccgtactgtcaagtagatcaaggatcgatggtcaggccaagcagatcatat

SEQ ID NO: 2582 - DNA, 1960 bp, Zea Mays
aagtcaaaatctctactaattttttccaatctcatctaatccatgtgatataggaataaccgaacaaaaccttagcggacagggatgggagcaatttaatctccacggggattgaaacagcaaaaagttagtccctgttaaatatatattggacggatgatatttatgtttggaaccaagcttgtatcattattcagtttgtgttcttgaatgtctggatcacagtcattgataaatgacttgtcagcatttcacctgcacaggtcaccttgatcagcattttaaaagttccaatttcttcattcagctgtactgctgcctgcttgcgagaagtgagctagttcttggtcactggaatgcccttcagcgtcagtaaatagtcacctattctcgttactgctgtaggttccaacgatgattcaggcggtttgttccacttatattggctttcaaggcttgctggctaacggaacaatattcccgaagtatcgcaatgccttcatcgcaactccttgagtgatcccatcattctaaagatatatgtaagaattggaagttcaaaattggtccgcctagaatttctgtgcatcttagagcatctccaagaggggtcttattaaacaaggttgtatattgaaatatagggcttgggacctaagagcaactccagtagttctctaaaagacttcctaaatcaataatttaggtagttaacatgaaaactattctccaacagttctctaaatgaactttctaaatttaacaacttgtcatctaacctcattttctctctacatttggcaaccatttaacaactccctaaacaaaaatgttgactgcattatatagtttttgtgacttattttttatgtggataaatacaaaacaaaattacaacctatatttagagaactattggagaactcatatttttttactctaaaagtcatttagcaacttcttaaatctgtaatttagagagctaaaatttacataactattggagttgctctaagcggtgaccctatttcatcaaaatttatcaaatgattatagggtttggcatctgaggttctaaatatagtatcacatatattgaagtcctatccttattttctcttaatctacaactatttattttcttagatagcattatttgaggccaaactgttggagtaaatttcttttgaggcactaaacactttaataatggttctatttcaattctaaggcgctattttagagttctttgttagagatgctccatgtaaaacttactccctttggtgtcctattagttgttgttttggataaggtttgagtcaaacttataaaattttgactataaataattttttgttgtttatttttgaaatctaatatttatatgcatcgatttatattaaaaagtattttttttataaaagtataaatgaattaagagtttatttgtatatttttttaaatatttgtcaaagttatattttggagaccgtctaaacgacaactaatagaacaccgaagtgagtaatctttagccaagcgtgttgctttttttacttgcagggagcagacaatgctaagcctcgtggtcacggtgtgtttcgattcgactggctacaggtgttcggacggctacaaatgcaatacataaagataaaatactaaaatagttatagccgcagtcggattaagccacagtcaggattaaaaccgtagtaaacagccatggttgagcgcttgggaaggacatcatccgcttggaatcttcaggtctttgaagtagcgaagtttgacggcaaagaaactacctggactagccactgtaaggtgtagatggatattacttgttttgtttctatattttctctccggattcggatataaatataaatattatcgagttttggcggttcgagtgactattgatattttatatatttactagtcagttgctcgt

SEQ ID NO: 2583 - DNA, 2769 bp, Zea Mays
gcctttcctcctcttcgtcacccaccgccgacggctagccatgtccgccgagcccacctctccgcctctatcgacggcgcaggtccgcgggagcctcatcccgccgcttccagacgacttggctgtccactgcatcgctctcttgccgcgcgccgcgcacccatccctggccctcgtctcccgcgctttccacgccctcctgtgccgccacccggagccgctcctcgccgcgcgccgcaccctccgctgctccgaaccccacgtcctcctctccctccgcccaccctcctccgcgtcccctatcttcttcctcctgctcccgcaccccgggtggcccccgctcccgcttccctcccctcccgtccccgtctcgtcctccgcgtcggccgccaccgacggcgcccggctcttcctcgtcggcggatccgtatccgcggtcccctctgcgtccgtgcagatcctggacccccgggccagatcctggtccgccggcccgcgcctgtcctctacgcgggagttcgccgcggccgtcgcgcactccggggcgctgttcgtcgccggcggctgcatcccctcgtcccctttctgggccgaggctctcgacctctccactccgaacgccaagtggagagccgtcgccagcccggcccacctccgcgagaagtggatgcacggctgcgcgtcgctcgacgggaaggtcgttgtggtggcggaccgtggcggcttgtcctacgatccttcggcgccacctgcggaggcgtgggcaccggtgtcgccggtgcttgacatgggatggaagggccgagctgcagtggttgagggaatcctctactcttacgattacctgggacaggtcaaggggtatgatccgtacactgattcttggagcacagtggaggggttggagggggagctacctaagttcttgtgcggcgccacacttgccgatgttggaggattgctctacttggtttgggaaggaaagtggaaagggaaattaaaaggtaagatggaaatgaggagcatggtagtgattgaatgggccagcattcagattacaagggtccaagagggacggctaagaggaaaggttgtctctagggacactgttctgttcccggatatgccaagaggttcaacgatcacacattgcattgcattggagttgtgatgcagcagatgcagatgtaaagcaggttccaacgatgattcaggcggtttgttccacttatattggctttcaaggcttgctggctaacgtatgtcactgaattgcaggaacaatattcccgaagtatcgcaatgccttcatcgcaactccttgagtgatcccatcattctaaagatatatgtaagaattggaagttcaaaattggtccgcctagaatttctgtgcatcttagagcatctccaagaggggtcttattaaacaaggttgtatattgaaatatagggcttgggacctaagagcaactccagtagttctctaaaagacttcctaaatcaataatttaggtagttaacatgaaaactattctccaacagttctctaaatgaactttctaaatttaacaacttgtcatctaacctcattttctctctacatttggcaaccatttaacaactccctaaacaaaaatgttgactgcattatatagtttttgtgacttattttttatgtggataaatacaaaacaaaattacaacctatatttagagaactattggagaactcatatttttttactctaaaagtcatttagcaacttcttaaatctgtaatttagagagctaaaatttacataactattggagttgctctaagcggtgaccctatttcatcaaaatttatcaaatgattatagggtttggcatctgaggttctaaatatagtatcacatatattgaagtcctatccttattttctcttaatctacaactatttattttcttagatagcattatttgaggccaaactgttggagtaaatttcttttgaggcactaaacactttaataatggttctatttcaattctaaggcgctattttagagttctttgttagagatgctccatgtaaaacttactccctttggtgtcctattagttgttgttttggataaggtttgagtcaaacttataaaattttgactataaataattttttgttgtttatttttgaaatctaatatttatatgcatcgatttatattaaaaagtattttttttataaaagtataaatgaattaagagtttatttgtatatttttttaaatatttgtcaaagttatattttggagaccgtctaaacgacaactaatagaacaccgaagtgagtaatctttagccaagcgtgttgctttttttacttgcagggagcagacaatgctaagcctcgtggtcacggtgtgtttcgattcgactggctacaggtgttcggacggctacaaatgcaatacataaagataaaatactaaaatagttatagccgcagtcggattaagccacagtcaggattaaaaccgtagtaaacagccatggttgagcgcttgggaaggacatcatccgcttggaatcttcaggtctttgaagtagcgaagtttgacggcaaagaaactacctggactagccactgtaaggtgtagatggatattacttgttttgtttctatattttctctccggattcggatataaatataaatattatcgagttttggcggttcgagtgactattgatattttatatatttactagtcagttgctcgt

SEQ ID NO: 2584 - DNA, 1329 bp, Zea Mays
tttttttctctcctcgtggtcgccagcactgccgtgccgagccggaggccgagctcggcagctgcccgcctcggtgtgtcgccgccgcaccccacccacgtagcaaaagccgtcttcccgtaccgtaggcagcggcaaacagcgccccctcatcactcggtctcgttccctcctctccaacttcactcgcgtcgcgcccctccactgcaccagcgtcatggcggtggcctcgacctcgccgctgtccgccaagcccgccacggccccttcgccgcccgctcccggatccgggctcctcgctctcggcgttcgccgcgcccccgccactgccgcgtggaggaggctccgcgtggaggcgatcaggacgcagcgaacggaggtgcccgtcgaggagtccgcccccgccagggacgccgccgctgccgcgcccctggacggaaacggagccggagcggacggctccgtggttccttcctcggacgacagctgggttgtcaagctcgagcagtcgttcaacattttcgccacggattcggtgattatggtactcaagggcgtgtacggtgatcggtactacgccaggttctttgcgctggagacgattgcgagggtgccgtacttcgcattcatatcggtgcttcacttgtatgcgacctttggatggtggagacgagctgattacataaaggttcactttgcgcagagctggaacgagttccatcacctcttgatcatggaagaattgggtggcgactctttgtggtttgactgttttcttgctcggtttatggcattcttttactacttcatgactgttgcaatgtacatgctgagcccacgaatggcatatcacttttccgaatgtgtggagagacatgcatattccacctatgatgagttcctcaagctccatgaagaggaattgaaaagactaccagctccagaggcagcattgaactattacatgaatgaggacctttacttattcgatgagtttcaggcatcaagaactccaggttctaggaggcctaaaatagataacttatacgatgtattcgttaatatacgagaagatgaggcagagcactgcaagacaatgaagacctgtcaaacacatggaaatcttcgttctcctcattcaacgccgaactgcttagaagatgatacggaatgtgtaatacctgaaaacgactgtgaaggtgtcgtagtatacaaagtataaaattttgatgatatcctctcttttttctatgtctcattcaaagtaaaatccaggtcatatatcacagaaaccaatttaaatgcaggatcaaatatctgctccctcca

SEQ ID NO: 2585 - DNA, 6238 bp, Zea Mays
cggcacactggctgggctggactccgagacaccgaaaccagaacaacccgatctcaacccactctgctttgccattccgctcacgagctctccgcctctctctctctctctctctcgctcttttccgccaccccgtcacgccaaatttcgaaacagcgcgagagcagcaaaagccgagggagcccttctttctcagattagaacctaacgagtgcgcttggaggcggaggctgcgagcttgctgcgcgaatttgggcggtcgatccggcgcggcggccgggtatggcggccgcggagcagctgaaggagctgggggagaagctgcaggcggtggcgccggctcctgcggacgaactcgccaagctcctcgagaaagctgtggaatgcttacgtggaatagagcaatcaccggggtcctcagtgatggaagctattcaaccaagtcttaaggctgttaccagagaagaattgctgaagcatgaggatgacaatgtcaaagttctcttggcaacatgtttctgtgaaattacaagaataactgcacctgatgctccctacaacgatgacattttaagggatatattctatctgattgtgggtacatttggcggactcagtgatgttaatagtcaatcctttggcaggagagttgctattcttgaaacagttgctagataccgagcatgtgttgtgatgttagatcttgaatgtgatgatcttattacaaacatgtttcaaacatttttaggagttgtcagcgacagtcatgaagaaaacattgtaaagtcaatgcaggcaataatgatccttattatagatgagagtgaagatgtacaggagagtcttctacgtgtactgctgtcagcattggggcagaaaaaaactggtgctgcaatgtctgctcgtaaacttgctcgcagtgtcattgagcattccgctacaaagcttgaaccttacataaagaagtttctaacgtcatcatgggctgggaatggcagttcttctaatgatcaaattgatcaccagggagttgtatttgatttatatcagtgtgctccgaaggttcttaaggcgatcgtgccgtatattactggggagctactggcagatgaagtagataacaggtctaagtcagttgaattacttggggaaattttttccttacctggagcctctattgtggaatgtttcaagactcttttcacagaattcctcaagagactgactgatagagttgttgaaatccgtatttctgtggttgagtatttgaagagatgtctaatatcaaatccttccagagctgaagctcctgaaatcatcaaggcactttgtgacagattgttggattatgaagaaaatgtgcggaagggagtggtggctgcactttgtgatgtagctacccattctccttatgctattccaattgatacaattaaagtagtagcagagcgtgtccgcgataaatcgcaggctgtgaagtgctataccatggagaggttggcagatatttacaagctgtactgccagagggattctgatagctcaacaaattctgatgattttgagtggatacctggaaaaatattaagatgtctttatgacaaagagtttaggccagagtcaatcgactctattttgagtggttcattgttctcaccagagtaccaaatgaagggaagagtgaaacattggattacagctgcgacatacttcgataaagttgagatgaaagcccttgaacaaattctcctgcacaagcaaagactgcaacaagaaatgctgaaatacatatcgcttcgggaaccaagccaggaagatgcccctgatctgcaaaaaagaatctttggatgtttccggaacatctctcgcttatttagtgactccgcgaagtgcgaggagaacttgaacatgcttcatcagctaaaagatgccgatttctggaaaatattcactagcctgcttaattgttcaactacatttgagaaggcttggtctcttcgggcagagttgcttaagatacttggtgaaaaccatgtgctttataattttgttggcacattaacaatgagatgttcatatttacttgtaaacaaggagtatgcaaaagagatccttgcagaagcttctgcacagaagacttctgggaatacaaaactcatctcatcgtgcatgaatcttctaacggcaatatctagtttctttccatctcttttggctggacttgaagaagacattgttgaactcctgaaagaggataatgaagtgcttaaagagggtattgcacatgtgttatcaaaggctggtgtcaatattcgtgaacagttagcctcaacaagttcccttgatcttctattagagcgtttatgcttagagggtacgcggaggcaggctaaatactctgttcatgcacttgctgccattacaaaagatgatggtcttatgtcactatctgttctttacaagaggcttgtggatttgttggaagagaagaaagtgaatataccatctatcttgcaatctttgggttgtatagcccaaatagcgatgccgatttttgaaacacggaaagaagagatattaagtttcataattaaaaaaattcttgactgcaatgatgatatggttcaaaattcttctaataaatctgaatggggtgatagtacacataattgtttgctgaagatttatggcatcaaaactttggtgaagagctatataccttgcaaggatgctcatgcacagccaggaatagagaagttaattgatattctgaagaatattcttacctatggtgatatatctccaaatatggtctcaagtgctgctgataaggcccatttgaggcttgcagcagcaaaagctgttctccgcttatcaaaacaatgggaccataaagtgcctgttgatgtattttatttgactttgaggatttcacaggacgattttcctcaggtgaggaaattatttctttgtaaagtacttcaatatatcaaggaaagggccttggatgcaaaatatgcttgcgccttcatgtttggtgttaacgattatcatggcccacagttagaagagttcaagtacaatctgactgaagtggttcagatatgccaacaagttaagatgcgccaactttcagtccaagcagatatgaatttgttgacggcttacccagaatatataatttcctttttggttcatgcccttgctcatgatccttcatccccggacattgaagaacatgaaaatgtcaaagcatttggtccaacttactggcgactttacctgattctttcaatcctcctgggggaagaaggtttgcaacatagtgttccaggcatgaaaaaggatagcttcactacaataatatctatattcaaaagtatcaaatcttcacaggatgtggttgatggaaataagaacaagactctgtgggctatatgtgatcttggtactcttattgcaaagaggctatgccaagaccaaacgagtttatcagaagctcaaaccgttccattgcctccccaactttatgcaccgcttcaggataaccaaaatgaaaattctgtggagagttatgggcagatttggccgggatgtgagaaagtactggctcattttgaggctgtaatgactgcaaacatggataaggttgaatctcccaaacataagatgcttattgatatgactgatgaatttggaaatgaagttcctcttgggaaaattgtcaaacttcttaaattgcgaggagaaaagaaggcggagaaaaagcagaaggcaccatctagtagttcagtaaatgccgagaacgatgatgatgtcctgggtttagtaagagaaattaacttgagcaaccaagaagatttggaggaattgcaaaagggcaagcctaagaagcgccagacagatacaaaaaatagtaacaagaagccacttgatttttcttcacctaaacgcaaaagatcaatttctaagagtagaccacattcagcaaaaggtagtaaaaacagtgatgaccgtctaatacatactcctaacacagagaggaccagtatctccttggaaactaaattgaaggagaaaaacagagatgattcaatcgatacggaactgttagtatctcccagcattagaacccctgtatctaaaggaaataagggtgctaagagatctcatattgatattttgagcagtgttccaaagagagtactaagagaactgttgagccgagaagtctaaatgggtcactcaaaagtcaaaagtcaaaaccgatttctgggttagtacagtgctcaacacaggactcaagcggtaccgacttggtaggacaccgaataaaagtttggtggcctttggataagcgattttatgaaggtactgttcaatcatacgattcatccaagaaaaaacatacggtgctatatgatgacggagatgttgaagtgcttatattggctaaagagaagtggatattgattgaaagtaatgattcatcagtgaagaagcaaaagaaggatcttgggacaaaccaaggaagagcatgggagggaactagcagcaacaagtctccgcctagccaaccaaagtcaaaaaagaggtccttgcctccaaagaagaaagggcaacccaatgataagcgaagaaagactgcagaaagaaacaattctgtagaagaggagggtattggagctggtgacaatgattcagattcatccagtcctcttgcgcactcagatgttgacaaagatgtaaactctgttggccacatggaggaagtaatagttagcttagctgagaaagagaagaccaggaaggactccaaaggcatggaaatgaaagagaagggagggaaggactccaaagacgtgaaaataaaagagaaggctgggaaggagtccaaagacgtggaaatgaaagagaagatagggaaggagtccaaagatgtaaaaatcaaagaaaaggcagggaaagaatccaaagatgcggaagtgaaagagaagacagggaaggactccaaagacgtggaaacgaaagacaaggcagagaaagactccaaggacgtggaaatggaagaggaggcagggaagcactccaaagacgtgaatatgaaagagaaggcagggaaggagtccaaagatgtggaaatgaaagagaagacagggaaggaatccaaatatgcaaaaatgaaagagaaggcagggaaagaatccaaagatctggaagtgaaagagaaggcagggaaggactccaaagacgtggaattgaaacatgaggcagggaaggactccaaagacgtgaaaatgaaagagaaggcagggaaggagtccaaagactcggaaatgaaagagaagatagggaaggagtccaaagatgtaaaaatgaaagataagtcagtgaaagaatccaaagatgtggaaatgaaagagaagcccgggaaggactcaaaagatgtaaaaacgaaagagaaggcagggaaagagtccaaagacctggaagtgaaaggggaggcagggaaagaatccaaacatggcgaagcgaagaagccagggaaggactcaaaagatgtaaaaacgaaagagaatgcggcaggcaaagagtcgaaagacgcggaagtgaaagaaaaggcagtcaaggacccaaaagatgtggaaatggaagggatggcaggaaaggagcccaaagatgtggaaaagctggatggccatactttgagcaacgaggaatcagacaacgatactcttagcgtgtggaaaaaacgtacagcaaaagcaacatagtcttgctttctcagctgaccattcatagtaggatttgcagatttcacaggcaggcaaacgttcggagatgtggatatctcattgattgaccctttgcaatttgacagttgtactgtagaaaatgtttgtttggatagcaacacgttagtatacaacagtggaataggatttgtttgtaatgttattagatgcgggcacctgttgcccattaagctatggcatggtatccctggtttcttgtatatcttggagagcgtcagctcttttgcaggacatagtgctatgccgtcgaactcttgtagaaatgttgtaggcaataaaccagtgacacttgtcgaactacctgtgggcatccatttttcgtttgccatattactttggatctagaatctgacgctggaggtttagtatttgtactcggtatggtttctgtttagagttttggcataattaccgcacaagtt

SEQ ID NO: 2586 - DNA, 2768 bp, Zea Mays
aagattttgaaaacctgcggaacaaattaataaacgaaccagtagaagccaaacgaaatctttgtatttcatacacttagcttttcccctcctttttcaaaaaaaaaaaccctctcccccaactccacctgcttcgttcgcttcccttcatccccactccaccaaaccctcgcgtcgctgggactgggagcagagtagagcacagcggagcagattagcagaaggtgtcgagtggaagcaaatggccaatgagtggccgcggtggtggtagcatcctcctcgccttttctccccgtctcccgcgttctggttgttgcagcgagcgggagcgggaggacacgtgctacccccgtcgcttctcgggcacgcctccctcactcggatctgggccgcgcgcgcgagatcctgagctccgggttggagagctcccgtgctccagctcaggtgacgtcgatggagcccgcggtggctacagcgggtgaagggcagcggttcaagcggattccgcggcaggcgtggtcggggaacctcgaactgggtcctctgcttaatgaaagcttagatcactggccacatctaaatgagctggtacagtgctacaaggctgattttgtgaaggatgactgcaaatatggacactatgagagtgttgcatcaccgtctttccaaaatcaaatttttgagggacctgatactgacatagaaacagaattgcagctttgcaatgcaaggcattccaagtctgaggatgctactgaagatgatacaccaagcacctcagggaggcaaatatatgaaactgaatcatctggttcgtcttcaaaagtgcactgtagtttgtcaccattgccagcatatgaggctgcatttgattgggagaatgagaggtctttgatatttggccaaagggtgccagaaagtatacctgcaataagcaacagtggcttgaagataactgtcaaggtactatctttgtcattccaagctggattagtcgaacctttcagtggaacgatttgcttgtataacagagatagaagagagaggctgtcagaggacttctatttccatatgcttccaacagatatgcaggttgaccagggttccttggatcgtcgaggtgttttttcattggacgcaccttctccatcggtctgccttttgattcaattggaaaaggctgctactgaagaagggggagtaacaccttctgtttattctcgtaaagagcctgtgcacttagctgagaaagagaagcaaaagctgcaagtatggtctcgaatcatgccttataaagagtcatttgcatgggccatgattcctctgtttgaaagtaaccgtgcgggtggtcttagtgatgctgcttctcctagcagtcctctagcaccgagtttatcaggatcaagttctcaagatagtattgtggaccctatttcgaagcttgctttagatggaaaagtcaaccattactcaagtggaagctcagttattgtagagatatcaaacctaaacaaagtgaaggaaagctatatagaggactccctccaagacccaaaacggaaagtacataaaccagtgaaaggtgttttgagattagaagtggaaaaacttcatgatgaccataatgatgtggataacgcttctgaaggtggaagcatggccaatgatttgaatgatgctggtgacatcaataatggcagaagcaacagaagtagctttgatgggattcacagttctgtgaattctattgccattgccaaaaaagatgctcatcacaatggacacacttctaatgctgagaatgttgacaattttcaagcttttgactttcgggtgctgacccgaagtgagccattttcgcaactttttcattgcctctatgtgtacccattgactgttagcttgagccgcaaaagaaacctctttgttagagtggaactgagaaaggacgattctgacatcaggaagcctccattagaggtgatcattggatattctgtacttccactgtcgacacatattcagttactttcagatgtgtccttgccgattttgagagagctcgttccacattacctgcaggaaagtggaaaggagagaatggactatctggaagatgggaaaactgttttcaggttacgtttaaggctctgctcttcattgttcccaattaatgaaaggataagggacttttttgttgagtatgatcgccatactctacatacaagtcccccatggggttctgagcttcttgaggttgctgcatttcgagccatggttaacattttaacccgtgtgcagcaggagtcatcagatggggctgaaagaaatagattccttattaactatgttgattttgctttcgatgacttcggtgatcggcaagcccctgtgtatcctggtctgactactgtttggggaagtcttgctcggagtaaggtgaagatgtcccaccactgcaattgaaagaaggtgtcttcaggtgcatcatgcagctctttgattgccttctaactgaggttcatgagcgttgtaaaaagggtttaagcttggcaaaacgcttgaacagcacacttgctttcttttgctatgatcttttatcaattattgagcctcgccaagtttttgagctggtttcgttgtacatggacaagtttgcaggagtttgtcaatcagtccttcatgactgcaaattgacattcctgcagataatatgcgaccatgatctattcgttgagatgcctgggcgggatccttctgataggtag

SEQ ID NO: 2587 - DNA, 2745 bp, Zea Mays
ccacaccccaccatctgcctctgcggagctcgcgtgaacccctctcgctttcgcgctgcgtccgcggtggcatcattgggtgtccggactccggactggacatggaccgtcggaaagacagggtccttcttggctgctgatttcgcgagcgctgccgctgccaccgccgcttcttcttcttcctcctccctgctgctgcggcggcggaattgtgcgttggagggctgtgggctggcgactggtctctgcccctccatcttctccggcttgttcgccgaattgaatctgcgggggttgcgttgcagcgatgcgggcgcgggagccccggatgtggatggggtggtgctgggtggcgctcgctgctctgctcgccttgatcctgccgccgtccaacgccacgctctcccctgccggcatcaactacgaagtggtggctctgatggccatcaagacggagctggaggacccctacaacgtgctcgacaactgggacatcaactccgtcgacccctgcagctggaggatggtcacgtgctcctccgacggctacgtctccgccttaggactgcctagccagagcttgtctgggaagttatcacccggcatcggtaacctcaccaggctgcaatctgtgctgttgcagaacaacgtgatttctggacctattcccagtacgataggaaggctggggatgctaaagactcttgacatgtcagataaccagctcacggggagtatcccaggctcgcttggaaatctgaagaacctcaattatttctctcgttgctaccaggaagttgaacaataatagcttgtctggagttctgcctgattcaattgccagcattgatggttttgctctcgtagatctttcgtttaacaatctcagtggcccattacccaagatttctgcaagaacctttatcatagctggaaatccaatgatttgtggtaataattctggagatagctgctcttctgtgtcacttgacccactctcttacccaccagatgatctgaaaaccacaacaaggtattggaaggagccatcatattgctacaatatgtggagcaactgttggttcagtggcttttgtcgctgttgtagttggtatgcttctttggtggcgtcataggcgaaatcagcagatcttttttgatgttaacgatcaatatgatccagaagtttgtttgggtcatctaaagcggtatgctttcaaggagctccgtgcagctactaataattttaactcaaagaacatcttaggtgaaggtggatatggcatagtatacaagggttatttgcgtgatggctccgttgttgctgttaaaaggctgaaggattataatgccgtcggtggggaagttcaattccaaactgaagttgaagtcataagcttggctgtgcatcgtaatctcctccgtcttattgggttctgcactacggagagcgagaggttacttgtttatccatatatgccaaatggaagtgttgcttctcaattgcgggaacatataaacggcaagccagctctagactggccaaggagaaagaggatagcgctaggcacggcacggggcctgctctaccttcacgagcaatgcgacccgaagataatccaccgggacgtaaaggcttccaacgtgcttctcgacgagtacttcgaagcgatcgtgggagacttcgggctggcgaaactcctggaccacagggagtcccacgtcacgaccgcggtgcgcgggaccgtcgggcacatcgcgccggagtacctgtcgacgggccagtcgtcggagaagaccgacgtgtttgggttcggggttctgttagtcgagctgatcactgggcagaaggcgctggatttcggaagggtggcgaaccagaagggtggagtgctcgactgggtgaagaaactccaccaagaaaagcagctaggcacgatggtggacaaggacctgggcagcagctacgacagggtggagctggaggagatggtccaggtgtccttgctgtgcacgcagtaccacccgtcccaccggcccaggatgtccgaggtgatcaggatgctggagggggacgggctcgcggagagatgggaggcgtcgcagaacgtggacacgccggagtccgtctcgtcggagctcctgctccagaagtacatggacttcgcagcggacgagtgctcgctcggcctggaagccatggagctctccggcccgaggtgaccgaccggctggttgaccggacccggcgggcatcgcacgggtcggcgtaggtgtttttgccgtatcaagccctatattgttgtgttgcgttggacacatagggaaggcgatggattgtatggtctatatagctgtggtggcattcatttgtacatacagcagcattgtgtgaggtgagcccatccttgttgcgcgtctacttggtggcaaagagatgaagatgaatgagtatatagagatagagatcaaagttcccagtgcggagcggttggtgcctgtttgtgttttctgctttgctgaaaggcaaggcgtgcgcagcgctgtctgacatgcgccactgcttgtaaaacagcggtccgttacgcattccggagaggatatggtagatacagacgtggtattaggggttcacagaatctgtttctgtgtgtttggttcatgactgtttttttactgtactgagaacttgctcgtttcaccgttgatccatatggatcgaatagtattaagtcggtttaaatc

SEQ ID NO: 2588 - DNA, 1285 bp, Zea Mays
caaagaaccgattcgggtgttagggttcccgggatttgtgggtgattcgttgaaccgcaacatgtttgcctcattagtctgcatgctcaggggagtcaatggtgaggttcgcaaatggcgtcctgctggggcagaccgtggcttcaccttcctacgctataacctcactgtggcataccacagaacaaatctcttggtggtcaaggaatccaaatggaggccctctagaatctcttggatataagcaaggttacagagttgatgtggatattcctgaccaaacatgggtagaggtggtgggcaccctcaaaatttgatccaatacggtcaccaatgctgttctttgagaaggggaggccaattgtacctcctttactgccaccggctggactggatctggctcttcaaaacatgatatccttcgcgaacaaagcaacaagaccaaacacagtgaaattcttccgcactcaatctcctagacatttcgaaggtggtgactggaatgaaggtggatcttgccaatgtaatcagcccttgtcgtcaaaagaggtggaagaaattttctctttggacaataacagcactaatgtagaagcacgcttggtaaaccaacacttggtgaaggctcttcaacagactagtttcagagttctggacatcactcgcatgagtgaattcagagctgatgcccacccttcaacaactggcgggaaaaaacacgatgattgcatgcattggtgtttgccaggaccaacggatacatggaacgatttgctagctttgagtctcgaggcacttgagagctagttgagagagctcaagagctcaccggagaaaatatccctaacttttttttcagggggaatatgagtatgaagcatgaatctactggtagaatagaattttgctgatagctggttttagggcttttgttgcagcttgtttcatataaaggccaggagcattttcccccacttgtttgaccctgtatgttttaatatcactgtagagttccactgacgaatgacgatatacgaatgctataatcggtcggatccattttcttgaccaacagatagatggagcgtcttttggcccagacaacattattgacatttcattcctgcaaatttgaattggattcatgagtcccggtgaaatacctccaaagcacccacccctagtaatttcattctcttgccctttttctcttcagctgagaccagcaccagtgtgtaccctcaattaatattctgctagcacgctgtgagtctgtagactgcag

SEQ ID NO: 2589 - DNA, 2205 bp, Zea Mays
tttttgtttgggctttggccagcaaagctcctcggcacgggctgtgtagtgtagggcccaccgcgcaatgcccgagatctgcttcgctcgcccaaccgcgcccgccaccgcctcccatggcaccgccggcgaggagcccgacagcggggcctcggcggcgcgccctcgtcgtcctcgccctcgccctcctcctgcttctgcccctgctgctgctcctccacctcatctcctcgccttcgcctcgacacctccccgcgccccgcacgccctcccagtctcaggcctgcgactactccgccggcgagtgggtgcgcgaccccttcgcgggctcctcgctccgctacgaccatacctgcaaggagatcttcaagggatggaactgcatcgccaatggcaagggtaacgcccgcgacttgctcagctggcggtggacgcccgcggggcccgggtgcgagctcccccgcctcgacccgcgccggttcctggagcgccacagggacaccagtatcggatttgtgggtgattcgttgaaccgcaacatgtttgcctcattagtctgcatgctcaggggagtcaatggtgaggttcgcaaatggcgtcctgctggggcagaccgtggcttcaccttcctacgctataacctcactgtggcataccacagaacaaatctcttggtacgctacggtaggtaagaagtgtcatttcatttggattaacataaaaaatggttactcgaacatatggcctgcttgtattgttatttatgccagaactttatttcagctttgcatatcttgctttcagtttacaactctaggtgtaacttggaagcactgaaattgaactatctcccagtcaaccattctcgctaccttgtttaagcaatagtggattaatgttaatagaactgtgctcttatcagtcacaatgtttcttaagttttgcctatttgattccttcgaattttttatgttaattaaatgctgattcagaacattttctttcatggtaggacactgttgcccttctattggtcatttttttatcaaaccccatgtcactcattttgtaggtggtcaaggaatccaaatggaggccctctagaatctcttggatataagcaaggttacagagttgatgtggatattcctgaccaaacatgggtagaggcatgtagcttccatgatgttcttattttcaacactgggcattggtggtgggcaccctcaaaatttgatccaatacggtcaccaatgctgttctttgagaaggggaggccaattgtacctcctttactgccaccggctggactggatctggctcttcaaaacatgatatccttcgcgaacaaagcaacaagaccaaacacagtgaaattcttccgcactcaatctcctagacatttcgaaggtggtgactggaatgaaggtggatcttgccaatgtaatcagcccttgtcgtcaaaagaggtggaagaaattttctctttggacaataacagcactaatgtagaagcacgcttggtaaaccaacacttggtgaaggctcttcaacagactagtttcagagttctggacatcactcgcatgagtgaattcagagctgatgcccacccttcaacaactggcgggaaaaaacacgatgattgcatgcattggtgtttgccaggaccaacggatacatggaacgatttgctagctttgagtctcgaggcacttgagagctagttgagagagctcaagagctcaccggagaaaatatccctaacttttttttcagggggaatatgagtatgaagcatgaatctactggtagaatagaattttgctgatagctggttttagggcttttgttgcagcttgtttcatataaaggccaggagcattttcccccacttgtttgaccctgtatgttttaatatcactgtagagttccactgacgaatgacgatatacgaatgctataatcggtcggatccattttcttgaccaacagatagatggagcgtcttttggcccagacaacattattgacatttcattcctgcaaatttgaattggattcatgagtcccggtgaaatacctccaaagcacccacccctagtaatttcattctcttgccctttttctcttcagctgagaccagcaccagtgtgtaccctcaattaatattctgctagcacgctgtgagtctgtagactgcag

SEQ ID NO: 2590 - DNA, 2163 bp, Zea Mays
aacaagccaaccgccaacacagccggacaccaacctgtggtcgcgacgccacccggccgtataaatccacgccgccccgtcgccgccggatcctgccagtgccagcacaccacgggtttcccctgtcggagagaggacgccttttggtgctgtccctgtacttctcctttcgaaaggatctctctgcgcgccggggcggcgatggcggcggcgccggcgcccctgccggcgcccgtcgcagactggtgggagcgcgtcaacggctcgccggcgtggcaggacgggatcttctggaccctcgccgtcctctacggtgccattgctaccgcctcattcatccaagttgccaggatacagtgcagagtccctgaatatggatggacaacccaaaaggtcttccagttcctgaatttcgtggtcaatggggccaggtgctctatctttgctttccgtcgccaagtgcaacaagtgaaccctccggtttggacgccttaactttgtcctgtaatgtaaatgataatttcaatttgatcgtcctagcttggattgctcacgttcatttgtattccagatctttcagcatgttattcttgatcttcctggccttgcattcttcactacctatgcactgttagcgcttttctgggccgagatactttaccaagcacgtggaataatgactgatcgacttagatcaggtttctacatcattaattgtgttgtttatgcattgcaggtaaagcatgatctttctatttactaagtctagtgctaattcagtttgtataaatttttcatgcattgtgtgtctctttgctgaacggcattaacatttttaatttctttgtatatggtgctattccacattattagaggcctttcttttaagaaaagacattattagaagccaattggaattgtagaagaattcattactttggcatagcgagaaaaaatatttctgatatttaaaactctaatgtcaaaatatagattcttactaactcaaatataaagtagttagcagcagataaagatagtgcacagagtaaaaggaagtatctttatttgttaaattttggttgattcttttatggatgattgattcgttttgtattaaagaattgctcatttttttccttgaacaaaaatcttcttatttcagttgttcatatgtttacattgagtatcctgttattatattcaagacattctgatggaattattctgtcttcagggttttctgtggttgtggctgtggtggaatccaaatcattctatgctagtcacttctaagttattcattgcaggtctttcttttttcactgccttgggttttctgatctatggaggaaggcttttcatcatgctgaaatattttcctattgagtcaaaagggaggcaacaaaagctgagagaagtcggcagagttgccaccatatgtttctgttgtttctcggcacgatgcataatgatgtgcttcaatgcatttgacgaggaagctgacctcgatgttcttgaccatccagttctgaatttgttctattacctgcttgtggagattctcccttcatctcttgtcctgtacattctaaggaggattcctgcaaagctacggctatcccagtatcaccccgtcagcagcagctagagacgatgcattaccatctgctgagccaaaaatggtgactgctgtcaagccatgaaaaatcaactgcaatgccctctatataatatttgtattggtagcctctctgcaaaatatatatagggataagacttgcctcggttatttcttttctagaccctactcacatggaagccatccaatatttttcctagctcacctattgctaaccctgttagttcaatctgctaattttatgatttttagtgtttgagcataatgaaggaaagcaccattgtaaaaactgaactacatgaaaagttgaacatagattttttttccctggagatgagtttaacagtgagttgccctttggaatcattgaacttgttttggtattcttcctcatgtgacttgtaatgctttagattatctccgtttcagtaatcagaatgtgcgaggaagctgccaacgtctttactccataaccataaaatgtacatcctattaagtaggagtagagaagacaatacatg

SEQ ID NO: 2591 - DNA, 2188 bp, Zea Mays
tcctcttctttcttgtcaccatgaatcattgtccttttttcagcctcttcctctaacctttttgcttcagtctcctctgaactcatcatcatcactgcctgcaaacactaagacgaaccaggcttccttcccctctctcaattaatctgcagtacctccaacctcactagtcgtagcaacagcccgctctctttgtaatcaccgcccccagacccatctgctggactgccgctcggtggggcaacacatcttggacggcggatctcaagagggcaagggagcaagccttcctgtgagacgtcgacctgctgctgtccctcttctcccgcgccgcacaagactggtggcagcagcacgcgccacgatcctcctcgaccctccggcctctcccctccctgcacctgcagagagcgccgcaagctagctgcagaggagcaaaacagcaggaggaggacgaaaggaagaagagaaggcgagcggctgaatcctccctcgatcaccacacgcgctctgcccttccccgccaccgatctgccacctccgagcttgtccgccaacgccggatctgccggccacgtgatgcggctcaggcgacggacagagcctacgggcagcggcggcgccaaaacctagctctggataccatgtcgttttctggttcgaaggaagagcagtttgctgaaaattttactcccaattatactgtgtgtgctgctactcatgcttggagcccttgtctggacatgtaaaagcagaggcaaacggcaaaagaagagagttcaaaagagaaggatgctagaatacttgagttctactgatgacgctggggacaagaacataaacttcccatttattagctttgaaaacattgtcacagcaacagataatttctctgaatctaatttgcttgggaaaggaggttttggcaaagtgtacaagggaatgttggaaggcacaaaggaagtagctgtcaagagacttagcacgggttccggccaaggcaaggaggagttcaaaaatgaagtagtcctaattgcaaagttgcagcacaagaacctagttaagcttctcggttgttgtattcatgaagatgagaagctgttagtttatgagtacttacccaacaaaagcttggattacttcctctttggtattttgaaattccagtttttgatactgttaatgatgtccaacaaataaatgtcctgtgtgcctgctgatatgccctgttttatattattcttattagcttctgcaagaaaatcaatgcttcagtggccaacaaggttcaagataatccagggggttgctagaggaattatgtatctccatcatgactcaagattaactgtaattcatcgagatctaaaagcaagcaacatcttgctagataaggagatgaacccaaagatatcagatttcggcatggctaggatattctctggtgatcagctccaagcaaatactaaccgagttgtagggacatattaagtctgacacctacagctttggtgttcttatattggagattgtaagtggattaaagataagctcaccatatcttatcatggatttttctaaccttataacatttgtaagtattgggagacgctcagaatttagaaatatccacaggaaaacagcatgcaagcttaatgtgcgattgtgtcatgttgcaggcatggaacatgtggaaagatgggaaaccagaagattttcttgactcatctgtaacggagagttgctccctcgatgaagtttcacgatgcatccatataggactcctgtgcgctcaagacaatccgagttgcaggccactcatgtcaacagttgtgtccatgctggagaacaaagcaacaccactgccaacaccgaagcaacctaaagattttgcacttcgggactacaatcctggaaacgaaggtgtccacagggaattgtccgtaaatgatacaagtctcactatggtggagggccgttagattattgtttttgatactacgatgggggagcacatagcccaccagaaatattcattgaagacagacgtttagtccctattttgtttatgggtatttctgtttagacaaatttagtatcaatttaatctataaaatttattatgcaagaacaatctattggaaaggtaaagtttattatgcaatttatcaatttaggtttagattca

SEQ ID NO: 2592 - DNA, 2241 bp, Zea Mays
gttggagacttggagtgaagctgtccattttcgaccaaccctactcgtctcgtaccgtccaagacggggcaaagaatgcccggggaagccggcgagctggagcctggcggcagcttggcaccgatcgtcctccattcccgtcgctcccgacctcctcctaatttatcccacccggcctccccggttcgccccgaccacatcccccccttaacctcccctcctcctcctcctgcggtcccaactcccatccttcggttcaggagggaggcaggcaggcaggaaggcaggttcgaggagggattggctccgctcctgctccattgcgcgtgatccggctcgttcttttgattgatctaggcgtttcttggattagtcctggaaggtcaaacggttgttggaagcctcgctgggtgcttcaacgaacgcgaaggtgttgctgtcatttagagcgtcttgattggatttgacctgttggcctggtggcgtgccgtcgttgattgagctcgaggatgatcaagtgggggctcagcagcggcacgcccgcggattcctactacgaggtccggtcagattgcacggacggtgtgcccaagagcaagttcaagattaaggctggcaaaacattaagtgctcggaaatggcaggctgcatttagtcctgatggctgtcttgatattgcctcagtcctaagcaggatacagagaggaggtgtccatccaacagtcagaggagaggtttgggaattcttacttggctgttttgatcccagaagtacctttgatgaaagggaagagatcaggcaaatacggaggatacagtatgccagatggaaggaagattgtcgacagatggattctcatgttggtagtggtaaagttatcacagcaccacttatcactgaggatggcagacctattaaggatcctctggttttacttgaggctacttctgacacgaacacttcaggagatgctccaactaccagcataaatggaaatgaagttgatgaatctgcagaacgcattaccgataagcaaattatcgagtggaagctgacattacatcaaattgggcttgacgtcctacggactgatcgcaccatggtattctatgagaacaaagaaaacctttccaaattatgggatattctagccgtgtatgcatggattgacaaagatgttggttactgccaaggaatgagtgatttgtgctcaccaatgatagttctactaaacgatgaagcagatgcattttggtgctttgagaaattgatgcgtagattgcgaggaaatttcagatgcacagatcaatctgtgggagttgccaaccaacttcaacaccttgcgtctattattcaggttcttgaccccaagctacatgaccacctagaaactcttggtggaggtgactacctttttgcgttccgtatgttcatggtgctttttaggcgtgaagtatcatttggagactccttatacctctgggaggtatgaagctaccataatacgatgaatatgatgtgggctctggaatacgaccctgacattttcttcgcagcgtgtgaagaacaaggtgcagtaaataaaaacaaagtttctaaatccaaactgaaaggactgcgccattttggcaagtgggataataaggataaggacaaggataaggaagatgctaaaaatggggctgaggatggtgaagacggtcctgttccaatttcagttttcatggttgcaagtgtccttaaggaaaagagagaaaagctgttacaagaagctagaggactggacgatcttatcaggatattgaacgatgtaaatgggaacttagatgccaagaaagcttgtgctggagcattgaaacttcacaagaaatacctgaaaaaggtacaagaaaagaaaccttaaacgtgccatggaacacacctacccaatgggttattcttaccatttgaacatacacgaccattttctacacaccacttttgagtgaagatttacaggacaaaggtggtagacgactgacatgttctcagatatggtaccaggctagtgggttgagtacaggatgagtgcaaccggtagtttgtattgtattgtatctcacgttctttgtactcaagaattttgttggctgtacaggcagaaggcggtgcgggtagcatgccttgcgtacataattatttgaatacaagttgaattgaacaccatcttacgactaggagtgttaatgactttaaatttt

SEQ ID NO: 2593 - DNA, 2211 bp, Zea Mays
accggcttctaccatccgccaccgcccgccgcggaattcggaaaccccaaaccccaacgcggccgctgtgacgctgtccctggagatggcggcgtacttgagcatgggtgaagcgcaacgccgcatcggcgactacctctctcgggtgaccaacgccatctcctgctccgacgccgccgcgctcgcctcccttctttccgtctcctccgcgccggcctccaccccgctctccgacgcgctcgccgccatcccggacttcccgcgcctcgctggagatcgctaccccgaccttgccgacctcctcgttccgttgctccgagccatccacttccactccatccagcgcttcgccgacgcctactcctcgttcgagaaggcctccaacgcgttcctgcaggagtttaggaactgggagacgccgtgggcgatggaggcgatgcacactgtggcgctcgagatcaggctaatcgccgagaaggcagatagggagcttgcgacgaatggaaagaaccctgacaagcttcaggcggctgggtcttttctgatgaaggtttttggtacactagcgacatagagacaatagacttactactatcaggatcaaaacatgtataccattaggcaagaataaagaagtgattactgactactacctgtagcttgtctcaaggaagcagccaaatgcacatgtccaacaatcatttgttagcaacttagcatctggtaatggcctggcacacctgtgcagtagatgccactgttgtgccttcatatgtacaaccccagaggtgcatgcagtaacagctcaaggcacatggggtcgtcaagccatcgcagcccgcagggcccacatgctgtcagacaggagggagtgcagaggactccggttattctcaatgatgatgcacacgtgaaagggcctaagcgtattggggcactctatgttacctgccagctattcaaaatttacttcaggcttggaacagtaaacctttgccgtagtgtcataagaagtatcgaaactgcaaggaattttgattttgaagactttccagtgaaagacaaggtcacttatatgtactacactgggcggttggaggtgtttaacgagaactttcttgttgcagatcagaagctaacttatgctttgatgcattgcaatcctcaaagcgagtcaaatttgaggagaattttgaagttccttatccctgtaaagctttcaataggtgtactgccaaaaaggactcttttggagcggtatagtttgcttgagtatgcagatgttgtcactgcacttaagagaggagatctcaggcttctcaggcaagctctagacaggcacgaagaccaatttttgaaatctggcgtctaccttgtactggagaaacttgaacttcaagtctatcagagattagttaagaaaatccacatcattcagagacagaaggaaccagctaaggcacatcagattaagctagatgttgtcgtaaaagctctgaaatggcttgaaatcgacatggatgtggatgaggtggagtgcatcatggcatgccttatatacaagaaccttataaaagggtactttgctcacaagagtaaggtccttgtcctcagcaaacaagaccccttccccaagttgaacgggaagcctgtttaaatacaattgtcacggagaaatcctgtaatacaatggtattttttttgtttagtatgcagagatgctttccatattaagtgaaactccaagcctgacaaggacatttagggcctgatcggttataccggaataagccaggattcattctagctcatcaaaatctatataaggccttgttcgtttgtgccggattggtgggtcggaacgattcctaaccggattgtttctctaaattatataaactttgattagctgaaacgatttcgggtgcaatccgacacaaacgaacaaggcctaaattagagaagtaatccagctaggaattaatccgggactccaatcccaaacaaccgaacaaggccttatatttaatcacctctggatgtaatgtaacctgtatcattattgcctcattgaccttcattttccatacgcgaatgcgctatgtttatttttctatcatgtttagaagagagttcttgtccggtacccaggtcagcaaaatcacttaaggccttgttcggttattcccaatacacatggattggatgtga

SEQ ID NO: 2594 - DNA, 896 bp, Zea Mays
cgcgggacgaacacgaaggccacgggattcccacctctctcacgccggactccggccgcctcgctctccccccttcgcgctcgccctcgcgctcgacccatctgggctggggcacgcggcgacactcactcgtcggtccaagggaccccccggtctcgaaacgccgacaactaccttgtcaattgtttgtattttctaaatttttagggagttccaatgttctacatgggcgatgaatatggtcacacaaagggagggaacaacaatacatactgccatgaccattatgtcaattatttccgttgggataagaaggaagaacaatcctctgatttgtacagattctgccgcctcatgaccaaattccgcaaggaatgtgaatcccttggccttgaggacttcccgacttcagaacggttgcgatagcacgatcatcagcccgggaagcctgactggtcagaggcaagccgattcgttgccttcaccatgaaggacgaaaccaaaggcgagatctacgtggccttcaacaccagtcacctgccggtggtcgtcgggcttctagagcgctctgggttccgatgggagccggtggtggacaccggcaaggaggcaccatatgacttcctcaccgatggcctgccagatcgtgctgtcaccgtctaccagttctctcatttcctcaactccaatctctatcctatgctcagctactcctccatcatccttgtattgcgccctgatgtctgaaagaaacggatacaatagagtatattgtagccgtagtatatattttctttgacttttctttgacttccttttgtagatctgccaaacacaaacacaactaagcaatgtagcacatactattggcacgaccctccactcatttacattct

SEQ ID NO: 2595 - DNA, 1065 bp, Zea Mays
ttaaattgtcatttcatttaaactatttattgtaaactagaaagtatacatacatatagacagatttgtacacgtaatcatgtacaaaattcgccacacctcaaattttgtgcgtcctccgccactgctcgcccccacacctcgccctccatccacctccccaaatgacgtgccttcctggaattaaaaaggcagaagggaggccacacacgagaccaccaatcggacacacgcgagtacatccgacgcccaccatcagccagatagtgtacagagccgttgcgatgtccgtgcctctgcccccgcctcctccgccctcgcgacgcaacatcactgcaaacactctagcagtgctagaagccatggctgcacacaatgtgaggactctcatctactccagcacatgtgcgacctatggagagcctgacaagatgccctcgctgaaggaactccccaggtcaattatttccgttgggataagaaggaagaacaatcctctgatttgtacagattctgccgcctcatgaccaaattccgcaaggaatgtgaatcccttggccttgaggacttcccgacttcagaacggttgcgatagcacgatcatcagcccgggaagcctgactggtcagaggcaagccgattcgttgccttcaccatgaaggacgaaaccaaaggcgagatctacgtggccttcaacaccagtcacctgccggtggtcgtcgggcttctagagcgctctgggttccgatgggagccggtggtggacaccggcaaggaggcaccatatgacttcctcaccgatggcctgccagatcgtgctgtcaccgtctaccagttctctcatttcctcaactccaatctctatcctatgctcagctactcctccatcatccttgtattgcgccctgatgtctgaaagaaacggatacaatagagtatattgtagccgtagtatatattttctttgacttttctttgacttccttttgtagatctgccaaacacaaacacaactaagcaatgtagcacatactattggcacgaccctccactcatttacattct

SEQ ID NO: 2596 - DNA, 1088 bp, Zea Mays
ccaaccctagccgccactacctgctccctctccctagcagccgacagctgccatccagcgccaccaggaaagccgcccaggcgccccgcctctgcatccgcccgccaggagcagcgcccctgcaacccgctctgaagactcgacgcccagagccgcgcgcaaccccgttcgccgccccgccctccgtctcccgtcgcctcgcccctgcgctccgtcagctgcccctccccgaaccttctgcaaattcctattgtttcaagctgcatagaagtctgggattttctgagtgtggattcacagacatatattttcacagacactctctcagttatccaaatattgtcagtttgcactttgtggacaagaagttgtgaatgccttcagtgctgcagtgttgggcctatcttcaggttgtgtttcttctcaagtcaaccaagagcagcctcatgatggttcccctcctctgagagaagatgacaagaatgggcattatgtttttgctgttggagataatctcacatctcgttgtaattttctgccatcagcgtctcttgttaccaatgcaaatctgtttccatggttggttcttattgattcttttctatgcttgcagataagatcaatgcaaaaatgggagaagtctacaggaatcagtggtcttctccgctacgctcctgaaatatttgagcagtctggagtggctagtttgttttcagacattggactttctcctcattcaacatcaattctcatgagtacccttaatgctttgctgatactcccttgtataactgccgcaatgctgctgatggatgtctgcgggagaaggtagaatctgagacaccatgaaaattagtgatgcagttgtggacttttgaacaatagctggagtgatatgaaacattagtgatgtagttgtgggcttttgaactgcttcaagctggagtgatgtcgctgtggtgcttttgtgactgatctagctagctatctgtaaatgatctagttgtgaatgatattataattgtgatgtttttgtgaatatataattgtggtgcttttgtgtttatgtgatggatctataactgtgg

SEQ ID NO: 2597 - DNA, 1950 bp, Zea Mays
ggcgaggagacgaaccgaagattggccaaatctcgcttgcgtttctggggtggtgtctctgactctctggctccgtccccggcaccggcgggcggtggcgtgatggcggactgggaggggatcccgccgcgggagcggcggcagatggaggagatcctgcagctcgacatggaggagctcaacgtggaggtcgtcgacgacaacgaagaagacgaggaggaagaggagggtgacggcaacgaggaggactacgacgtcgatgccttcctcagagataacaatggagatggagtggctagcacctctggaccattcacattcaataggtctctagcttcactgcacacataccttggcgaggttgacgatactcggggtagagttactcttttagatggtggcacaatcctcaacttgccaatgttttatcttcaaggcgttgttctatttcctggagctaccctgcctctcagagtaattcaggatagattagtagtaactattgacaaagctttgagactggtcgatgctccatgcacaattggggtggttctcatgcgacgactcccaaatcatcgacattatgctactgcttcagttggaacaaccgcagagatacgtcaatttggaaggttggaagatggttcattaaatgttgttgcccgtgggcagcaaagatttcgtttaaggaggcattggattgatgttgatcgggtggtgtggggtgaggtacaaattattgaagaagatactcccttgagaactcctagagatgcatttgctcagatgaagacggggatttgatgcccaaacagttttggaagcggaaacaacattctgtgagggaaagtggtgcatcaagtcattccgacaagaagaccaacatgagaaatgataacaatctttgcttgacgcctctccagtcatcgccaatagcaaaaacaagagatgctaagcggcggcgacagtaccatgcttactcaaagcaggcttctcatgcaccattatcattttggcctcggtgggtatatgaaatgtatgattcatatacacttgctcgcagtgctgcagagttatggagacagataattgcaaacccaagcatggacgatcatgtaagaaagccagatattttgtcatttcacatcggaagcaaacttccagtctcagaatctgtgagacaaaaacttctggagattgatggagtttcatatcgcctacagaaagaaattcagcttctcaaggccttcaatcatattaaatgtagaaattgccagtctcatatagcaaaacgtagtgacatggtggtgatgtctaccgacgggcctcttggtgcctatgtcaaccctcacggttgtgtccacgagacgattacagtcagcaatgcaactgggctagcactcattggcaatccttcgaaagtccacagctggtttcctgggtactcgtggacgattgcagcatgcatggcctgcgagtcccacataggctggctattcagagccaccaagaagaatctgcggcctaggtccttctgggggatccgcagctcacaaatcgcagacgacacacaagtagatcagggtgactgatgctccaaacttccatgcgtataaggccatagtagcagtggactactaagtcatatatgacctggtgttcccaatcctccagtcgtgtctggttcatacgcactgcctgccttttttgtgttggcatagtagggacggtggagttccctgtaaaacaatcactctttttctactgttgtagtagtgctctgcactgaagggatttactgaatctctctttttttggtctaaataagatatctgttttcaatagtatatgcatgattttcatttacagatgttccatggtgtggcatgggtgaagaaaactgttctatgttaaaagaaatgttctagatcgaagaatagtgttctggct

SEQ ID NO: 2598 - DNA, 3535 bp, Zea Mays
atcgcggcgcaggaacgaccgaacgagtggctcccgtgcatcctgctcccagccaaacgcccaaacccatccgtcttcgggactagggtcccggcatccatcagtgcaagggcaaggcagttggccgccgcgcccccgccccgcgggtctcccctcctgctccggtccagggcgccccggccccccctcgtccgaatcccgtcggtggtgagccgccgccgggtgtggcccgcgagctgcgacgcgccgacgatgctgccaaacggagaagctccctccggatccatgccgccggtgcctgccgccgacgcgaacacctctaattcagatgacactagatttgatgcgtcacagtatgccttttttggcaacaatgtgctggaggagattgaactaggcggattcgaagatgataacagcagtaatgctgctttcgctggactcgatgatttagagcgcccactttcttctcaggggattgcactagaggctgaagatagttcattttcagatcttgatgatcttgcaaatacattctcaaaggttctgctgctgctgactgggcgccggaatttgaatccccactctggtccgatcagcatgtgctagttgctaaccaaggaccgaatggcaatggctggtggtctccacagcatcattcttctctccttgctgattccagattgcacagaacatcctcatcccctcagcaacaggaacaacacaatcatgatgcacctattcttggaccaaggccatctcctttgcaccggacatcttcatacccgcaaaaggagcctcagtacaacccagctgaagtcattccaaatgcaccatacatgtcaaactatctacctggtgggccacccaattcagtgcctcgacaaccacatcagatgaacatgccatctttcaatgaatttcagatgcatatgtctgcgcaaagtgagaccccattctcccagtttcctcgtggagggacacctccagagccattatttggtggaaaccggggtcatatgatttcaacaggcttctcaactaacagcagtggacaacgagaccatctgctgaataatgggcagtttcatggggaaactgccagcatcatgccaaatttgctgccaaaccatctacaacgtccgaatacattcatgccccctcaattgttgacagtacgccaacagcatggcatgctcccaattcagcaatcttcaaagcagtcatcaagaacacagacacacatgtttggcccccagcatccaccacaaatgatgaataggtttgataattttgggatgcctgagttcagtgatccaagagcaagatcatcaatgcaccatggcaggcaaggtcaacattttcctctccatggctctgagtttggtattatgaagatgggtaatgggaggtcaaggtttagatccaagtatatgtccactgaagaacttgaaaacattttaagaatacagcatgccgccactcatataaatgatccatacatcgatgattattaccatcaagcttgtctggccagcagatatgtggatgcaaggtcgaagcaccgcttctgcccaaccttgattcgtgatccatcatcctgtacacggagtaaggatgagccacatgcataccttaaggttgatgcccttgggagactgccattttcttctgtacggagaccgcgtccactccttgacgttgagccagcttctgcaactgatgatgacaccgttatttcaaagcctcttgatcaggaacctctgctagctgctaggatcacgattgaggatggactctccctattacttgacatagacgatattgaccgcttgcttcagtttagccagcagcaagatggtggtttcgaacttaaaaatagaaggcaatctctacttggtcagctggcagaatcgctgcagttggttgatccactaggtgcaaataaaaacacacatctgtccgcaaatgatgatttggtatttcttcgcattgtttctctacccaagggccggaaactactttcacgctatatcaacctcatggtacctggtagcgatcttgcaaggatagtttgcatggcagtattcaggcacctgaggtttgtgtttggaaatctgccctctgatgacggcgcagctgagacagtaactaaactggctagcgctgtagcatcatgcattcgcgggatggacttaagtggcctcagtgcttgtctcgcagcaattgtgtgctcgtctgagcacccaccccttcggccccttggccatgctgctggcgatggtgccactgtcgtcataaaggctgtcctggatagagcaacagagctcctcaccgagcagcctgccgcgccagactatggcgctccaaaccgagccttgtggcaagcgtcgttcaatgccttctttgggctgctcactaagtactgcatgagtaagtttgatagcatggttcacacgatgcacaagctcggtgctgctgctgcaacagcgatacgcaaggaacttccggttgagcttctgcgcgccagccttcctcacacggatgagcagcagcgcagactactgctcgagttcgcccagcggaccgtgcccgtctctggccatggctccgacgggtgacggacgggcgggtggcggctggtggaaccatggcatctgaaacaataccagcttaaggtggtcagcgaatattggtgcgctagatgcggtattttattctatcatacgcagacctgcccaatgaatcgagcgttccttgagctgcagttcagatgggcatgccggcgttaagtggatgtatgtcccaggtttggatccgtctgtttaggctaatagtattctctctgcacggttgcatcgcatcaccactggatagattagcatgattagcttccgtctgcagggctgtgtttcgttggctctgggtgggaacggaacccccctgcacgttccttgaaggcaattgcaagaaaatactgcgagctgttggtgtttcggtttgcagtgtttgtttgtagtggcgtcaaggcttccaaggttctcatctcatcactccggacgggtgccaggaagatgtggtttaacacatgtataaactagcaaatgcttggaaggttgatatttggttctgtagccagccattcgaagattgttgggtggggggttttgtttcctgttatattcgcaactgaatacattatcttgcgaagctgttcagtctgtaacgagttcattgggaattccactatatatccttgttatggatggtcaggagctttgtatttttgtgattctgggtattacccttgtgttccataaaggacgctttcttcctcgctcctgaatccattgcatcgtgtcctgtccgaatgggtgatctacacttttagctttgcctttgccctctaaagataatagtcaaattaaaggactggattcaagaatcatcattttctaaaagtcgatttggaaaacaactctagacctgtttttagtggctttcgaatggaactgtaaaaacatatatcgaaaaa

SEQ ID NO: 2599 - DNA, 1495 bp, Zea Mays
tccaccgtacgtccactccatccgcacccagtctcggcgcctcaccccccaaaatcctctcgcggtcgcggatcgctcttccctccccctcttatctctttctcttctcccattccttccttccactcccccgcccagcgccaccatggcctcctccgtcgcggtgtccctccgcgccctcgctgccgccccgctccccaagtccagccccgccacttcctgccccttcttcgtgctccttgcgccggcgctgccccgacgcctgctccgcctccgctccgcacgccgcctgccgctcgccccgctcgccgcctccgattccgccttcgagtcctccgtcggagttaactacgcggagcccgacgactcggagaaggataaggaggtggagttgttcggatcgggtgacgacgagggggcgggtgagttggtggatgaccattccgtagaggtctcagccgctgtcgaggacgaggtggaggaggaggtcggggagtacgttgagccgcccgaggaggccaaggtctacgtcggaaacctgccctacgacgtcgacagcgagcgcctcgctcagctcttcgaccaggccggcgtcgtcgaggtcgcagaggtcatttacaacagagaaacagatcaaagtcgtgggtttgggtttgtcactatgagcactgtcgaggaggctgagaaggctgtggagatgttccatcgctatgatgtcaatggaaggcttctgactgtaaataaagcagctcctagaggctctcgtgtggacagacctcccagacaatctgggccttctctcagaatttatgttggcaacctgccttggcaagtggatgattctagattggtggagttgttcagcgagcatggacgaattggatgatgctattgctgcccttgatggacagagtttggatggccgtgccttgcgggtgaatgttgcagaggagcggccacggcgaggtttctaatgaggttgtatcgggtggactgcacgcttgttccatgggttgggagcatcatagcatgttctgatactggtttagacctgccattctctttccttgtgttgctgagcttctatcatcgtgtcttattgtgaagagggaactcttcactaatattttgttatgtacttgttgtgttcaaaagttcttgtactgtaggctactgttatgatgcgcctagctcaatttgtcgatgcaattcgaaattttgtctaacatctgttcatgcaaaatactgtgtatgtgcagtttggctcttctgctttcttggcgagatcatgttcacgaaacgtacacttgtagctgccagccggcggtggtgccaaaatacacaaacaccgtatcaatgacacatgggccacatgctagaggaagctagccaatggctcgatgatgtacaacatttatagagaagggatcccatttaggacttgttcggttattttcaatctatatggattagagatgattgatacggattgaag

SEQ ID NO: 2600 - DNA, 2887 bp, Zea Mays
cgcgaacaagagccatgggcgcgagccgtctggagcaaaccgatgctctcttcaggaaaaaccttgtaatccagaggcgcgcctgcaagacgaactgctgcctgatcctgttcccgctggccctctgctccgtcatcggcggcttacagatcgccatcaaccacgcgtcgtcgcaggggggaggaggaggaggaggaggagggggtgcgacccctgccatccgtctcgactgcagctgcagcaacgtcagcgtagacgagaacgcgctcggaggcatacaatgcccggacgagtgcccgttgcctcgagcgcccaaatggcctcctgtcgtcaggaccccgtcgcccgagtaccgggcggtccaggacgggctcttcccgttcgctgatctcccggacgcttcgtgcagagccgaagggtcttgcccggcgacattccttgtcaccggcgacaaccactctttcgtagggagtgtgatagataacattcttcctacccatagttcttcggtgaacctgtcggccgatgtttctgcattgtctgattttgttctggctgacgatggagaatttcaccaaagttttcttcagaacaagtgctctcctaacttgacactctcttatccagttcaatacggcaataatgttgtgagtcaagtctatgatttcttaagctctgaccagagcaacttcaacctgatcatctcatataactcgacaaacgactacggtgtttacgatgaatcagaacaatctatccctgtgattaatcaagcaggcccagtgcagaaacctaatttggttcaagtcccacgattagctaatatggcctcaaatgcataccttcatttaaagggcaatggtttgaagatgccatttgaattcgtaaaagaaatgcctagagcagctatacctatacacgatggccagtttgatttggctccatacatagggcagctaccttttgtatggaccatggagcttctttttccggtaattttgacaaaccttgtgtacgagagacagaataagctaaggataatgatgaagatgcatggccttggagatctaccgtattggactatatcctattgctattttctactgttgtcgctgctctatgtgctgtccttcgtgctgtttggttctgcccttggtttaacattcttccgccagaacaactacggcatgcagtttatattctattttgcttacatgaacttgcaaatttcatttgcatttcttatgacaacatacttctctagtgtgaggacagctactgtgacaggatatctatacatatttgtgtctggccttctgtcacaattcatgttcagaccctatgttgaagatagtaacatctcaagaatctggatcactcttatggaacttctacctgcattttccttataccgcattgtctacgaattctcacgatttgcacaagcacagcctgagaattacatggcctcctcagggattcagtgggctgatatgactaatccagaaagtggattggcaggtgtgcttaccattatggcagtagaatggctcctgttccttttatttgcgttctatctggatcacttccgttcctacaaagacggaatcaggaaagcagcagcgcttgttcgctcccgcatacatgggaaccattctgaagctgctcagcagcaaaacgtacagcttcaggagttcagagcttccatccaactggagagaacagacgtgctgaaagagagagagatagttgaactgatatcaaaagaatccgacagaagctattcagtcatatgcgacaaccttgggaaggtgtaccgtggaaaagatggaaatgcagataaaattgcagtcagaggaatatccatttccatgtcacgcggtcagtgcttcggcgttcttggcccaaatggcgcgggaaagaccactcttattaacatgctgaccggattttgtaaacctacctctggcaccgcgtacgtccaagggatggacatacgcttcgatatggacagaatatatacaggaattggtgtttgtccacaggatgacttgctatgggaaagcctgactggtcgtgagcatctgttgttctatggaaggcttaagaaactgaaggctgcagcactattcgagcagcgcatcagaaaaactctcaccgtcagccgttaccgtttgccgtcacctgcagttgggccccacacgccacatcccaaaatccccaatcgaacaacagagggaaatccatcgcaaaaatccttgtgccgccgccctaggttcccgtcgccgctggtggtcgccgtcgccgtggaggcgcgcggcgctgcccctgccgtggccccagacgccctcggccacgcggctgctcctcgcccggagcccggtagacatcgccgccgctggtggtcgccgtggaggcgcgcggcgctgcccctgccgtggctccagacgctctcggccacgcggctgctcctcgctcggagcccggtagacatcaccgccgctggtggtcgtcgtggaggcgcacggcgctgcccctgccgtggctccaggcgccctgggccacgcggtcgtcgtcccctgccgtggctccagagtggaatcgccgctctgctcaccttggcctgcgaggcgcgcggcgcagctgctcctgtcgtggccctcgggacgagccgctgctcaccatggtctgctaggcgcgcggcgcagttgctctccagaagctgacccgcggagctcgctcgtcggccacgcgacgctcctcaccctcggctgcgaacctcctcactttggagccactacttatgaaaaacttatgtcaaaataagaaaaaactttttgagagtgcatggtgatataataattgttgtaccactacttacgaaaac

SEQ ID NO: 2601 - DNA, 3238 bp, Zea Mays
caccactgcaccagagcatactcttctcggcttctccaagcgcgaacaagagccatgggcgcgagccgtctggagcaaaccgatgctctcttcaggaaaaaccttgtaatccagaggcgcgcctgcaagacgaactgctgcctgatcctgttcccgctggccctctgctccgtcatcggcggcttacagatcgccatcaaccacgcgtcgtcgcaggggggaggaggaggaggaggaggagggggtgcgacccctgccatccgtctcgactgcagctgcagcaacgtcagcgtagacgagaacgcgctcggaggcatacaatgcccggacgagtgcccgttgcctcgagcgcccaaatggcctcctgtcgtcaggaccccgtcgcccgagtaccgggcggtccaggacgggctcttcccgttcgctgatctcccggacgcttcgtgcagagccgaagggtcttgcccggcgacattccttgtcaccggcgacaaccactctttcgtagggagtgtgatagataacattcttcctacccatagttcttcggtgaacctgtcggccgatgtttctgcattgtctgattttgttctggctgacgatggagaatttcaccaaagttttcttcagaacaagtgctctcctaacttgacactctcttatccagttcaatacggcaataatgttgtgagtcaagacgtacgatgcacagaaggactagttctctggcgggacagttcacggctaattaatgatgagttatatggaggttattaccaaggaaataggaaccataagatcgatgaaattgctgcagtctatgatttcttaagctctgaccagagcaacttcaacctgatcatctcatataactcgacaaacgactacggtgtttacgatgaatcagaacaatctatccctgtgattaatcaagcaggcccagtgcagaaacctaatttggttcaagtcccacgattagctaatatggcctcaaatgcataccttcatttaaagggcaatggtttgaagatgccatttgaattcgtaaaagaaatgcctagagcagctatacctatacacgatggccagtttgatttggctccatacatagggcagctaccttttgtatggaccatggagcttctttttccggtaattttgacaaaccttgtgtacgagagacagaataagctaaggataatgatgaagatgcatggccttggagatctaccgtattggactatatcctattgctattttctactgttgtcgctgctctatgtgctgtccttcgtgctgtttggttctgcccttggtttaacattcttccgccagaacaactacggcatgcagtttatattctattttgcttacatgaacttgcaaatttcatttgcatttcttatgacaacatacttctctagtgtgaggacagctactgtgacaggatatctatacatatttgtgtctggccttctgtcacaattcatgttcagaccctatgttgaagatagtaacatctcaagaatctggatcactcttatggaacttctacctgcattttccttataccgcattgtctacgaattctcacgatttgcacaagcacagcctgagaattacatggcctcctcagggattcagtgggctgatatgactaatccagaaagtggattggcaggtgtgcttaccattatggcagtagaatggctcctgttccttttatttgcgttctatctggatcacttccgttcctacaaagacggaatcaggaaagcagcagcgcttgttcgctcccgcatacatgggaaccattctgaagctgctcagcagcaaaacgtacagcttcaggagttcagagcttccatccaactggagagaacagacgtgctgaaagagagagagatagttgaactgatatcaaaagaatccgacagaagctattcagtcatatgcgacaaccttgggaaggtgtaccgtggaaaagatggaaatgcagataaaattgcagtcagaggaatatccatttccatgtcacgcggtcagtgcttcggcgttcttggcccaaatggcgcgggaaagaccactcttattaacatgctgaccggattttgtaaacctacctctggcaccgcgtacgtccaagggatggacatacgcttcgatatggacagaatatatacaggaattggtgtttgtccacaggatgacttgctatgggaaagcctgactggtcgtgagcatctgttgttctatggaaggcttaagaaactgaaggctgcagcactattcgaggccattgaacaatccttgagaagcatgcacttgcttgccggtggcgttgctgacaaactcgtgggaaaatacagtggcggcatgaagcgtcgtctcagcgttgcgatctctctaatcggtgatcccaaggttgtttatatggatgaaccaagttctggcctggacccagcgtcgaggaaaaacctgtggaaggctgtcaagtctgcaaaacaggatcggacaatagttctcacaacgcattcgatggaagaggctgacgttttgtgcgaccggatcgggatcatcgcgaatggtagcttgcagtgcattggaagctctaaggagctgaaagacaggtacggaggctcatgcctgctcacagtaacaactccggccggcggccaggaggaggaggaggtcgagaggctggtgcagtccatctcgccggcggcgaacagggtgtaccgcgtctcgggaacacagaagttcgagatgccgaagcgggggatgaagatctccgcggttttccaggccatggagcaggcgaagagcagcctggacatcgtcgcctggggcctggctgacaccacgctggaagacgtcttcgttcgagtggccaagcagactgacatgtccactgtgacctgactgaatacctcaggtgatgaactcatgaacgcgagacgcgacacagatttgagcagcctggacttttgcaaaacctcggtaaatgcggtcaggcgcaagcaagcggatcccacggcacgatcgagcgtgcgcgtcaggagcatctgccgcgtgtttcatttccacgcgtgagctagctgctagtagacattgcacctgcacaaccctatagaaaaaaccaatggattcgagttgagtcattttcactgtgtatcattataaaagtttataattattgtgagaatgtctacattacagaagctgtcgcagaacctcc

SEQ ID NO: 2602 - DNA, 1854 bp, Zea Mays
acctttccgtgtcgatcggtctccattactactagctcgcgggcgcggcatccctcaaccgaaactgatgaaggctgcggtctccagcgccggcgagtcggcgggcgagctgcttctccgcgcggcggcgctggtgccgtggacgcgctacttcctcgcggcgctagccctggccgccgtactcctgtacaggtacctgacgacgccgtggttagcgagtcctcatttgcagacgctgttcctgagcatatctggcagaccaccttcattcacctatcggaggcagttgtacactgttcgtgatggcggtaccattgccttagattggttactagcttctgatcttgaagatggagatattggcacttctgacggaaccatttctaaggatgattcaacaccccttcttgttgtgatacctggattaactagtgattctagtgctgcttatgtgaagcacttggtcttttctatggcaatcaaaggatggaatgttgttgtaagcaaccacaggggtcttggtggcatctccataacatctgattgcttttacaatgccgggtggacggcagatatgcgtgaagttgttagtttccttcatcaagagtatcctaaggctccactattcactgttgggacaagcataggtgccaatattgtggtcaagtatcttggagaagaaggtgaaaacacacctgtagctggtgctgcatctatttgttctccctgggatctgctggtgaccagcaaatttatttcacgcaagcttgtgcagcgatgttatgacagagcccttgcgattggtctaaaaggatatgcgaaactacatcaatcagtcttggcacgacttgcaaactgggaagctattacatcgtcacactctatccgggaattcgaccgccatgccacttgtgttgttgcaaaatacgagacagtggacacattctaccgcaagtgcagcagtgcaaattatatcggtaatgtgtcagttccactgctttgtatcagtgccttagatgaccccctctgcacaagggaggccattccctgggatgaatgcagggcaaacaaaaacattgtattggcaactacacctaatggcggacatcttgctttctttgaaggcctaactgctggaaagctttggtgggtacgacctgtttccgagttcctctgtgctctgcatgatggcccctacatgcatcggcagaaggcacaagggcacgatttgcactcatcgttggaatcatcaattgacaagagcccatatgtgaatttcatggaagatggaatggtagctgcattaacagatgatggtcctaacaacggtgactccttgcttaacgaggttcttggtgaaattgaacctaatgatagcgtggttgtccaacacgtaaaacagaaccaaaacaccagagctatacaaaatgagagtgacagttggttggatgataaaaacagctccgaagggaatgttcaagcccatggaggaactcaagaacagagagaagtgccatatgcgaataaaatcagtgatgccattggtcctgttaagaaatcaataaaccaactcagtcgatcccagggtaagtcaatctggttgcttgcttacattgctcttgtaacctcttggccgttgcttggggccctaggttttttcttcaggaaaaggttgagtaattctctgttatctaggaagctgaagaaatcgtgaacactgtgctaacacagatttatttggtatgtaagagcatgtacagtgatgtttaatatagaggctcttgagattatctaaagagagcatttgcaaaaaaaaaattgtggagctgtctctatgtgaagagacgcctttag

SEQ ID NO: 2603 - DNA, 1912 bp, Zea Mays
atgaaggctgcggtctccagcgccggcgagtcggcgggcgagctgcttctccgcgcggcggcgctggtgccgtggacgcgctacttcctcgcggcgctagccctggccgccgtactcctgtacaggttcctggagctccacttgctcggcgacctcctccgcggcctccgcggcggccgcgtctcgcttaccttccaccccgagtctcaagtgtaccaccgggtcgcctccaagtgccgctcgctgcacggcaggtacctgacgacgccgtggttagcgagtcctcatttgcagacgctgttcctgagcatatctggcagaccaccttcattcacctatcggagttgtacactgttcgtgatggcggtaccattgccttagattggttactagcttctgatcttgaagatggagatattggcacttctgacggaaccatttctaaggatgattcaacaccccttcttgttgtgatacctggattaactagtgattctagtgctgcttatgtgaagcacttggtcttttctatggcaatcaaaggatggaatgttgttgtaagcaaccacaggggtcttggtggcatctccataacatctgattgcttttacaatgccgggtggacggcagatatgcgtgaagttgttagtttccttcatcaagagtatcctaaggctccactattcactgttgggacaagcataggtgccaatattgtggtcaagtatcttggagaagaaggtgaaaacacacctgtagctggtgctgcatctatttgttctccctgggatctgctggtgaccagcaaatttatttcacgcaagcttgtgcagcgatgttatgacagagcccttgcgattggtctaaaaggatatgcgaaactacatcaatcagtcttggcacgacttgcaaactgggaagctattacatcgtcacactctatccgggaattcgaccgccatgccacttgtgttgttgcaaaatacgagacagtggacacattctaccgcaagtgcagcagtgcaaattatatcggtaatgtgtcagttccactgctttgtatcagtgccttagatgaccccctctgcacaagggaggccattccctgggatgaatgcagggcaaacaaaaacattgtattggcaactacacctaatggcggacatcttgctttctttgaaggcctaactgctggaaagctttggtgggtacgacctgtttccgagttcctctgtgctctgcatgatggcccctacatgcatcggcagaaggcacaagggcacgatttgcactcatcgttggaatcatcaattgacaagagcccatatgtgaatttcatggaagatggaatggtagctgcattaacagatgatggtcctaacaacggtgactccttgcttaacgaggttcttggtgaaattgaacctaatgatagcgtggttgtccaacacgtaaaacagaaccaaaacaccagagctatacaaaatgagagtgacagttggttggatgataaaaacagctccgaagggaatgttcaagcccatggaggaactcaagaacagagagaagtgccatatgcgaataaaatcagtgatgccattggtcctgttaagaaatcaataaaccaactcagtcgatcccagggtaagtcaatctggttgcttgcttacattgctcttgtaacctcttggccgttgcttggggccctaggttttttcttcaggaaaaggttgagtaattctctgttatctaggaagctgaagaaatcgtgaacactgtgctaacacagatttatttggtatgtaagagcatgtacagtgatgtttaatatagaggctcttgagattatctaaagagagcatttgcaaaaaaaaaattgtggagctgtctctatgtgaagagacgcctttag

SEQ ID NO: 2604 - DNA, 1528 bp, Zea Mays
cagggaaccgcgagctctgccgtgacaaattctctctcctcgtgctccctagtccctccgacccccccccccccccccccccccctctccctccgcactccgcagcgcttcctccggtcttctctggccggatccctgcccccaaaatcggattgggggagggctcgttgcgttcgaccagacggcgtgcggcggttctccggcgccgagactatgttgtacagtgtatgggatgctaactcaaggatgtgcgacaatatggttatgaagaggagctatgtacaaagactaaggcaagaggtcaaattgggaatagtgttgaaggagcaaatggattaccttgatcactgggcagcgctgcaaacagagcattcttcttctttatccagcgcaaccgaagctattaaagcaagcacattgcgtcttccagtttctggaggggctaaggctgatgtacttactgttaagaatgctgtcagttcagcagttgacattatgcaagcgatggggtcatccatttgccatttgctatcaaagttacaggcttcacactctctggttacggaactttcagctgttgctgctaaggaaagtatcttactcaatgagtacagagaactcttggcaacagcagcagcactacaggtccaggagtccagcctaaggacacagctcatacaacagacagagtgagcaggttaaggtcctgtatgtatttctgactaggaagattagaggtaaacaccattcattagtttcagtgactgtgcggtgcatatgtgtatctttgatgccgttttttttctctctcctttttttgtacttagtaggtagcccatatttctttgcatttctactcccccatgttcttttgtgttcgaacaacttacatggaagagaagggaagcaacacgaaatcatggatttccatgacaaaggtgccagtgtggtcttttattgcatcctagaccaatgcaatgcgcccaaaaactgaaagctttgttgtaagctgtaaaccttagcagttatgtgtccttaagtgtaatgcctttagatgtatctttcttagatccgccatctccttagaactagaggctccagttaacaggttactcactatcattgctggtttcaaatctaagcaaagggggcgaccagaatcttctaaccgacacttcagagtagacaacagtcatccaatactgacctattcaaatttgttaccgccggtactcagagagtgaaccattaccatttatgttatattttatgcggtagaatgagactggctggtttaggcctcaggacaccattgtgaactgtttaggctgatgggaagctcctattaattctcggtcatcttttagcttcggctatgtattttactgtattgatcgtaccctttggtgcagtcaccattctgtcaggagctctactttgagggatctcatctgtcctttttccctctacctggctcaatcacacaatgaaatggtcaaatggaaatgcacgtacaagtttttttttt

SEQ ID NO: 2605 - DNA, 1557 bp, Zea Mays
tttgcataaatgggagaaaggagaggaggaattcgagaaaatcaccgcctcccttcctttgttcatcgtctgccttttctttttctcctcttcatctactgaatttgccggggtcctcgatctgggcgggacacggggtagactggtgctggcttcgtggcggagttatttgagtttgtaacaatctcgtcgcgcggcttcgccactatattactccgcagctgcgcatcgccaatttgactatgttgtacagtgtatgggatgctaactcaaggatgtgcgacaatatggttatgaagaggagctatgtacaaagactaaggcaagaggtcaaattgggaatagtgttgaaggagcaaatggattaccttgatcactgggcagcgctgcaaacagagcattcttcttctttatccagcgcaaccgaagctattaaagcaagcacattgcgtcttccagtttctggaggggctaaggctgatgtacttactgttaagaatgctgtcagttcagcagttgacattatgcaagcgatggggtcatccatttgccatttgctatcaaagttacaggcttcacactctctggttacggaactttcagctgttgctgctaaggaaagtatcttactcaatgagtacagagaactcttggcaacagcagcagcactacaggtccaggagtccagcctaaggacacagctcatacaacagacagagtgagcaggttaaggtcctgtatgtatttctgactaggaagattagaggtaaacaccattcattagtttcagtgactgtgcggtgcatatgtgtatctttgatgccgttttttttctctctcctttttttgtacttagtaggtagcccatatttctttgcatttctactcccccatgttcttttgtgttcgaacaacttacatggaagagaagggaagcaacacgaaatcatggatttccatgacaaaggtgccagtgtggtcttttattgcatcctagaccaatgcaatgcgcccaaaaactgaaagctttgttgtaagctgtaaaccttagcagttatgtgtccttaagtgtaatgcctttagatgtatctttcttagatccgccatctccttagaactagaggctccagttaacaggttactcactatcattgctggtttcaaatctaagcaaagggggcgaccagaatcttctaaccgacacttcagagtagacaacagtcatccaatactgacctattcaaatttgttaccgccggtactcagagagtgaaccattaccatttatgttatattttatgcggtagaatgagactggctggtttaggcctcaggacaccattgtgaactgtttaggctgatgggaagctcctattaattctcggtcatcttttagcttcggctatgtattttactgtattgatcgtaccctttggtgcagtcaccattctgtcaggagctctactttgagggatctcatctgtcctttttccctctacctggctcaatcacacaatgaaatggtcaaatggaaatgcacgtacaagtttttttttt

SEQ ID NO: 2606 - DNA, 1605 bp, Zea Mays
tacatggactgtaaccggtttagttactcacactgtgtgctcctttgcccaaaagcagttcatgacatgctattttcttttgcttccatcactcttcactggacattcttcatttacctcatgttttatgggtgatttggataaacatgagtatatccttcaggtttgcatcttgtcttagaaacaaggacagagtcatcctagtgaggaaagtgctcttatggagttgaagaaagaactccaggaaagacctacacaaaaactggtagatgatctcaagaaaaaggttcagattttgcaggctgttggttacaactccattgaagctgaagactgggagcttgctactaatggtgaagaaatgagcaagttggaagcattgcttctagacaagaaccgtaaaatggagcatgagctaacacaactgaaggttaaaatatcagagaaaacaagtgttcttgaggaagctgaaaaaaggattgttgaactaacttcaaaggttgaagagcagcaaaagctgattttgaaacttgaggatgacatactaaagggctacagttcaactgataggaggggctcactcttgaatgactgggatattcaagaaatcggctcaagtgaagcatctgagggctctgatccaaggcatgcatcggcagatcaagatcaaagttcgatgctcaaggtcatttgcaaccagagggatcgtttccgtgcacgtctgcgtgaaactgaggaggaactgaggagactaaaagagaagcatgagatgctgactgttgaactggaaaaaactaaagctgataatgtgcaactgtatggaaagattcgatatgtccaagactatagccacgacaagattgtttccaggggaccaaaaaagtacgcagaagatattgaaagtggttcttctgatgttgaagcaaagtacaagaaaatgtatgaggatgacataaacccgtttgctgctttttcaaagaaggaaaaggatcagcgttataaggaacttggtttaagagacaaaatcacacttagtagtggccgttttgtccttggtaacaaatacgcacggacgtttatattcttctacagcatcggattgcatctccttgtatttacattactgtacagaatgtcagctttgagctatctcaacacaacaactcagcaggatgaaatcattctggatgctggtaatcagaggctaacgcacatgctttaggccaagttccatataacagtagaaaaagaggctctctgggttttgatctatagaatctttggacaggatcgttgctgagattgctattgatttgtttgctttgtacccttaagcgccttgatatgtttctgtagataaaaagaaaaaaaaacctgttttgggggcaggcgtgggtgcggcatgagctttgaactatgtaatactgttgtactgccaatttaccattttgttggtaaatgaaagcacacttgtcacaaaggtatacggtatgccataccatcactacatcgtttagagtgaaatgcctctaaactttttctgcattctcttctagctctatgaactcatggaatggtcattcgttattttttttcactttttaa

SEQ ID NO: 2607 - DNA, 733 bp, Zea Mays
ccccgaattttctgcatatatctaaaaaaaatatcgaattacatcaaatccgaggagcagccacagccatccatggaggcgctctacttgctggcctccctggccgcgaccctcgtcacatccgccttccactcgctcctgctgctcctccgcctcctcctccgctacccgcgccgcgctgcccctaccgatgatgggcccgccgcggcggcgcggctctacgagggccgggtccggcacgcgcgacggcgcccggcggcgcacaccttcgagtaccccgcgcgctacgccctcgtcgacctcgaccgactgccgctccccggccacctctccgccgacgatgcccgccgcgtcgcctccacctccggccccgtgcacctcttgacggtacccgagagcgtggggtacgagcagaacccgctgagcatttactactgctacgattctgcaggacaggggcaagatggagagctcagaacgtgcattgccgaggtcacaaacaccccctgggcagagagagtgatgtttaccttccaaccgggctctgatctcatcgcgaagcccttgcatgtcagcccctttatgttcagcatccgacacttggggactacttcactgcagttttggatgccaaattggatggacagacaagtaattctctgaggctggcaaccttcttctggctgatgccgcacaaagttgctgcatgatatactgggaggtaagggtcctt

SEQ ID NO: 2608 - DNA, 799 bp, Zea Mays
ccccgaattttctgcatatatctaaaaaaaatatcgaattacatcaaatccgaggagcagccacagccatccatggaggcgctctacttgctggcctccctggccgcgaccctcgtcacatccgccttccactcgctcctgctgctcctccgcctcctcctccgctacccgcgccgcgctgcccctaccgatgatgggcccgccgcggcggcgcggctctacgagggccgggtccggcacgcgcgacggcgcccggcggcgcacaccttcgagtaccccgcgcgctacgccctcgtcgacctcgaccgactgccgctccccggccacctctccgccgacgatgcccgccgcgtcgcctccacctccggccccggcacctcttgacggtacccgagagcgtggggtacgagcagaacccgctgagcatttactactgctacgattctgcaggacaggggcaagatggagagctcagaacgtgcattgccgaggtcacaaacaccccctgggcagagagagtgatgtttaccttccaaccgggctctgatctcatcgcgaagcccttgcatgtcagcccctttatggacatgctcagcaactggagtattcgcgctgatgctcctggtgatagactttatgttgttatatcagttcagcatccgacacttggggactacttcactgcagttttggatgccaaattggatggacagacaagtaattctctgaggctggcaaccttcttctggctgatgccgcacaaagttgctgcatgatatactgggaggtaagggtcctt

SEQ ID NO: 2609 - DNA, 1458 bp, Zea Mays
ccccgaattttctgcatatatctaaaaaaaatatcgaattacatcaaatccgaggagcagccacagccatccatggaggcgctctacttgctggcctccctggccgcgaccctcgtcacatccgccttccactcgctcctgctgctcctccgcctcctcctccgctacccgcgccgcgctgcccctaccgatgatgggcccgccgcggcggcgcggctctacgagggccgggtccggcacgcgcgacggcgcccggcggcgcacaccttcgagtaccccgcgcgctacgccctcgtcgacctcgaccgactgccgctccccggccacctctccgccgacgatgcccgccgcgtcgcctccacctccggccccgtgcacctcttgacggtacccgagagcgtggggtacgagcagaacccgctgagcatttactactgctacgattctgcaggacaggggcaagatggagagctcagaacgtgcattgccgaggtcacaaacaccccctgggcagagagagtgatgtttaccttccaaccgggctctgatctcatcgcgaagcccttgcatgtcagcccctttatgcccgtaggacatgctcagcaactggagtattcgcgctgatgctcctggtgatagactttatgttgttatatcagttcagcatccgacacttggggactacttcactgcagttttggatgccaaattggatggacagacaagtaattctctgaggctggcaaccttcttctggctgatgccgcacaaagttgctgcatgatatactgggaggccctcaaactttggctgaagaacgtcaagttcctggaccatcccaggtatctgaacccgaggtacagggacgaagcgctggagcgcgaccttgagctccgcacctcttgctgccaccttcagcggcaggagcggaacgaccggagaagcagaactgcagaaaagacagctgaaatcacggaccacgtagatggcaagggcgacgcggacatcgcgaagaggtggtgcgtttggagggacgctgggtggccgtggtcatgaaaaaaaactcagacatgccgttttgtgttcgttcagacttcagattcagccgctggtgctcccgtttcgaccaaatatcgtagttttatttggttggtgccttcgcagccgccactacgagttgacagtatcgataatgggtaacgttgttcgctgttaaagaagaagagattactagggacatgcttttctctctttctcaaaagatgcattttcttcttcgtagtatccagtttttgaccaattattcggcttcaatgtataacatttggaatgtgcaagaggtgcgcgtcagcgcgtgtatgctgccatcttcaatgcacatgcgtgcctgattgctgcaagatatattacattaatataacattacatcatatgtcgttatattatattgtttatgtt

SEQ ID NO: 2610 - DNA, 2468 bp, Zea Mays
aaccgctacccatcgcaaacgctttccctccactcgtccgctccggccgcgcgcctccgccccacgccgatgccgcccccgcccccaccgcctctcggcctccgcctccgtctctccctcctcccgccccaccctatcgctccttctatccgtcatgccttctgctcaccctccgtcgtgtcctgccatctttcggtgcgccccctcgcccaacgccgcggtgggcgcccgcgccccctctgcgccgcgcggggcgaggccgaggcggagggcttcgcgtggccggatgggtccgaggaggagctgcggcggctcctggagctgctccctagggagctgagtcggcgggtggagacccacccagagctcccggcgctcgtggaggtggtcatggacctcggccggcccccgctcgcgcgcttcccgtccggagacttcctcctctcccaacgccccatctccttcgacgacctccgtcacgctacctcccactcccaggttggggactttggagcggataatcgtgctggaatcagccgcacgctgcaccggatcagcgccattaggaatcggaagggcgtcattgtcggcctcacatgccgtgttgggcgtgcagtgcccgggagcgctaatttgcttcaggatttggttaaggacggtggctcattgctgctcatcggcccacctggggtggggaagactactgtcataagagaaattgcccgtatgttagctgatgactataagaagcgcgtgatgattgtcgacacatctaatgagattggtggggatggtgatattcctcacccaggaataggcaatgcacgtaggttgcaagtgcctaaccaagacatgcagcataaggtactgatagaagctgtggaaaaccatatgcctcaggcgattgttattgatgaaattggaactaaactagaggccatggctgcaagcaccattgcacagaggggcatacagcttgtggcaactgcccatggggtaacgatagagaatctgatcatgaacccatcactagagatgcttgtgggaggaatacagagtgtcacacttggtgatgaagaagctaaccggagaggagttcaaaaaactgttctggagcgcaagggcccatcaacatttacatgtgctgcagagatcgtctccaaaaaagaattacgtgtccatcgtagtttggaagccacggtagatgctttactcgcaggtaagctgcctaattttgaaattcgaaagttgggttcaaagggatctatgcaggaagtttctgtgcaaaaggaacaatcacatcttggtatttatgatgcaactgaatttggcagtgactctctaaggaatgccagaagaagcttagactctgcatttagtcttgactctgctgaagggcatatagtgagtttgtacgtaacttattggataggatgttctagatctccgagtcgactgccttgcaagccattcatcagctggagttggacgacagtgttactttaacttataatatcagtgaagctgatgcagtgatcgcgttacattcaaagctcaagaagaactatcagattcaggctgtgctgaaatctcaagatataccggttttcctcgtaaagacaaactccctgcctcaaatcaccagggcactccgtgctcttgtcgacgatcacatggacgaagtgatagactacaatgataaagaagaagcaaggtcatcagaagaaaccgatgctctggaggaggcaaggctggcaatcgagcaagtagtgattccgaaaggcgagagcgtgcagctactgccaaggccatcaagcatcatctcgtcccaagtgggtctcgtcgaaagcttcagcctcaagtgggaggtcgtaggccaggagcctaaggcatgcgtgaggatccttccgcactttgcgccaaaacaagtcgaagctgtcgcgcgagaaaccccagcggagcccgccgactcggactgggagagccacgatgactcggatcatacccagagtggcatcaccaggctacctttcctaccggattagcgcggcgtctggcgtatcctttcagttcttcgtggccctgccgcctgctgtgtatgtattccatttatttatcttggtaataacttgcaccagaaagcacttgcgtggttgcgtctatctacctacgtaatataagtggatagtgctccgatccggcctctacgcgcgcgtacagatatatacagtatctaatctgttgtcgacccgtacagtcatatcatccatgcatctcttcccattttttacatgctctgccaattccccaagtgctgcgtatccgttctaatctagtactaccgaacaagataaagcagcaagctagcatataatcgggtcgttgtgtttgtgccttttgactagttgtccaataatataattaagctccatccttgtacttgtaccagcacatttcttatatatatg

SEQ ID NO: 2611 - DNA, 2911 bp, Zea Mays
gccagacgcactagctcgctactagcccagagcgccagcaacttgctgcattgcattgccttgcctgttgctcgccccagcaccaccaaccacccccgccggccgcttgagcctcggcaccccggcggctagcccggacgtccggccggccggctgtttcgcgctcttgttcctcgctcaaaacaatatacactactcgtatttgaccacactctgcgccgcagttcccgcggctccttggacctggaatcagcagaagctactactacgacttgccgcaccgcgcgcgccgccgccgccgccgaaacgaaacgcacgtacgacgccaagtttaacgacagcggcggccgggctagggctagctagctttggcggctagcgaggcaggcactactctactactgcggctacgatcgaggcaggctgaccactgacctgtgaccaggctccgatccaggcaggtgccctgaagtttcggtacgatggagttcaccggcaccaagaaggacgtcgagatggccgggcagctgaacaccgagctgtcgtcgagagaacacgcgctcccggcgctcctgatcaaggttccgtcgcaggccatcgccggcttcgactgcgtgcccgccgccgccgacgccgccgtcgtctccctgaacgagccgggtgacagggcggaggacgtcgccatcagcatcctccccgcgccggcgagagcctacggcggcgacgcgcacggcgtcccgtactccgtctcgctcagcatgccggcgtcgccgtcggggttccacctgtcgtcgcacttcatgtgcgcgggcgacgcgcccgtggcgacggccgacgtccgcccggtgctgctggaggatcagcggcaggcggcggcggcggcgcactcgccgcggctgatcaagcagacgcggttccactcgcagcccatcctcaacctgcacccgccgtccaagaacgtcgtcgacgaggctgcggcacggcggtgggacagcgcgcgcgacacgcggttcgacccgttcaagaccttctcgggccgcctcgagcgccagctgtccaacctgcgcggccgcccgcaggagcccgtcgacggcatatccccggactccaagatctccgaggaggagaccgaccaggtccccgccgccgaccgctacttcgatgccttggaaggccccgagctcgacacgctcagagtaagcactaaagcttcaagcttgacgacgtgtcggagtggactggagaaccaaaaaaaaaaaacgtgtctaagcagtaagcaccacgatctttcgtcttttgcattgcaggccacggaggtgccggtgctgccgaaagacgagaagtggccattccttctgcggttcccgatcagcgcgttcggtatgtgcctgggcgtgagcagccaggccatcctgtggaagaccctggcgtcggcggcgccgacggcgttcctgcacgtgagccccgcggtgagccacgcgctgtggtacgcggcgctggcgctgacggtgctggtgtccggcatctacctgctgaaggtggtgttctacttcgaggcggtgcggcgcgagttctaccacccgatccgcgccaacttcttcttcgcgccgtggatcgcgtgcctgttcctggcgctgggcgcgccgcggctggtggcggagatgcaccacggcgtgtggtacgcgctgatggcgcccatcttctgcctggagctcaagatctacgggcagtggatgtccggcgggcagcggcggctgtccaaggtggccaacccgtccaaccacctgtccatcgtcggcaacttcgtgggcgcgctgctgggcgccaagatgggcctccgcgagggccccgtcttcttcttcgccgtcgggctggcgcactacatggtgctgttcgtgacgctataccagcggctgcccaccaacatgacgctccccaaggagctccaccccgtgttcttcctcttcgtcgccgcccccagcgtagcgtccatggcctgggccaagatcaacggccagttcgacgccggcgcccggatcgcctacttcatcgcgctcttcctctacatgtcactggcggtgcgcatcaacttcttccgtggtttccgcttctcgctggcgtggtgggcgtacacgttcccgatgaccggcgcgtccgtggcggcgatcacgtacgcgacggaggtggacaacgtgctgacccgggcgctctgcatcgggctgtcgggcatctccaccgtcaccgtcgccgggctcctggtgaccacggtgttccacgccttcgtcctcagggatctcttccccaacgacgtgtccatcgccatcacgaggaagaagcccaagttcagcaagatcctggcgcacttccgctcgtccagctccgacatgaaggagctcgtgctgtccctccccaggacggcgcagtctgactccggcgaaaccgagaccgagccgtccgtgaccgccaaatcccgagccgagccgtgagtgactagctcccggtcgcggtctcgttctctcatgtatagctgctacatcccttagctagctgcacacagagcgaggctactgtatagctactacgacgaagaagtcgccgataagcaagtgtgcagtgcaggcacgcgtccatcgatcggcctaaagcggctgcagcagtcggtcggtcggtcggtcggcgtggattaaatgatcggacatatacgaagggtgcacacggccggtatccttggagcattcctagtgatgatggggatatgatgacgtgaggaaaaaatatatactactcctaccactagtagattgattaattagtttgtataaatctacgtaccgacatattataagtagcttgtgtggactatttaagtaaaagaataaaaaccatgaacatgctctatggccttcaaaga

SEQ ID NO: 2612 - DNA, 2064 bp, Zea Mays
cgtccctaccctctcctgtcctgtcgttctcgtgcaagctcacggtcccccacgcccacgagcgcctccgctgcgacgaagagaatcatcaggcagagcgggggtggggcggggcgcagatggatctagagaggtcaccgccagcgtcgtcggcggaggcgcccggggacggcggcgggggcggggccgcggcctgctcaatctgcctggatgcggtgctcgcccgcagcgctggtcgctccgtcgccaagctacaatgcggacacgagttccacctagattgtattgggtctgcattcaatgcaaaaggagcgatgcaatgccctaactgtcggaagattgagaaaggtcgctggctttatgcaagcggacatcgcgcctctgttgatattgatatgggtggctgggtgaccagtgacaactatgatatcacctccgagcttccttttggatttcaatggtgcccctttagtggattcacccggctagcatccatgtttgaggagcgtgaagctgagcttacttatcacacaactggagatcgctcaagtgctgcaagcagttcacttgtttgcccatatcttgccctgcgtggttttctgcatcctgttcatgtgccttctacatctaatcctggtgctgaaagcacttcatttcgtcggcatgcaactggcttggaaggccatgccactcttgatttgaataatgctcaacttttccatgcgattgagtcaataaatcatgacagtgagcacagacatttgagtaatcttcctgtatcaggaattcctgagtattctatgactccatttggtataggactaccaagatatgacagtggcagccaacagagattcagatcatatgcacatcatcatcccctaatccataggtaatgaaattcacaccacatttattacatgggatattattttgggtgtgtactcaatttaaaggccagcacctcgcagtgggagcaatttggtggcaccaccattggggtcggttccagctgtggtggcggcggcggagaccgcaagaggcagccacatgtaccaacgctcgtccgtgcatggcagcccgttccctcctaccaccactagaagggtgaggccgagagccttgacgatcacatcgttcatcgcagcgacgtcctcaggtgagatcggaggcccccatggattctccgctcctggagccgccatgaacaggagcgtctctgacgctgagggcatctctagacccattgaccggccgtacaatgcatggggccgggagggcttcgctccgttcccctggatccccgctgaaggcgagtctcactggtggggcaccttcaaccctgtgcagaaccatgcgcatggaggctttagcagaaggcctgctggggagcggatgccgccgcagagccaaagccacccggagaacagctatcaggctgtgccgccgtcacagaggatgccgccgttcttgtgattcgacaaggctgttcctacgtccgatcgctgtgtataaaatgaagtattcggttcggggcctgagagagcacattgagcgaagatcgactgcactgcagtctccagcgttgggacctgtgtgatgtttatgccgctggtatttcagcgcttttctttttccctccggtccagcagcactctggtttcattgagcgctgtagactgtctgtcctaactgatgttgtgttgcgttgaggaggacgatttggaaacgtgagccgaagctgaactgcatctctggtctccgggactaaaaaatgccgtttgctgctatgaaagttgtatcgatttgcgaccgcaggtcgcctgcaaatttgttagaacaggtgaaatttagtgaacacaaatgttggagacctgcggcgtttacattttttttgttggttaccgagattgtatttaaaggtcgtgatgcgccatcaagcgattgtgatggatcaatttatctccctattgtagcaatgggttttttttgaaaccgatggatgtatatgtcactagaagtaaataccagacaaatatagttgtatccatgctaatttgacca

SEQ ID NO: 2613 - DNA, 2268 bp, Zea Mays
cgtccctaccctctcctgtcctgtcgttctcgtgcaagctcacggtcccccacgcccacgagcgcctccgctgcgacgaagagaatcatcaggcagagcgggggtggggcggggcgcagatggatctagagaggtcaccgccagcgtcgtcggcggaggcgcccggggacggcggcgggggcggggccgcggcctgctcaatctgcctggatgcggtgctcgcccgcagcgctggtcgctccgtcgccaagctacaatgcggacacgagttccacctaggtcggatcccccgcgccgctgctgggctacgttttttcgtcatccggatctgcctgtgatggccgccttggtcgggtagcgtgcgtcaccggcgtaatttgccgtaaaagaggctgaatttggcgtagaagaggaattctgatgtgtcgttttccaggatttcatagcgtcgtcgacgtggttcagacttaataacggagatgctctgacacatgttcggatggtgagcctgatgatgctgatgctgatgggagtgaaaactgcacgtattgtattgggtctgcattcaatgcaaaaggagcgatgcaatgccctaactgtcggaagattgagaaaggtcgctggctttatgcaagcggacatcgcgcctctgttgatattgatatgggtggctgggtgaccagtgacaactatgatatcacctccgagcttccttttggatttcaatggtgcccctttagtggattcacccggctagcatccatgtttgaggagcgtgaagctgagcttacttatcacacaactggagatcgctcaagtgctgcaagcagttcacttgtttgcccatatcttgccctgcgtggttttctgcatcctgttcatgtgccttctacatctaatcctggtgctgaaagcacttcatttcgtcggcatgcaactggcttggaaggccatgccactcttgatttgaataatgctcaacttttccatgcgattgagtcaataaatcatgacagtgagcacagacatttgagtaatcttcctgtatcaggaattcctgagtattctatgactccatttggtataggactaccaagatatgacagtggcagccaacagagattcagatcatatgcacatcatcatcccctaatccataggccagcacctcgcagtgggagcaatttggtggcaccaccattggggtcggttccagctgtggtggcggcggcggagaccgcaagaggcagccacatgtaccaacgctcgtccgtgcatggcagcccgttccctcctaccaccactagaagggtgaggccgagagccttgacgatcacatcgttcatcgcagcgacgtcctcaggtgagatcggaggcccccatggattctccgctcctggagccgccatgaacaggagcgtctctgacgctgagggcatctctagacccattgaccggccgtacaatgcatggggccgggagggcttcgctccgttcccctggatccccgctgaaggcgagtctcactggtggggcaccttcaaccctgtgcagaaccatgcgcatggaggctttagcagaaggcctgctggggagcggatgccgccgcagagccaaagccacccggagaacagctatcaggctgtgccgccgtcacagaggatgccgccgttcttgtgattcgacaaggctgttcctacgtccgatcgctgtgtataaaatgaagtattcggttcggggcctgagagagcacattgagcgaagatcgactgcactgcagtctccagcgttgggacctgtgtgatgtttatgccgctggtatttcagcgcttttctttttccctccggtccagcagcactctggtttcattgagcgctgtagactgtctgtcctaactgatgttgtgttgcgttgaggaggacgatttggaaacgtgagccgaagctgaactgcatctctggtctccgggactaaaaaatgccgtttgctgctatgaaagttgtatcgatttgcgaccgcaggtcgcctgcaaatttgttagaacaggtgaaatttagtgaacacaaatgttggagacctgcggcgtttacattttttttgttggttaccgagattgtatttaaaggtcgtgatgcgccatcaagcgattgtgatggatcaatttatctccctattgtagcaatgggttttttttgaaaccgatggatgtatatgtcactagaagtaaataccagacaaatatagttgtatccatgctaatttgacca

SEQ ID NO: 2614 - DNA, 2455 bp, Zea Mays
cgtccctaccctctcctgtcctgtcgttctcgtgcaagctcacggtcccccacgcccacgagcgcctccgctgcgacgaagagaatcatcaggcagagcgggggtggggcggggcgcagatggatctagagaggtcaccgccagcgtcgtcggcggaggcgcccggggacggcggcgggggcggggccgcggcctgctcaatctgcctggatgcggtgctcgcccgcagcgctggtcgctccgtcgccaagctacaatgcggacacgagttccacctaggtcggatcccccgcgccgctgctgggctacgttttttcgtcatccggatctgcctgtgatggccgccttggtcgggtagcgtgcgtcaccggcgtaatttgccgtaaaagaggctgaatttggcgtagaagaggaattctgatgtgtcgttttccaggatttcatagcgtcgtcgacgtggttcagacttaataacggagatgctctgacacatgttcggatggtgagcctgatgatgctgatgctgatgggagtgaaaactgcacgtgtaagagcaagtagtgctgttcctgcataattggagctccaggttgacttgcgaatccgaggcttggatttagcggtaatttaggttgcttcactagcggttggcctgttgccttgagggttgtcgtgatttagcttagttgttattaggcctataacggcttttgaaagcagggacaacatcaaagattgtattgggtctgcattcaatgcaaaaggagcgatgcaatgccctaactgtcggaagattgagaaaggtcgctggctttatgcaagcggacatcgcgcctctgttgatattgatatgggtggctgggtgaccagtgacaactatgatatcacctccgagcttccttttggatttcaatggtgcccctttagtggattcacccggctagcatccatgtttgaggagcgtgaagctgagcttacttatcacacaactggagatcgctcaagtgctgcaagcagttcacttgtttgcccatatcttgccctgcgtggttttctgcatcctgttcatgtgccttctacatctaatcctggtgctgaaagcacttcatttcgtcggcatgcaactggcttggaaggccatgccactcttgatttgaataatgctcaacttttccatgcgattgagtcaataaatcatgacagtgagcacagacatttgagtaatcttcctgtatcaggaattcctgagtattctatgactccatttggtataggactaccaagatatgacagtggcagccaacagagattcagatcatatgcacatcatcatcccctaatccataggccagcacctcgcagtgggagcaatttggtggcaccaccattggggtcggttccagctgtggtggcggcggcggagaccgcaagaggcagccacatgtaccaacgctcgtccgtgcatggcagcccgttccctcctaccaccactagaagggtgaggccgagagccttgacgatcacatcgttcatcgcagcgacgtcctcaggtgagatcggaggcccccatggattctccgctcctggagccgccatgaacaggagcgtctctgacgctgagggcatctctagacccattgaccggccgtacaatgcatggggccgggagggcttcgctccgttcccctggatccccgctgaaggcgagtctcactggtggggcaccttcaaccctgtgcagaaccatgcgcatggaggctttagcagaaggcctgctggggagcggatgccgccgcagagccaaagccacccggagaacagctatcaggctgtgccgccgtcacagaggatgccgccgttcttgtgattcgacaaggctgttcctacgtccgatcgctgtgtataaaatgaagtattcggttcggggcctgagagagcacattgagcgaagatcgactgcactgcagtctccagcgttgggacctgtgtgatgtttatgccgctggtatttcagcgcttttctttttccctccggtccagcagcactctggtttcattgagcgctgtagactgtctgtcctaactgatgttgtgttgcgttgaggaggacgatttggaaacgtgagccgaagctgaactgcatctctggtctccgggactaaaaaatgccgtttgctgctatgaaagttgtatcgatttgcgaccgcaggtcgcctgcaaatttgttagaacaggtgaaatttagtgaacacaaatgttggagacctgcggcgtttacattttttttgttggttaccgagattgtatttaaaggtcgtgatgcgccatcaagcgattgtgatggatcaatttatctccctattgtagcaatgggttttttttgaaaccgatggatgtatatgtcactagaagtaaataccagacaaatatagttgtatccatgctaatttgacca

SEQ ID NO: 2615 - DNA, 3621 bp, Zea Mays
acatttctgggttttgggtcgtctccacgggctgggtttggggtcggtcggcggcggcggcggagctaggagtggaggcctgagatatactccaagcgggagtctgggcgctctctgcggtcggagaggcgcgggtgagatctacgagggccgctgcgtcgttctcgcagggccggcggaagacatgggtttcctctcggcgaagctgctgccgtcgtgcgagagcgtgtgcgtgtgctgccccgcgctgcgcccgagctcgcgccgccccgtcaagcgctacaagaagctgctcgccgagatattccccaagacgcccgatggtgctccgaatgagaggaaaatagtgaagttgtgcgagtatgctgcgaagaacccattgcgcataccaaagattgccaagtttctagagcagaggagtcacaaggagctgcgctctgcccatgtgaacttcgtcagaatcatcactgaagcttacagcaagctactcttcatttgtaaggagcagatggcatattttgccatcagcctagtgaatgtccttaccgagcttctagaaagcaagcaggagaatgttcacatccttggctgtcaaactttagcaaactttattaacagtcaggtagacaacacatatgcacgcaatattgaaagcttggtgcacaaagtatgtgcactttcacgtcgacaaggagaggatcacaggcttcttagggccgcaagcttgcagtgtctgtcagcaatgatctggttcatgaaggagcattcatacatatttgctgattttgatgagatagtgcattcagtgctggaaaattataggacagaggaatctaatggtggtggtgatgacagacatgcattgcagcataattgggttgatgaaatagcaaggtctgagggtagacctggtgtaggtggtggtaatgatgtgaatattaacactacaactattaggttgcggccagcaagaaattcgtcagctcttacaagggatgaacgtgactccccagaagtatggtcacatatttgtgtccaaaagcttgcagaactggccagagagagtacaaccatgcgtcgcattctagatccgatgctttcatactttgatatgaagaaacagtgggccccacgacatggcttggctttgcttgttttgtctgatatggcttatctggaaaagagttcaggcaatgaacagctgattctaaccaccatcatccggcacttggatcacaaaaatgttttacacgatcctcagacaaaatcagatattattcagacagcaacgtccttggcacgacaacttcgatctcgaggatttgctgttgaacttgtagtggcaggtgacttgtgcaagcacttaaggaaaacacttgaggccgtggaatcaggcaatgttgaagatcagaatttgaacgaaccccttcagattgtcttggaggactgtcttatggaagttgttagaggaattaatgacgtacggccactctatgatatgatggcaatcacattggagaatttgccttctatgccaactgttgccagagcaacccttggaagcttgctgatcatttcacacataatctcgttgacatcagtatcttccaacaatctgatggtatttccagaagcacttctccagcagatactgaagtccatgttacatactgatattgatactcgtgtgggagcacaccacatgttttctgctattattgtccgagggccaagccatctgcggagtgaatcagagtacctatatgaaacaaaaaagcagtctcggaatacatctgtatttgcttcagctactgctctactggagaagttaaggagagaaaaggagagtttgagttcagataagcctcgaaatatcatgcatgatgatgtgaaggaaatgaacatgcatgaagaggataaacgaaaaaacccagcttatttctctaagctggtttcctctttcattgaaagatgtgcaacacgaagttctgtagaggagaccaatattgccatgctaactgaagatcaaaccaaccaattgctgtcttcattctggattcaggcaaatcaaacagataataccccttttaattatgaggctattggacattcatacagcctaacagttctttcttcccgccttaagaattcaagcaatggcaatatcattcagtttttccaattgccattatctcttcgaagtgttgctttaaccccgagtgaagttctgccggcttattgccaacggtctatttttacattagcaatgagtatgctggcctttgctggaaaagtttgtcacgtcgctgaactgtcggacttgctaaggtgtttttcatcttccaaagacaaaagtagggattaacgatcatcgagtgcttgatgttattgcctctgcactttctaatttcattgagatgggcaaggatgtaatagtgaaggagctgactgagttgttcacgcctgaagagatgcctctgtttgggtcgaattcagcacttgactgggccaacttcaatgcacaagcattttctgatgaatccctttcttttgatgaggaatgttcaagaacctcttcagtagattgtggcttgcacgagtcaccaatcaccaacactgctagctctatctcaaagattactctaccacagtctgttccacatgttttaggtgtcggtcaattgttggaatcagcactacatgtggctggccaggttgcaggtgcatctgtttcaacctcacctcttccatatggtacaatgactagtcaatgtgaagcccttggattgggcaccaggaagaagctatcgagctggcttgtcaatggacacgaatcaaccccggacaatcctatgccaagccttcccactgcccatcattccatcattcccaaggtaaaccctgccacgttccgcacatcatctgaatcatgttctgcagtaaagctcccacctgccagccccttcgataacttcctgaaggctgcctatcgcacccagcccgagctgtgatcgatttacctaagaacaaccctcttcacgagtgctaggctgcagtaccaaagcatagggtactagattatctaaaggaacttatctatgacgttgttttagttgtagtagcgtaactatgtgtatctatctactagatgtctgtaacgtttgcatatgtatcatcttacgactgtgcctctgtagttgtaagccgcgagttctgtgtcgcatgttcagactgagttgtatgagaatactgagtatgcttggcactcctgtatacagtatgcttgccaaaacgtttcttccgaggtcatccttttacacactccctacaattcagatgcctgaactttggtttcttcaggcgtctcctctccgtcacggcagtagacatggtggcggggttacggtttcgagattttggagatctccggtttatgactagagataaaagtgtgtttggttctggactataccagaatcgatttggtaatatttcttgtagatgttgcatctggtggctccttaaaactgaaactgaacctggtggcttgtgactagagataaaagtggatatcttaattgtttgaacaaatttaatattttaaaataaatatgtatgaaa

SEQ ID NO: 2616 - DNA, 3681 bp, Zea Mays
acatttctgggttttgggtcgtctccacgggctgggtttggggtcggtcggcggcggcggcggagctaggagtggaggcctgagatatactccaagcgggagtctgggcgctctctgcggtcggagaggcgcgggtgagatctacgagggccgctgcgtcgttctcgcagggccggcggaagacatgggtttcctctcggcgaagctgctgccgtcgtgcgagagcgtgtgcgtgtgctgccccgcgctgcgcccgagctcgcgccgccccgtcaagcgctacaagaagctgctcgccgagatattccccaagacgcccgatggtgctccgaatgagaggaaaatagtgaagttgtgcgagtatgctgcgaagaacccattgcgcataccaaagattgccaagtttctagagcagaggagtcacaaggagctgcgctctgcccatgtgaacttcgtcagaatcatcactgaagcttacagcaagctactcttcatttgtaaggagcagatggcatattttgccatcagcctagtgaatgtccttaccgagcttctagaaagcaagcaggagaatgttcacatccttggctgtcaaactttagcaaactttattaacagtcaggtagacaacacatatgcacgcaatattgaaagcttggtgcacaaagtatgtgcactttcacgtcgacaaggagaggatcacaggcttcttagggccgcaagcttgcagtgtctgtcagcaatgatctggttcatgaaggagcattcatacatatttgctgattttgatgagacatgcattgcagcataattgggttgatgaaatagcaaggtctgagggtagacctggtgtaggtggtggtaatgatgtgaatattaacactacaactattaggttgcggccagcaagaaattcgtcagctcttacaagggatgaacgtgactccccagaagtatggtcacatatttgtgtccaaaagcttgcagaactggccagagagagtacaaccatgcgtcgcattctagatccgatgctttcatactttgatatgaagaaacagtgggccccacgacatggcttggctttgcttgttttgtctgatatggcttatctggaaaagagttcaggcaatgaacagctgattctaaccaccatcatccggcacttggatcacaaaaatgttttacacgatcctcagacaaaatcagatattattcagacagcaacgtccttggcacgacaacttcgatctcgaggatttgctgttgaacttgtagtggcaggtgacttgtgcaagcacttaaggaaaacacttgaggccgtggaatcaggcaatgttgaagatcagaatttgaacgaaccccttcagattgtcttggaggactgtcttatggaagttgttagaggaattaatgacgtacggccactctatgatatgatggcaatcacattggagaatttgccttctatgccaactgttgccagagcaacccttggaagcttgctgatcatttcacacataatctcgttgacatcagtatcttccaacaatctgatggtatttccagaagcacttctccagcagatactgaagtccatgttacatactgatattgatactcgtgtgggagcacaccacatgttttctgctattattgtccgagggccaagccatctgcggagtgaatcagagtacctatatgaaacaaaaaagcagtctcggaatacatctgtatttgcttcagctactgctctactggagaagttaaggagagaaaaggagagtttgagttcagataagcctcgaaatatcatgcatgatgatgtgaaggaaatgaacatgcatgaagaggataaacgaaaaaacccagcttatttctctaagctggtttcctctttcattgaaagatgtgcaacacgaagttctgtagaggagaccaatattgccatgctaactgaagatcaaaccaaccaattgctgtcttcattctggattcaggcaaatcaaacagataataccccttttaattatgaggctattggacattcatacagcctaacagttctttcttcccgccttaagaattcaagcaatggcaatatcattcagtttttccaattgccattatctcttcgaagtgttgctttaaccccgagtgaagttctgccggcttattgccaacggtctatttttacattagcaatgagtatgctggcctttgctggaaaagtttgtcacgtcgctgaactgtcggacttgctaaggtgtttttcatcttccaaaattgacccttacctaagaataggtgaagacttgcaactctatgtaaggttgcaatcggatctaggcagctatggttctgaaagtgatcaagagattgccaaatccatgctttctgactgcaggacaaaagtagggattaacgatcatcgagtgcttgatgttattgcctctgcactttctaatttcattgagatgggcaaggatgtaatagtgaaggagctgactgagttgttcacgcctgaagagatgcctctgtttgggtcgaattcagcacttgactgggccaacttcaatgcacaagcattttctgatgaatccctttcttttgatgaggaatgttcaagaacctcttcagtagattgtggcttgcacgagtcaccaatcaccaacactgctagctctatctcaaagattactctaccacagtctgttccacatgttttaggtgtcggtcaattgttggaatcagcactacatgtggctggccaggttgcaggtgcatctgtttcaacctcacctcttccatatggtacaatgactagtcaatgtgaagcccttggattgggcaccaggaagaagctatcgagctggcttgtcaatggacacgaatcaaccccggacaatcctatgccaagccttcccactgcccatcattccatcattcccaaggtaaaccctgccacgttccgcacatcatctgaatcatgttctgcagtaaagctcccacctgccagccccttcgataacttcctgaaggctgcctatcgcacccagcccgagctgtgatcgatttacctaagaacaaccctcttcacgagtgctaggctgcagtaccaaagcatagggtactagattatctaaaggaacttatctatgacgttgttttagttgtagtagcgtaactatgtgtatctatctactagatgtctgtaacgtttgcatatgtatcatcttacgactgtgcctctgtagttgtaagccgcgagttctgtgtcgcatgttcagactgagttgtatgagaatactgagtatgcttggcactcctgtatacagtatgcttgccaaaacgtttcttccgaggtcatccttttacacactccctacaattcagatgcctgaactttggtttcttcaggcgtctcctctccgtcacggcagtagacatggtggcggggttacggtttcgagattttggagatctccggtttatgactagagataaaagtgtgtttggttctggactataccagaatcgatttggtaatatttcttgtagatgttgcatctggtggctccttaaaactgaaactgaacctggtggcttgtgactagagataaaagtggatatcttaattgtttgaacaaatttaatattttaaaataaatatgtatgaaa

SEQ ID NO: 2617 - DNA, 3742 bp, Zea Mays
acatttctgggttttgggtcgtctccacgggctgggtttggggtcggtcggcggcggcggcggagctaggagtggaggcctgagatatactccaagcgggagtctgggcgctctctgcggtcggagaggcgcgggtgagatctacgagggccgctgcgtcgttctcgcagggccggcggaagacatgggtttcctctcggcgaagctgctgccgtcgtgcgagagcgtgtgcgtgtgctgccccgcgctgcgcccgagctcgcgccgccccgtcaagcgctacaagaagctgctcgccgagatattccccaagacgcccgatggtgctccgaatgagaggaaaatagtgaagttgtgcgagtatgctgcgaagaacccattgcgcataccaaagattgccaagtttctagagcagaggagtcacaaggagctgcgctctgcccatgtgaacttcgtcagaatcatcactgaagcttacagcaagctactcttcatttgtaaggagcagatggcatattttgccatcagcctagtgaatgtccttaccgagcttctagaaagcaagcaggagaatgttcacatccttggctgtcaaactttagcaaactttattaacagtcaggtagacaacacatatgcacgcaatattgaaagcttggtgcacaaagtatgtgcactttcacgtcgacaaggagaggatcacaggcttcttagggccgcaagcttgcagtgtctgtcagcaatgatctggttcatgaaggagcattcatacatatttgctgattttgatgagatagtgcattcagtgctggaaaattataggacagaggaatctaatggtggtggtgatgacagacatgcattgcagcataattgggttgatgaaatagcaaggtctgagggtagacctggtgtaggtggtggtaatgatgtgaatattaacactacaactattaggttgcggccagcaagaaattcgtcagctcttacaagggatgaacgtgactccccagaagtatggtcacatatttgtgtccaaaagcttgcagaactggccagagagagtacaaccatgcgtcgcattctagatccgatgctttcatactttgatatgaagaaacagtgggccccacgacatggcttggctttgcttgttttgtctgatatggcttatctggaaaagagttcaggcaatgaacagctgattctaaccaccatcatccggcacttggatcacaaaaatgttttacacgatcctcagacaaaatcagatattattcagacagcaacgtccttggcacgacaacttcgatctcgaggatttgctgttgaacttgtagtggcaggtgacttgtgcaagcacttaaggaaaacacttgaggccgtggaatcaggcaatgttgaagatcagaatttgaacgaaccccttcagattgtcttggaggactgtcttatggaagttgttagaggaattaatgacgtacggccactctatgatatgatggcaatcacattggagaatttgccttctatgccaactgttgccagagcaacccttggaagcttgctgatcatttcacacataatctcgttgacatcagtatcttccaacaatctgatggtatttccagaagcacttctccagcagatactgaagtccatgttacatactgatattgatactcgtgtgggagcacaccacatgttttctgctattattgtccgagggccaagccatctgcggagtgaatcagagtacctatatgaaacaaaaaagcagtctcggaatacatctgtatttgcttcagctactgctctactggagaagttaaggagagaaaaggagagtttgagttcagataagcctcgaaatatcatgcatgatgatgtgaaggaaatgaacatgcatgaagaggataaacgaaaaaacccagcttatttctctaagctggtttcctctttcattgaaagatgtgcaacacgaagttctgtagaggagaccaatattgccatgctaactgaagatcaaaccaaccaattgctgtcttcattctggattcaggcaaatcaaacagataataccccttttaattatgaggctattggacattcatacagcctaacagttctttcttcccgccttaagaattcaagcaatggcaatatcattcagtttttccaattgccattatctcttcgaagtgttgctttaaccccgagtgaagttctgccggcttattgccaacggtctatttttacattagcaatgagtatgctggcctttgctggaaaagtttgtcacgtcgctgaactgtcggacttgctaaggtgtttttcatcttccaaattgacccttacctaagaataggtgaagacttgcaactctatgtaaggttgcaatcggatctaggcagctatggttctgaaagtgatcaagagattgccaaatccatgctttctgactgcaggacaaaagtagggattaacgatcatcgagtgcttgatgttattgcctctgcactttctaatttcattgagatgggcaaggatgtaatagtgaaggagctgactgagttgttcacgcctgaagagatgcctctgtttgggtcgaattcagcacttgactgggccaacttcaatgcacaagcattttctgatgaatccctttcttttgatgaggaatgttcaagaacctcttcagtagattgtggcttgcacgagtcaccaatcaccaacactgctagctctatctcaaagattactctaccacagtctgttccacatgttttaggtgtcggtcaattgttggaatcagcactacatgtggctggccaggttgcaggtgcatctgtttcaacctcacctcttccatatggtacaatgactagtcaatgtgaagcccttggattgggcaccaggaagaagctatcgagctggcttgtcaatggacacgaatcaaccccggacaatcctatgccaagccttcccactgcccatcattccatcattcccaaggtaaaccctgccacgttccgcacatcatctgaatcatgttctgcagtaaagctcccacctgccagccccttcgataacttcctgaaggctgcctatcgcacccagcccgagctgtgatcgatttacctaagaacaaccctcttcacgagtgctaggctgcagtaccaaagcatagggtactagattatctaaaggaacttatctatgacgttgttttagttgtagtagcgtaactatgtgtatctatctactagatgtctgtaacgtttgcatatgtatcatcttacgactgtgcctctgtagttgtaagccgcgagttctgtgtcgcatgttcagactgagttgtatgagaatactgagtatgcttggcactcctgtatacagtatgcttgccaaaacgtttcttccgaggtcatccttttacacactccctacaattcagatgcctgaactttggtttcttcaggcgtctcctctccgtcacggcagtagacatggtggcggggttacggtttcgagattttggagatctccggtttatgactagagataaaagtgtgtttggttctggactataccagaatcgatttggtaatatttcttgtagatgttgcatctggtggctccttaaaactgaaactgaacctggtggcttgtgactagagataaaagtggatatcttaattgtttgaacaaatttaatattttaaaataaatatgtatgaaa

SEQ ID NO: 2618 - DNA, 1915 bp, Zea Mays
atctctagtggattcggcccatcgacgatccgacggcggacgccttaaacccttctccttcctttggtccgcctcctccccgcccctccgcagtcgcagtgccgcagcatcgtcgccatggctctcctcaagaactccctcatgctcccggggcggttgcgccatgcggcggcggcgctcactgcgcggcgccacgcggcgacgttgacggaagagtacgcgcgccggaactacgccgataacaactccgagtacaacacggtcatcggatcgctcgtcgctcagcgcaggccctaccttctgcgtgatgcttacgacgacatgatgcttgatggcgtgaagcctgagcgggaaacgttccacacactcatagtcggtaccatgaaaggcagccggctacaagatgcgctttacttccgtgatcagatgaaagaaatgggtttgaagcctgatgttaacctttacaacttcttgatctccacttgtggaaaatgcaagaactcagatgcagcaatcatgaagaaatgaaggcacatgatgttaagttgaaaggagaaacctacatttgtctactgaatgcacttgcatcaacagggcaaactgatcaagtttatgccatagttagtgatatgagtgctgctggacttggattaaacaagttttgttatgctggattgataactgcattcaagaacaagacaccaaccgctgaggaaactatggcgaagattcttgacttcgtcgggcagtcgaaaggttggcaatatgttgaaagagtatcaaaggacattgctgagaatataatgatgaatgtgtcagaggaagaactgtacaacctcccaacagcagaatatgtaaataggcgaggaggatttgtctttaaacaacatacagtttatcatgttgctctccaagcttgtgcagaattgcgaagcaaagagacacttgaagcacttctggaaatgttcaataaggataatagagatggatctacttatgatgcctacatggtgatgcaagctatgaggtgttacctacgatgtggagatattgattctgctgttaagatgtttgaagagtattcaagctcgaggtccccacccgctgagttgtatgcgacacttgctgagggagctatgattgggtacactccaagaggaatgcaacttgctcaagaaactatagagaagatgacttcaagaaattttttcttgaatgccaagatgggaactgatctcctacttgcagctgccggtgaaacggctggtggatatacgactgcaaattatgtctgggatctcctgcaaagccgtaaaatcactccaacacttcctgctgttgaggcataccacaagggtctgacggcgcgagagattccttctgacgatccacgacttctcaatgttacccgtgttttggacaacctgaagctccgatttggaccaagaagaaacactcagtaacttagaaacaatattgtccctgatacgatgcaatcagtaatttgtctttgttaggtttctggatgcgaaggcatgtttacagtccgaaaaaccaaggaagttcatcaggatgacgtaaagcagaaccaccaggcatttgaggggcatggcaggtgtgggaatcaaggtccggaaacggaagccagttgtttccagggttttctcgagaaatcttcacctgccaagcctgaagacctgaactcggatgcactgggttttgatttgaaatttaatgtatcctatgttgcctaccattgtttgacaaccatttatccgaacttttgatctagaagacagcgggaatatagttgtgcgcgagtcaagctgtaggtcgttcgttttgacgcttcctctatgtactatctattagtactagtctaatacccgtgtaatgatattgattagatgactaa

SEQ ID NO: 2619 - DNA, 3448 bp, Zea Mays
actcacgctcctctccactccgtccactactttcacctgatcgccaccactacctccacctggaacctggaagagagagagacaatggcgtgtaggccgccatgtccatgtggctgcttctgcttctacatggtgttcttcctcggcttgctgctcgtcgaggccgtccatggcacagggcggagcgaggtggccgcggccgctccgactccgagcctcgttccagctgaagcgagcgtccttcgccggatcgcggccaggcttggtgtgtccagctgggacttcaccgccggcgccggtccctgcgaccacggagactccggggtgcactgtgactgctccttctccaacggcaccgtctgccatgtcacagagatattcctcaaggggcagaacttctccggtgagctcccgcctgacttcgctgacctcccctacctcctccagctagatctaagcaggagcttgttccatggcggagtgcctcaccagtgggccaggatgaagttacaaggactgtcactgatggcgaatagattgtcagggccttttcccatggttctcacaaagatcacaaccctgactaacctgagcattgaaggcaatgagttctatgggccaatccctcctgaaattgggtatttaattagaatggaaaagctaatattatcaaccaatgagttcactggaccccttccagctgctctttcgctattcagtaatttaactgatttgaggatttctagcaccaatttttccggaaggatacctgatttttggggaaacttgaaaaggcttgacaaattgtgagacggcaaatagaaggatctttcttagaagggccaattccctcgagcctatctgaattgaaaaacctttctgatctgaggattagtgacctgagaggtagtggttcatctttccctgatttaagtggaatgacatacatgaacaaattggtactaaggaactgttccatcagtggaagcatacccccatacattggcacatggacatctcttaagcatctggatctcagctttaataaactgagtggagaaataccaccttcttttgctagcatgggagctgtagattacatatatctatctggaaattcactcaccgggaacatacctggatggttattaagaagaaacaagatcgcggacatatcttttaataacttcacgatggggagttcaggtccgagccaatgccttcaagggagtgtcaatctggtggagagctattcagctgaagtgaaccgtttaaatagtattcatccatgcttaaagaggaacttcccatgtgttgcttcgaatggacaatatcactcttcactgcatatcaattgcggcgacaaagaagcaactattaacggaactaaatatgaagccgacacaacacccaaaggggcatcattgttgtatgtgtccccaggcttgaactgggcattcagcagcaccgggaacttcatggacgacaacataaatgacgacaactacatagcaacaagtgcatcaaaattggccgtgcccaattcagatctgtacaacaaagcccgtctttctcctctttcgctcacatattatgggctttgcatgttaagtgggagctacacagttaatctccactttgctgaaattgttttcacaaatgacagcacatattatagccttggcaaaaggagattcaacgtgtttatacaggggagaatggtgctagaggatttcgatattgaacagtcatccggtgcggctgcaaaaccagttaccaagacttttcaaacatatgttacaaatcacactctagagattcagttctattgggcaggaagagggacaacaggcattccatatagaggttcttatggcccactgatatctgcaatatcagtaactccaaatttccaaattccattggctgttgaccctcccaaagctggaagtagggaaaaaaggagttcaagggcatctattgctttaggaattggaattcctattgtagcaatattcactgctctgattctcggcatttattgtattaagaagcagagaaagagttcgatgcatgaagaactcagagcccttgacctgcaaattggctccttcaccttgcgtcaaatcaaagcagcaactaggaacttcgatgcagctaacaagattggtgaaggaggatttggttcggtttacaagggtttattatccgatggcaccatcatcgctgtcaagcagttatcatcaaggtctaaacaagggaatcgggaatttgtgaacgagataggcatgatatctgcactccagcatccaaaccttgtcaaactctacggctgctgtacagaaggaaaccagctgtcgctagtttatgagtacatggaaaacaattgcctcgcacgagctcttttcgttgaacagtatagactgagaatggattggggaacaaggcataagatttgccttggaatagcgaaaggtctagcatatttgcatgaagagtctgcaataaggatcgtgcacagagatataaaggccagcaatatactgctcgacaaagatttgaatgccaagatctcagattttgggctagcaaagcttaatgaagatgatcacacccacataagcacaaaagtagctggaactatcggttacatggctcctgagtatgctatgcgtggttatttaacagataaagctgatgtatacagttttggtgttgttgttttggaaattgtcagtggaaaaagtaacacaaactacaggccgaaggaagactttgtttatcttttagattgggcttgtgttctacatgagagaggaactctactggaattggttgatccagatctaggatccaattactcgacagaagaagcgctcctcatgctgaatgttgccctgctatgcacaactgcggcgcctacactcagaccaaagatgtcaaaagttgttagcctgcttgaaggcagtgccccactgcagcctttgctgtcagacctcagccttgcagcaaatagcctgagctcaagtggtgtacgcaggaacttctggcaaaacccaggtgagagtcagagcctgacagcacaagcttcatgcagcgatactaatgaatcatccaccattgatatagatggtattctactggtaagttagatgtagtttgctgtgcatcatgaactaggtttacatgtaggaactactaagcataggccagcatgtttgtattaagttcaccagtgcaatgtaaatagcaagtagcatactaatgtctagtacaggtagagccctatgcattttacaccagtgcaatgtaaatagcaagtagcatactaatgtctagtacaggtaaagccctattcattttagtagtctctgtttcatattacatgggaatattaagatgtctgtgacagaacactggaagttctctatggactatagtctctgag

SEQ ID NO: 2620 - DNA, 2601 bp, Zea Mays
cgctcctcccccaacgcgactatgctcgttgaggacggagaccggtaatattcgccgcggagtgttcgagaatcggaggcttggacttcgagtgcctcctcggtggcctcgcgtaaagcacggcggcgcgaagacggctgcggaattcaggtgctttccctgctttcaacgccggctggtttcgtctgacccgggaacattgcttggtgtgtgaagctgcccaactgctttcttcgcgaggtacttgcacgggacaattgacaaagcctgtatggtccaaggaactgaagttgcagacttcctccgaaggaatagtttttcttcctttcaccggactacaattcggtgccattcgtcaggaattgagggtcaactgactactctgctcgcttctttccccaagctcagggttcctccacaactgtccagtgttcatcgcaagctccttgcaggtttacgatggatctaggaaactccttgcaggttcacggtggatctaggtgaaggtgccgttagtcgagtgtgtggctctacggatcctgatcagtctagcgcagctttccctctgaccatttcgaggggactcctttctctggtttagctccattcaatagagatgctgtaatttctataataaagtggtccgagtgaatcatcctgtgcccttgcacaagcctcagtcactccataaatggctcggaccactgaagatgatatagaagatgtgccgtgctcagatccaggttcaccgtttctggctgaatatcatatcgcagttcctgctcttcatgatggaccaacgcaaggtgcagctcgtcatgagcgacggcttcttgatttcctggaagccactccctcggtgcagtggctaaagaagatcaacctttgctccccgttgataaaactccggcttccatccactggcgcccatggcagccttcatgctcagttcatcagaacgatccactggagttcagttttcactgtatgcaagaaatggctcaagcatcctatgaacatagctctcctaatatggctgctctgtgttggtgcctctggtggcatgctagtcttactaatgttgggactgctgaacgacgcattcccttccaagcccttaaggaaccagtggatagagatcgacaatcaaatacttaacgccctcttcaccctcatgagcttatacgagcacccaaatttcatccaccacactgttctcctctgccggtggctgccagaggacgctgctaagctcaggaaagtttactgcaagaatgagatgccccgtcgaaatgagcgagcacacatatcctttgtggttgccctcctccacatcacttgcttatgccagtatgctgattgtgggctgtactggggctaccccagcacatcacgctctgattttgccgacaacttcttcttcatcctaggcatagctgcaccagtctttgctgggctatacgcagtgtacagtcctcttggcagaggcaacgatgctctgtctgatgaagaaaccaatgaatcaggcacggttcgggtcgtcgagtcgcctgaaacaggaactgtggtgagcaatcccgcatgggctggcgggctgtttgactgcagcgaggaccccactgcatgctacctctctttcctctgcacgttctgcgtgtttgggtggaacatggagcggcttggattcggcaacatgtatgtgcacacggtcatcttcctgcttctgtgtgttgcgccgttctgggtgttcaatgtcacggcaatgaacatccacaactacgtcctcggtgatttcatcggcgctgcagggatcgtgctgtgtttctttggtctgctgtacggtggtttctggaggatccagatgaggaagacatttgggctgcccagaagcaggtggtgcttcggatcggcgtcactaacagactacacgcagtggctattctgctggccttgcgtgcttgcacaggaggtgcgcacggggaatctatacgacgcgaagaacggcagcttctatgagaaagttatggacggcgatggtgtggagactgatgcgggatcagtggatacggccgaattgccggtctcttgtggagtagaagaggcgaacggtatcgatgtcaaactcacggtggatggtgaaatgatcccacccacccaaccagtaatagaatgtggggagagggaagggatcgattcagaagtcgtggcaaatgaaggacccgcaactgaaggatggtttgagttatggtatttagctgttcagttgcttagtgatttagcttgttttatattaaaaggacgatggaacgaataggcgataatgccagagatatctaaactgatgttttagaggtgcaggctaacaggaaaaaaatttcatacactttattacaccgattgatttcaacagcaggcttgagcctcttatagagcaattgtgcaagtcggctaatgtaatcagtaactttatattattggttggtgacagttgaaaaggatattcttatcttctctagtcctgtagtggcctttggctgttttccagtgctccttttagagtgtgaagtgctgtccgattttgtgttttcaccttatcattaa

SEQ ID NO: 2621 - DNA, 2018 bp, Zea Mays
ggcaaaatccattggagtattcgacgtctcgtaacccctgcctcccacgcaccccaatgtctgacaagaaggacgacgaggccggcacctcaacgccgagtgttgcggcggcggcggccccggccccggccccgaggccatccacctacgcgcccatgggcgcgctgcgggacgaggagtgcgctaatctcctggccctggtatccaccgtctcgcgcccgctcgaggacgccgtcgcggatttcctcgcacgcgtgccccccgatcgccgcctccggttcggcacctccatcagcttcgtcctcgaggacaagatgatgcttcaacctgctgagcgtttagttgcatttgcaattctacatcaaggttattcctcacagttggcaaatccatttcttcctcttttaataaatgctgcatgtgatgaaacttctgaggaagcagaacaagcatttctccaacttctgttaagttcgactaatggggacaacattgaggttctaaagcagtctgctgtcgcttacttgaacggatctgattatgcatctcaggtctttttgccaagagaacagcttgagaaacaatgttcctatgatgctgcacgacctctgcccttctctagtaatttcagagatgccactgtcagaagtactattcctgacccagatgttctccaaagctttggtagttcatcagagctgtcctcaataataccaaatagagatgacatggttgctactttacttcaacaaacatcacttaaaggattgcctcctcaatggatacgaccctctccaccaagacttgaaatttttgaaggggaattacagtggctgaacatagacaataaccatgagctactatgggacagtaccatgtgtgcagacactagccgaggtgctgtgattcgagatctggtcgaacaagcttgtaaagctccacttgcattggcccagcatgaggaaattaccaaatatctgcggaaggactggaagctagtttatcattgtggaatgacaccacagaagctccctgatcttgttgaacataatccacatatagctgttgaagttctttcaaagctaatcaactctccggacatggatgcgtactttgatgctattgttcatatggatatgagcttgcattcaatggaagtagtaaatcggctcactactgcagtagttttaccaccaggatttgttcatgactatatctcaaactgtattcgatcatgtgaagacattaaggacaagtatatgcaaaatagactagtgagactagtatgtgtttttctacagagcctcattcggaacaggataatagatgatgcttggttgtgtgcagtgcaagatctcttcgtggaggtgcaagcattttgcatcgccttctcgcgaataagggaggcagtggggttgttcaggctcctgaaatctctagaatgaagagcgctgcaccatcagttgggcgctggattctcagaacagaaattcccaaggtggcgtggattttgctggtatattggttatcatcaagctgcgtcccctgcatcatccccgaaagacattgaggagaaacaaatccataggtctgacaggttgggttcgaggtagagttagttctgttggaagtgtccacggggcttgtcgttcttgtgcagtaggcaacaatggcaagccccgtagttggtttgctcgaaatgagcgaatggtacggtgaactcagaaataaccgggatagagtatccgactgtcagtcatacttgctctacggcatggtatatttattcattagcctcataaacggttgcttgctatttaggctgtcatacctgtatttcgaagttcattgttacatcatgcagatgtgagacagctattgcctggcataccgtatcatgtagtacgtatgaaaaatgaaaggcagcagggctgtatccagtggcttcatgtgttggcctgggtccgaagtggtcatccatcaacctagacactgacgggagggcgcaggcgcgcagc

SEQ ID NO: 2622 - DNA, 6900 bp, Zea Mays
atgagcgggcggcggggtccagctgccacaggaggcggacggggaggcggaggcggaggcggcgggaactggcggcggagcgggtcggcgaaggcgaaggagcagcggctgcgcctgggcgcggaggagctcctcgagagccggctaggattcgcgccatacactgatggggagcggcgcctcggatggcttctcaccttttcaccgtcatcatgggaagacgaggacaccggaaaaatctacagctgtgttgacttatactttgtatcacaggatgggtctacgtttaaagtgaaatacaagtttcggccttacttttatgctgcgaccaaggacaagatggagttggaagttgaggcatatattaggcgacgttatgaaggggaaatttctgacatagaaataattgagaaagaggatttagatctgaaaaatcatctttctggcttgaagagaaaatacctgaagcttcagtttgacaccgtacaacaattaatgcgtgtaaggaatgaccttttacatgttgttgaaaagaacgaagaaaaaatagatgctgtggaggcatttgaatcaattcatggtgtaaaaagggtagaaaggccacaagattacataaattacatcattgatttgcgtgagtatgatgttccatatcatgttcgttttgctatagataatgatgtcagaagtggacagtggtacaatgttaatgtatctggttctgatgttttgcttcagagaagggaagacctgcttcagcgtgcagaagttcatgtctgtgcatttgatattgagaccacaaaactgcccctgaagtttccagatgctgaatacgacaacgtaatgatgatttcatacatgattgatgggcaaggatacctgataatcaacagagagtgcgttggagaagacattgatgatttggagtacacacctaaacccgaatttgaggggtattttagattggatctacttaaagcatggttttctcacatgcaagaggttaagcctggcatttatgttacatacaacggtgacttttttgactggccatttttagagaagagggctgcacaccatggaataaaaatgaatgaggagattggtttccaatgtgacaataaccagggcgagtgtcgggctaaattttcttgccatcttgactgttttgcttgggtgaagcgagacagttaccttccacaaggaagccaaggtctaaaggctgttacaaaagccaagctaggttacgatcctctggaggttaatccagaagatatggttcgctttgcaatggagcagccacagacaatggcttcgtattctgtatcagatgctgttgcaacatactatctatacatgacttatgtccatcctttcatcttttctcttgcaaccataatacctatgtcacctgatgaggtactgcggaaaggaagtgggacactttgtgaaatgctgctaatggttcaggcattcaaggctagtgtcatttgtcctaacaagcaccaagctgatcttgagaagttctacaataaccgtttattggaaagtgaaacctacattggtggtcacgttgagtgtcttgaaactggcgtctttagatctgatctccctacaaagttccaacttgaaccattagcatatgagcaactcattggaaatcttgatcgtgatctgcattatgtcattgctgtagaaggaaagttggatattgattctgtcacaaattatgatgaagtcaaggatgccatagagcaaaagcttgttgcattgcgtgatcacccaattcgcgaagaacgccctctaatctatcatctggatgttgctgctatgtatccaaatattattttaaccaatagactccagccaccatccatagttacagatgtggactgcacagcatgtgatttcaatcgtcctggaaaaaattgcctcagaaagcttgaatgggtctggcgaggagagacctacatggcaaaaaagaatgactattatcacataaagaggcaaattgaatcagagctgattcaatctggtggcattgcatcgtcaaagccttttcttgacctctcaaaaccagaacatttacttaaattgaaggatcgtttgaagaaatactgccaaaaggcgcacaaaagagttgttgataaaccaattactgaagtcagagaagcgggaatatgcatgcgtgaaaattctttctatgtagacacagtgcgtagctttcgtgatagaagatatgaatacaaaggtcttaacaaaacatggaaaggaaaactcgcagaagcgaaagccagtggaaattctatgaaaattcaggaagcgcaggatatggttgttctatatgattctttgcaacttgctcacaaagctgggaagaagctaactatatcttatccctgtgtcatgcttaatgctgacgttgcaaggaacaacactaatgatcaatatcaaacattgaaagacccagtaaacaagacatatacaacacacagtgagtgttccattgagtttgaggttgatggaccttacaaggccatgatcttacctgcctctaaagaggaagggattctgataaagaagagatatgctgtcttcaatgaagatggcactttggcagaacttaaaggttttgaaatcaagcgtagaggtgagctgaagctcataaaagtttttcaggcggaggtatttgacaaatttcttcatggttcaactttggaggaatgctattctgctgttgcctctgttgctaaccggtggttggacctactggataatcaaggaattgatattgctgacagtgaattgcttgatttcatatcggagtcgagcacaatgagtaaatctttagttgactacggagagcagaagtcttgtgctgtaactacagcaaaaagacttgccgaatttcttggagattcgatggttaaagacaaaggactacattgccaatatattgttgctcgggagccacaaggcactccagtgagcgagcgtgctgttccggtagctatattcgagacagatcctgagatcgcaaagcattatttaaggaaatggtttagattctcctctgatgcaaacattcgatctattgttgattggtcttactacaagcaacgcttaagttcagctattcagaaaatcattacaattcctgcagcaatgcaaaagatctcaaatcctgttcctcgagttcttcatccagattggttacacaaaaaggtcagggagaaagatgatcgatttcggcagcgtaaactgcgtgatatcttcagtcccttggctaaagaagaggggctgcataacttgaataggactggagatatggaagatttattaatttcaaacaaggatttgaggaaaaatccttctcatggtttagacattgacaaagaaaacaatccaaatggagcatcagtgggatctggtttgaatattagtaaaaaacaacaaaactgtatgactgggttaaatgttccttgcacttcacaaatccaaaatgctgcttcttatgaaacagttgataagggtactgactatcaaggatggcttgatgctaagaaaagaaaatggaaatatgtccgtgaacaaaaaaaacgtcgaaggttgggtgctgccgccacttttgacgatcctaacgctttgctctcggccagacatgccaatcagctacctgtcaacagtcggaatagatctacatttttccagaaacaagaattggccctctttagatcacattggcagataatccagcttgcttcaagtacagtgcctggtcacttttttgcgtgggttgttgctgaagggattatgttcaagattcctattaatgtgcctagaactttttacctaaactcaaaggctcctgtcacagaagagtttccaggaaggcgtgtcaaaaagattctcccacatggtagaccttgtttcaaccttattgaggttgtaacaactgaagaacagttcagggctgaaggcaaaaaacttgcagctcatctagcagagccagatgttgagggaatatacgagacaaaaattccaccagagctcaatgctgttctccaaatcggatgtgtctgcaaagtggacaagtctgcaaaaagacgaagtatacaagatggatgggatctagccgagttgcaaatgaaaacaaccgccgagtgctcatatctggaacagacattttcatttttctatttataccacagcttgagtgaaggaagggctgtatatgtattttacttccccacgtctttccgaatacatgcagtgattgtcaatcctttccgtaacaaagaaatatctccgtcatttcttgaaaagcaatttggagatgcttgccaagcccttggttctgtccctgagaatctgtctttccatgtggactaccaaacatcaattgatgctggaagcaaatacgcacaaagaatgttacttgagtacaggcaacaacattctggacctgtcgtaggcatcatagagtgccctaagctccaagctataaaggtagctatacgagcacttgatgatttgccatgtgtaaccattcctagcaatgcacgtgacaacaactatcaggctcttggctggcaagcaacagctggccgaacaagtatgcagcgttgtgctgcatcaacccaatggttcaatgaacggatttcactcgctaaatatgcacatgtgccactgggtaattttgaactagactggcttctttttactgccgatgtattcttttcaagggcattgcgtgatcaacagcaggtactatggatatctgatgatggcattcctgatttaggaggcacttatgaaggagagacatgttttgctgatgaagtcattcagcctgcacttacttatcctggtgcatatagaagagtttctgttgagcttaagatccaccatttggcggttaatgctctcctaaagagtagtcaagtggacgaaatggaaggaggatcaatcggtagctttggaaacgacgtgcctccgggttcaaatgccactgaaactgactttgatgatgctagcttatgtatacctgctttccaggtgctaaagcaacttattcaaagatgcatttcagatgcagtgtcgtctggaaatgtatttgctgatgcaatattgcaacatctctaccgctggctttgcagcccacgatcgaaacttcatgatccagctctccatcgtcttcttcataatgtgatgaagaaagtctttgctctattgttggccgagttacgaaagctgggggctaatgttatttttgcaaacttttctaagataatcatagatactggaaaagtagatttgtcatctgcacatgcatattgtgacagcttattaaggaccttgcagacgagggacctcttcgagtggatagaattggaaccattgcacttttggcattccttactgttcatggatcagtataactatggcggaattcaagctaaaacacaaaacgtagactcttcagatggtgataatgatattgatattgtctcaagctggaacatggcagaagatttgcccaaagatacacaggatcattttgtcttaatcgtatcagaattcctatatattccgtggaaattcatgaaggaacaagtagctgctcaagctaccataagggatgatacctcatgcactccatctgtaacaatcatggctgctgagaatcttgagggccaggtgatagaacacctccgtgacaagattagcaattactttgcagacaagcttctaagaactgtaagtgatatacttcaccatttcaaagggaaaagcaaacatgagtcagatgaacctgcaaaatctgatcctcacacgcataaaggcgatgctgcattggagttcattaagcatatctgtgcagttcttgctcttgatcaaaatgttcagcatgatattttgagaatgaggaagaacctgttaaagttagttcgtgtaaaggagtttgctccagaagcacaattccaagacccatgcgcctcattcactctgccaaatgtgatctgcagctattgcaacgattgccgggacctggatctctgccgcgactcggcactccagggccaggagtggagatgcgcggtgccgcagtgcgggcagccgtaccaccgcgagcagatggagaacgcgcttctgcaggtggtccggcagcgagagaggctgtaccacctgcaggacctggtgtgcgtgcgctgcaggcaggtgaaggccgcccatctgtcggagcagtgttcctgcgggggctccttccggtgcaaggaggagccttcgtatttcctcagcaaaatgcgggtgttcctgaaggtggcggtgagccaaaagttcccgctcctgcaggactgcgtgcagtggattcttgaagccagatgacgcgggctgctacttcaacatagttcattagttcacctgatcgctaggttgtacaacgtgcacaggctgtagctccgaagagtgtataaacgggtgtatagcgctgccacagttcattgtagctctgccctgcttgcaaaaggttgttgttgtattgtagatattcaaaggtggatggcgagaaacgatagtaaccttggtatcgaaacatctggataactagccctctcgtatgtgattgctgggcatagactattctaagttatgatgtgggcatgtggttgcataagcggtttcgatgacgtgaatagaaatacacgcgtcggaccgtatgctgccagcctgccagtacactgaccttggccacgtcatactagttgtctgtttctgttgccaatcctacactgtattatctgcacaaaggaaaatgaaacggaggacgttgtgctttcgaggggccaggactcgttgggtggatgaagcacgcgtgcccggtgacctcagccttta

SEQ ID NO: 2623 - DNA, 1884 bp, Zea Mays
gtcaccatctccctccctcgccttggatccctgcgcacggctcgagccgttccgcttccatccgtcccatttccactacccccgccctctgccccacctcctcctcccatgctggtggcattgtgaccgtgccaggccccccgctgcgctcccctgccctctgagcctgtcgccgcgcccgcacgcacgcaggcagcagcagccagcacgctgcacgccgcgccaccgccacaccgtgcctgcgtgcagtgccgtgccgtgcgggcttgccgatccctcctcacccctctccagggcttgcgggtggttggaaaagcagaggacgaggaggaaggctgccgctgccgctaccgctaccgccgtagcgcgcgctaggtgcctttggctcacgggttccaggccgcccgcgccgcggcgcgcgcctttttcgctcacacggaaagtgccccgtgcctgtgccggcctgcccgccgccccgcgcggcctggccgtaacatccgaaccgccctcaatggcgacaccacgggctcctcaccctcctacgcattagtagcagcggccgcaggtccgcacccccccactcccacgcacactcgtgcgtctctcctcctcctcccccgcgtcgcgtgcgcgctctgcttcccttgccgccgtgcgctgcgagggtcgactgtcgagcgcgcgctgcttgctgctcgcctggccgtcgatgagcatggggcgcttcgtcaactccatggatccgacgtcggggctggaggtgatcagggactggaacggcgtcgcccaggtcgtgctccgctcgcccaagggagcctccgcgcgggtgagcctgtgcggtgggcaggtcgtctcatggaggaacgaccgcggcgaggagctcctcttcaccagcagcaaagcaaccttcaagccgccaaatgccatgcgaggtggaattcagatgtgtttccctcagtttggatactctgggacattggagcgacatggatttgcaagaaacaggatatggtccctggatgatgagcagccaccactgaatcataatgataacggaagcaaagtttctgttgaccttattctaaagccatctgaagatgacctcaagtgctggccacattgttttgagttccgtctgagggcctctctttcaaaggatggggacttgtcattgatatcacgcatcaggaatgtcaatggcaagccattcagtttctcatttgcttatcacacatatctttctgtttctgacatcaggtcagtgaggtcaggattgaaggtctggagacacttgattatcttgacaaccttagccacaaagaacggtttacggaacaaggagatgccataacatttgagtcagaggtcgaccgagtctacgttagctccccaaatgtagtagcagttattgaccatgagaagaaacactcgtttgtcataagaaaggaaggacttcctgacgttgttgtgtggaatccatgggaaaagaaatcgaagaccatggtagacctcggcgacgaggagtacaagcagatgctttgcgttgatgcggctgctgtggagagagcaatctcgctgagaccaggggaggagtggactgggaagctggagctttctgcggttttatccactaactgcagcgaccatcttgatcatcctgtcagcatctagcgtttattcccattgtagtgctatatatttgcctcacaagagaagtatgggccccttttgtaaatgagatcaataggtagctctgttatcagttagcagctcgacttgatcctggaaccggcacaatttgtgacctgtttttttaatgtgagtattgaatgatagcagcgccttgcttcatgcataatgcacacaaaatggcaagatttatca

SEQ ID NO: 2624 - DNA, 1731 bp, Zea Mays
gagttttcatctcatgcaattttgacatcaaacgaaacacatcatggttcaagacagaatctcagtgctaaaattgaaagcagccaatacagggttctaaagttggaaagagtagcttttggtgtctcatgtttgtaaataactccttcctcccatctgatctgaaacaatgcgcatcctttgccccccttttgatgagaaaaatacgaaccctaaaatctcagctccacaagggtccccgtccacaatggccaccggcggcggcgcgaacgagacggccgtcggcgccggggaggagaacgcgagcgcttccaggatccccacccgcaggttcttcgtggcgctgcacgtgggcgccggcttccacgctccggcgaacgagaaggcgtaccgcagggccatgaagcgcgcctgcctagccgctgcggccgttctccgcgaggtccgttcaggcggtcactgagcgtttaccattttatggcccactatctccctccttgtcatggcttggtaagttggtatggcgtggcgcttggattttagccgctgatcggaattgtcgagtgcgtagggtacaattgggatcgggagattggggtacactgtccatttgcgtcagtgagacgtggtgcattataaactgagccgaccatgacctacttgttttcagtcctataaatttggggtttctgggtgactaattttattaccgtagcttcaggagattgttgctgttcaaaggataacttcaggttgtgctggaccattcacgtttgcaccatgagcactgggacagtacgatgtgtcgatggcactggcacaagcctggacgccgttgctgctgccattcaagttttggaggatgatcccgtcacaaatgctggtcgtggttcaaatttgactgagagtggtcacgtggaatgcgatgcaagcatcatggatggaagtactggttcttttggagctgttggagctattagagatgtaaagaatccaatccaagtcgctttgcacttggcaaaggaacaaatggcgggaccgtcattgcttggtcggataccccccatgtttctggttggtgagggagcatatcaatgggcaaaatctaaaggaatggacctagttgaatctacatcggaggctaatagttggttggtgactgagaatgcaagagcgcagtgggtgaaatacacatcattgcttgttaataccaaaaaatcactatatcatagtactggttctggttcagaacatcattcagttcaattggaagcacaaggaactgaatctgagaatattgctgatgcaaagaacatatttacagagtcattcatgggagacaatacagatcacataacggatactgttggggttattttgtgtagatagctacggaaatgtagcatcaggtgcatctagtggtggtattgccctgaaggtagatggccgggttgggttagcagctatgtttggctctgggtgctgggcctcgtccaaaggaccctttggtacaccattcgtagttgcttgttgtgcaactggagctggagaacacttgattagaggatttgctgcccgtgaaagttgcatctcatcgtcgttgtcacaatctggtcctgcttctgcgtgcactaaagttctccgctctgtggttcaaagcagcagcaagatgtctcatgatacaggcgctgggtcttgctagttcaggctgatgttgtaaaggtgggtatt

SEQ ID NO: 2625 - DNA, 2421 bp, Zea Mays
atcccagtacgtactcctacatcgcttgcttttctcaagtcacagggccggcccagcccaaaatccttttcaccgctacgacctccgtgctccggcgatgcagcggatttcgctacgacttctgcgctcctcctacaccgccgcctccgcctccctctccaccacctcctcctccctccgcggcctggcagtatcccatggcggttggaccacccgaccgtcgctgcagcctccggtgcgaaccgcggcgccggtcgacctcaccaggtggccgccgcggaggggttactcccagttcgcgagcgggttcaccccgctgaagccgaagccgctgggatccatcctcgacatcgaacgcgccaagggcctctcccccgaccacctcgtcgccgcatgggatgacgtcagtccccgccccctcattagtcatttcattcggtttttttgtggtttgtgtgttataagaattgaggagatcccctctgacggccgtcgtaggtaagcatcaaaatgtgatattctgtcgtgcgtgtttgatacttattttaagcaccgtgcctgtaacgaattttctgtgtgcgcgactgcgggtatctgaatgatctgttgaagggaagagatgaaaggatataaacgtccattctaatcgcagaccttttcaattgcaaatgaaggtgtttgataaagtggaagtttagacttcaattattacattgctaatggaagaacatgccggcgaagcatgcaagtagatttattcccttaccacgtttgaagaggaaaaaaaagaaatagtggtgatattttgaagctgtggtaaaattggccgtttcgaaaagttatgttgaacttaacttataattaggataaagtgtgctatagaatctcaacggttgtgatgtgatctccacagcatcattctagctacgtatttggttttcagttccaacttccaaggatatctgtatttgacagcattgtgcaactgtcatgtcactctagtgacatctctgattttgcttgtttggactaagtaatgaagggatttggaaagtggctagtattcattggaaagttaaacagcattagcacaatacttttagaaacattgcattttgttatggcttcaattatacattgcattagagaaactttatttgttgaagattgaactggcattgtagttatactcagcaaaattctcacaggtgattcttagtaaccatctttttgtgctgttagatgcatacatgattttcatgtgtccgtacttgtgtgtgcgtgttgggggatattctctgatctttttgaacttctatattcataaggatgacattttagtttccattccaactctattatttgtcctgtctaaccccaaaagaaagatcaagaacaataattttcagtttaatatgaaattgataatgtttattattatttttcgttcttctgcatcagtcatgcaaatttttatacttgtcctgatgttttatgttcgtgacttttttttttgaatattagtatcatttaggaaggggtcatataggtgcatctatgaaagcaaaactttaccatctcttggaacaaagatcagcttcatgccgtcactttgttattccgttgtggaagggaagtggatacactactatgttcatgcaagatgccatacatggtattcacaggacttgaagactataaagcacgaggcactcaagcaagtccttactacacagtcactcattacacagagtttgctgagaccaaggacactgtgcttattcgaggagatgttgtttttaccagcaaactaaccgattcagaggcaaagactcttctagagactgctcactcgttctacctgaatgatgtgagatacagactcgtggagcgcttcaacaaagagactcatgattttgagttcggggacgtccttaaagtgcttgacatgccaaccatgtgacccagtttaattcccaaccaatagcaaatattcctagagaacattgattttctgtcacctcaaatcctcaatttagcacgggagattgctttcttgcatcatcagaggcagtaagatggagccactggatatcgtcctgccttcgctcattgagcattccgtgtggattttgttgcactgattacaccatagacaattttgctgtttttttaagcagttgatgattttcagggatgtgagacataagttatattttttgctatatcattgtacccattaggtccataatgacattttgtaccatcttgatgtatttcccctgaatatttttgtggaaaccataaaccaatttgtttgtagacttgtggctaaccgatggcagatcaaacaaaaggtcatcgtgggctagtgctagaatcacctagttttattgccgaagttagcagatacctttggtg

SEQ ID NO: 2626 - DNA, 2076 bp, Zea Mays
cgccaacgtggccgggatgccagctcctggcgtgctgagctaagtttgttcctgccagggctccgattcaccaccacccgtcctcttcaactgccgccgttatcccctacccggcacgcgctgggcggggagcagctgaaccccaccccagccgcccgcaacggcgccaacaaggcgctgaagcggactctccggctcctgccaatggcgcggatccagcttgtggtggatgaaagaacggacccctttcttggtagattgactagaccagccaccattgaccaatcccacaatttcttctctgatgtcacaaacaacttcaaagatttttcaactgtagtttcagagttgcatcaacaccttctggatgcaaatgtagaagttacttacacagaatacttagatctgatgaaagtggaagttgatcaacatcttaataagctctcggaggacataagggacctcaaaagctgtaacttggcccacaaatatgacacagatggttcatgctgtacagcatgccatgttgggaagctagctgagatagatgacaggttcaacagcttgaagtttctgctggctgtggtgttccgacaaattagagagatcctcacagtggtcaattcttcaattcatgatcttcagtgggagcatgagttacagtcagaagttaccggcatcattattggagactgtattagaggtcttcaggatgaactcgagaggaaactgtatgagcaaagttccatggtgaacagtctaagaaaaaactgccaggaaactgtggcgcagtttgcttccatacgtgaagagctgattgctatttctaatattctgttaccttctgaagaggaaccacaaatttccctctgtaggcatgaaagtttgggtaactggagtgacagatggaagttcagctttttcagaaagcgagcacaccaggatcactctttatcttccacgcaaaaccagaattctgcaacacagaaatctataagtcctagtgaagttatatcagaaagatccgacttccgacatctgaagggtatgactagacatgaaatgcttaactatttcagatctgagatcagtaaattaagaaggctgcatgagttggatttgcaagagaaaacagaagagctgtttaaattcaaacgagagaaatggtcattggctcttaagtatgatgtagaatttgagcctttaagaaggaaattccctgaggtcatttcaagatttgaccaaatcatgtccaatggaatggcagcagcagtacctacaatctgcagtaatagtgatgcattcgatgaaacgagcagattgagcagtataattgattcactataccgtgaaaaccagcatcttcattgtttgcttgcagagaagatgaagaatattcaggaattatcaagccaaatatctgattccaccaggaaaatgtcacttcaatattcattagaaaaacaaattttgagacaactcaacagcactcaagtagaatatgaggatctttttgttgaaagtactatcagagatgaaatttaccaaactgttgtgagaacattggttgatagtcataggaatgttttggaggataccacccaaactttccgtgcaaaagtgtcttcacttgaagccgcactctctgaaaaggacaaggcgttgtgtttatctgatgaggaaaatcaaatgctaaaggaaaagttgtcaacactagaaaaagagcattttatccaaaataatcagcaagatctcgagctaatcaagcaagaaagtgaggaaatggttctccgtgatattgagatggagccacaaagatcatgtgagatttctgatcgagatatacagtacgaagggctcatcaagctgaatcaggttttagaaattgcctcaaccacggcaaaagaaatagaaacaaaaaggttgaatctcagtgatatccaaggtaaaagagagcaagaaaaacagctagattgcatcctggtatctatcatggatttgtcaaaagaatttatggagactgaacatagagtgccaaaagatataaaaggaaatgaaaaaaaaatgcaaaactaa

SEQ ID NO: 2627 - DNA, 1331 bp, Zea Mays
gggtgggcgtggacacgttgactttttcaactgtctgcccctgatgtccgttggctcccgacggaggccgccgccgccgcatcaccaccgtcgcgccatgacacctgcctcctccgtctccgtccccgcgccggttcccgcgccccctaagcctctctacctccggggcccggtcatcgcaggcgccgtcgcgctggccgcgtttctcctcctcgccgccgcctacgccaccaggcgagcagggtccccgccggccgccctcctctcccacccagctgtttccaccaggttcttctccttcgacctggtgcgcgagtaccctcacgacccggccgccttcacccagggtatcttgtacgcgggaaatgacacgcttttcgagtccactggcctctacggcaggtcttcagttcgaaaggttttggttaaccaccaaatggacggagatgtgtttggagaaggtttaactcttcttggtgacagattgtttcaggttacctggttgaagaacgacgggtttatatatgaccggcataacttctccaaatgcacgagttttacccataaaatgcgagatggttggggtctggcgactgatggaaaagttctttttggcagtgatggcacctcaatgctgtataagctggattcaaagtcacttgaagtcatgaaagtggtgactgtcaagtatcacggtaatcaagtcccctatcttaatgagctggaatatatagatggtgaagtctgggcaaatgtctggcagacagattgcatagctagagtgtcccctgaagatggcctagtggtgggttggatctttcttcatgagctgaggcggcagttgtggaactcaggcaacacgaatattgacgtcttaaacgggatagcttgggatgaaagaaggcacagattatttgtgacagggaaactgtggccaaagctatatgagatcaagctacgggcagtagatggtccagcagatggatctgtagaaaagctttgtccaaaagccagcttctatcgctgaagagtgtagaaccgcatatacactgggtgtgctaacatgggccttcatttgtttaaacgcacgatgcgaaggatgtggagatagtgaattgcaacagattttgatgcattcaatgcaacttaatagcttgaagaaactggtgctgttgggcatgtattcatccctgggaagggaaagaaagtcgccaacttatttgggtagatctcagtcactttttggaaagaagaatgtctgggccaactctctctcgagaaacagattttgatgcatcaacatgggggatgatgaatacttctatactgcg

SEQ ID NO: 2628 - DNA, 2618 bp, Zea Mays
cccagctttcccgtaacgtaacgggacaccacacttctataccgtgcacgcgacgaccctgccgtcggaccggacccactgcgcacccaccgcccagcgggacccacgcggtccttgtcccctcactgcctgcgcagaatgtccccggcccccacccgctgaccccgcctccgcctccgccctccggcgaccccgatccccgccggcgaaatggcggcgtggtgctctgccgagtccaccaagccggtcttcgtcgggatctacggggccgtcctcggcggcttcgcggtctccgccctcttcttcctgctctcctccttctcctcgctctccgcgcccacgctccccctccccgccgcggccatcgctggggccaacctctccgcgcctactctcgcccaggctgaaaccatgtacaaccgccccatctggaagcccccgccccggcgggcgcggatgccctctccgcgcgcgttccgcctcacccgcgacatggtcgccgcccgcgcccgcgacggtgtgatcgtcgtcaccttcggcaactacgcctttctcgacttcatcctcacctgggttcgccacctcaccgacctcggcgtagacaacctcctcgtcggtgccatggacaccaagctgctccgggagctctacttccggggcgtgcccgtcttcgacatgggcagcaggatggtcaccgaggacgccgggtggggctccccaaccttccacaagatgggcagggagaaggtgctgctcatcaacgcgctcctgcctttcgggtacgagctgctcatgtgcgacactgacatggtatggctcaagaacccattgccctacctcgcccgataccccgacgcagatctcctcacgtccagcgatcaggtcatacccaccgtcaccgacgacagcctggagaactggagggaagttactggtgcgttcaacattggtatttttcattggcgacccactgaacctgctaaaaggctggcaaaagattggaaagatttagtcatatctgatgataagttgtgggaccagaatgcttttaatgatcttgtacgcaaaaaatttggacagccagttcaaggagatgatcttgtatattcttatgatgggaaactgaagctgggagtgctaccagcaagtatattttgtagcggccatacatattttgtgcagggcatgtataagcagcttcatttggaaccatatgctgttcatactacttttcagtatgcgggcactgaaggaaagcgccatagattgcgagaggaggtttcctgtcatttaaacctaacattccaaaaagtttgctattagatggtgctcatactgttgaatctcattttgagttggttaactaccagctgaagcaaataagaactgcacttgcggttgcgtccttgttaaagcggacactggtaatgcctccattatggtgcaggcttgatagaatgtggtttggacatcctggaattttagagggaacaatgaccagacaaccttttctctgcccactggatcatgtgtttgaggttcatgttatgctgaaggacttgcccaaggaagagtttggtcaacatattgatttcagagaatactcctttcttgagaatccatcattacctaaagaggtgaaagattcgttactcgaggttgaactttgtgacgagcatagctccagatgctctgcaattgatgaaatcgataagcatggaacctttcttttaccaagaaatagtactgaagaaaagctgttggatttgttgtcatcatataaggatgtcaaaatcatacaattctcatctatggttgatgccttcggtggttttgctgatgcagctgtggagaagaagttccgaaatcgtgtgaacaggtatgtgggcctatggtgctgtgtggagttccgtgaaattggtcacatatattatgacatgtactgggacgagaaaccagggtggaagccacaccctccagagactagggaacaggatcatccaccttggtcatgactactgacaagaagatgctagaaagatcgtgatgatgaagatctgagatcttctagggcaccctgctccaatcgattcttcaggccaattttgtgctgttctagttgtgttcttccatgggtcgctgctgttcgcttgtggccccttgttcgcagctcatcggtcgaagcatggggctcaatgatttagttgggacaacatttagatcacgacttagttccattttccatagtttttgcatcatgttcatagttgatacaggcatcagctccaaaggagaaaaggccattattgttaaatgttgtggaaaacttggctgccagctgctgcaataggaagctgtcgtaactgttgtgcaaaactttgcccccgctgctctgttaggaaatatttggagcagctatctttttgacacattgttctcaagtcttaaccatgaagcattgtcttaatatatataagaaggcatttggtcatatttgagcaacctcagtcgtagaatgataaatgattttcatcagcgaaaagtagatcaatatattttgaccattaattttcttttgatatgttcacatttgctagggaatcaatgtcatcgtagag

SEQ ID NO: 2629 - DNA, 1945 bp, Zea Mays
gcctttggcgcgcctctccctctcccctcccctcgtcccattcctcctctgtcctcccccactcgctcccgttctcccctgcctcgccgcctctctccctgtcgtacccacctgccccctcgcggtctctctctccttcctgattggatcaatctggcctcgcggctccgactgatccgtggcgcctcgctcccgagcggaaccaccacctgatttgacgagttttttgctgtctctgtcaccctttgcgtgaagagagctaggtgggccgtagaaaaggcttcagttcagatctcatttcagatagcacaggaccaatctggtctgcagtgttcaactggaatataagatttcgctgcataggtcaaaggtttgtacgagtgaaaaagactagcagatactgtcatggctcaggatgaagctgtggctacccaaaagactggaaatacaacatctccttctaaggattacccaactccttctccatatcctgattggtcaaccatgcaggcatattatggccctggtgtcttgccaccaacatattttactcctgcaatagctccaggtcatccaccgccatatatgtggggtcctcagcctataatgccaccccctttcgggacaccatatgctgcagtatacccacatggtggagcttacccacacccccttgtgcccatgatgtcaactccaatgagcgtggagccagccaaatctacaaatagcaaggagaaaaattccaataagaaacttaaggaaatagatcggactgcagtgtctgctggcagtggtaacagtaaaagaacagtgtcatccattgaagattacagtgcagaaggctcaagcgatgtaaacgatcagaatgtgaacgaaacgtccaggaagcggagctcagatggtggacctggcgcagaaaccaccacaggtggaaacacggaatgtgttttagctcctaaccatacgctggggaatgctaccattttgccacaacactgcttttcagctccagtaattaagcccagtgctacaaatgtcgcgaactcgagggcgataggcacagcattatctccaccacctggtgtgatggttccagttcataatgcagtaccatctgacttatcagttaaggatgagagggaattgaagcgcgaaaagaggaagcagtcaaatagggagtctgctagacgatcaaggctgagaaaacaggctgagacagaggagttggctacacaagtggagtctcttgcagcagagaacacgtcccttagatctgaaatcggccagctaacagagagctcagagaagctcagactagagaattcagctctaatggtgaagctgaaggacaccgcagaaccgtctccgattaaagcatccgcatccccgtcctctccccgtgcctccgcggagaacttcctttccatgatcgacagcgccaacgcgccgagcgtcagcaggcacacggagcacggcggtcccaggctccggcagctcctggactccagtccggcgacagacgtcgccgccgtaagctgatgatgaagccggtccggcaaatacgccacagcacatgcatgtgtcctggggattccgcaggctcatgctgctcgagtgctcgtcagcgttacggactcggactctgtactccagtttaggcactgattccagtgaagtaaccgagggtaccggtaattttatctgctctcgcgccagagtgccgggctgccttgcctgcgaccactcctgtcctgtgtacccagagttgtaacgtagtagggtgttgtgctgcatgccgaccttttgaaactttcgagaccgtcatttggaccatttttttcgtcgcagtaacacaatacagatcggagtttgtacaggacggatgctgcctggtgtgcgcaattctctactgcaaaataccgacaaaaattctgtttgttttttg

SEQ ID NO: 2630 - DNA, 2754 bp, Zea Mays
tccttatcaccgacacgtgtctcgtgacgtggctcaagcctttggcgcgcctctccctctcccctcccctcgtcccattcctcctctgtcctcccccactcgctcccgttctcccctgcctcgccgcctctctccctgtcgtacccacctgccccctcgcggtctctctctccttcctgattggatcaatctggcctcgcggctccgactgatccgtggcgcctcgctcccgagcggaaccaccacctgatttgacgagactagcagatactgtcatggctcaggatgaagctgtggctacccaaaagactggaaatacaacatctccttctaaggattacccaactccttctccatatcctgattggtcaaccatgcaggcatattatggccctggtgtcttgccaccaacatattttactcctgcaatagctccaggtcatccaccgccatatatgtggggtcctcagcctataatgccaccccctttcgggacaccatatgctgcagtatacccacatggtggagcttacccacacccccttgtgcccatggtaatgatgcctatggacattttttgtttaattaagcacactatatatgtccaaacttggctgatcaagtgaccaagccattcaatgtaggaaatggaaagtaaaacttgattatagttggacaacatttctactcttttggtctgtagttcaccattgatgcacagcatgtagaatgttgtccataacctgtaattttgtagcctcatcagaacaaaggatctgcactgtgcatctagctctattttatattagctgcccgaggcttgccctaccagcagaagatgctgcgcacttattaatcatccattgccgctactccattcggatctgggacaagatatatgcctggcttgcggctgttttggagcctcgtggggtatgtgaaaattttatatcggtgacagagtggtggaatgaggttgtacactcaaaactcaaaagggtgtcctagaaaggcattttgttcgatcccaattctgtaacctgggaaatctcgaaggagcgaaatgcaagaatttcaatcggagacactctttggcaatctatcttgtgacaaagataaaggagcaggccacgacttggggcagtgcaggtgcaagacaccttaaggagatcctacagagcacttagctttttgctgtaaattcttgttagtctttccttcctctcgtatttatgcatgtttaacaatgtatacagttgttggcttaagcctcttcccctatttttaaataaatggcagatcctgcctgtctacgttcaaaaaatatatatttacacttcatcatgcccttggacgatctactaatctcctttagttccttctaaagttattatgttcatctttgtcttaatcactaagaataaatcattcgtttttgaagttttccattctaatcaatgttatcaatttgatgttctcatgctgctttcaagatgtcaactccaatgagcgtggagccagccaaatctacaaatagcaaggagaaaaattccaataagaaacttaaggaaatagatcggactgcagtgtctgctggcagtggtaacagtaaaagaacagtgtcatccattgaagattacagtgcagaaggctcaagcgatgtaaacgatcagaatgtgaacgaaacgtccaggaagcggagctcagatggtggacctggcgcagaaaccaccacaggtggaaacacggaatgtgttttagctcctaaccatacgctggggaatgctaccattttgccacaacactgcttttcagctccagtaattaagcccagtgctacaaatgtcgcgaactcgagggcgataggcacagcattatctccaccacctggtgtgatggttccagttcataatgcagtaccatctgacttatcagttaaggatgagagggaattgaagcgcgaaaagaggaagcagtcaaatagggagtctgctagacgatcaaggctgagaaaacaggctgagacagaggagttggctacacaagtggagtctcttgcagcagagaacacgtcccttagatctgaaatcggccagctaacagagagctcagagaagctcagactagagaattcagctctaatggtgaagctgaaggacaccgcagaaccgtctccgattaaagcatccgcatccccgtcctctccccgtgcctccgcggagaacttcctttccatgatcgacagcgccaacgcgccgagcgtcagcaggcacacggagcacggcggtcccaggctccggcagctcctggactccagtccggcgacagacgtcgccgccgtaagctgatgatgaagccggtccggcaaatacgccacagcacatgcatgtgtcctggggattccgcaggctcatgctgctcgagtgctcgtcagcgttacggactcggactctgtactccagtttaggcactgattccagtgaagtaaccgagggtaccggtaattttatctgctctcgcgccagagtgccgggctgccttgcctgcgaccactcctgtcctgtgtacccagagttgtaacgtagtagggtgttgtgctgcatgccgaccttttgaaactttcgagaccgtcatttggaccatttttttcgtcgcagtaacacaatacagatcggagtttgtacaggacggatgctgcctggtgtgcgcaattctctactgcaaaataccgacaaaaattctgtttgttttttg

SEQ ID NO: 2631 - DNA, 7177 bp, Zea Mays
ttatatgtatacaaaatgaattcttgatcggattgtgccccggttctattgattaccttgcttatcgtttggtgcagtgtgggctagttatctactagacttgccactggtgcagattccgttgatcccacatctgaaaagcaggggagtcgacgaccctcatggttttgaggataatatattgcatctctgcactgttctaagcgtgaggaagtaaagcattatttattggttggagtagtttctgttgctatccggcaccaatggcgactttggttcgtcatgattcaaggcagtactcttggtggtgggttagccatatcagccccaagaactcgaaatggctccaggaaaatctcagcgacatggacacaaaggttaaagcaatgatcaaacttatcaatgaagatgctgattcttttgcaaggagagcagagatgtactacaagaaacgtccagagctaatgaaatttgtggaggaattctatcgagcataccgtgcgctggcagaaagatacgatcaggccactggggcacttcgtcaggctcacagaacaatttctgaagcatttccaaatcaaatgccgtcaatgtcagacgagtcaccctcttctttcagccaagagatggagcctcatactccagatatgtctacttttacacgtgcggcatttgattctgatgatcttcagaaggatggagttggtatgtcaccacagcgtttcacctccaagagaaatggtacacaccctgaggaaacaagtgcattgtcaagtagaaaaggtctaaagctgttcaatgatttgtcatcgagtagtgaaaatgctcctcgtgctggttttgatgggaaagtacggaaaggcctaacctttgaaagcccagaagttaaagggaaagatggtatcagcaatgagatggcaaatttgcagcaagaagttgcaagactattatccgagagccagaatctgaaacagcagatgctgtcagaatccgagcgggcaaacaaagctgaaaatgagatgcaaatgctcaaggcaacagtattgcaattaagtgctgataaagacacatcacttacgcaatataatcattcctctgagcgaatatctacgttggagtccgagctcttgaaggcgcaggctgacctcaagaagttaactgatgaaatggctgcagatgtccagaagctaattaatgctgaaacactcaatattgctatactgtctgaggctgagggtttggatcagaagatgaagatgcaacaacaagaactagaacaaaagcttaaggaattggagagtttccgctcaagcttccaggaggagcatgaaaagcgtatgcaggctgaaagtgctctactttcccaggggaaggaacttgctcaatctcatgaagaagtacagaggttgactatagaaataaagatggcgaatgaaaagttgaatgagctcaagcagaccaaggaggaccttcatgacactgtttgtgagctgaagagggatgttgagcgccttacagaacaaaaccagtcatctgaggtgcttatacgggaacttggtgacgagataaatacactcaaggattcaaaaaatgaactccaaagtgaaataaaaagccttaagagcaccatttcacagctaaacactgagaagaatgcagctgcgcttcaacaccagcagtctgtggagcaggtttcggtaatcgaatctcagctgtcaaagctacagtcagagctagatgagactgagcagaaagtacagttgctgacacaagatcttgaaaagaaaaaagaagaagcggagaatatccatttcaagctgcaagatgaatgccataggcgtatgcaaattgaagcaactcttctcatgacagagggtctacattcccagttgcaagaagaaatgaaaacactgacacaagattttgacggatcaacaaagaagcttagtgagttagaaaataataagttagacctggagagcacactgaaagaactgaataacaccattttaggtttgaactcggagaaggatgcagcactccttcaacaacagcagtctttagacaaagtatctgatttggaattagaactctcaaagatgcagttggaaatggagaagtctgagcaaaaaattctcttactggagcaagaaattgcacggaagactgaaagtgtcgacagcttggagataagttttaaagatgaatgtgagaagaggctacaagcccaaacatcgcttgtgtcattggagaaaatgtattgccagtcacaagaagatgttagaaggttgcagatagagattgagaagcagaatgacaagttgaatgagttggagaacttgtcatctgaacttaacaacaccatcctacttgtaaacactgagaaagatgcaaccctccatgagaaccagcagtccttagcgagaatattggatcttgaatctgaactcatggtcttgaaaactgaactggagaatgttgaaaggaaagttcacatgatagagcaagaactcatatataagaaagaagaagcggataacctccaaattagcctacaagatgaaactcaaaaacgggttgatggtgaaacatctcttcttatgatgaaaaatcttcattcggagtcacaaaatgaagtgagagggttggcactggaactcgagaagctgaatggtaatttaagacaggtggagaacagtaaggttgatcttgaaaacattgtaaccaagcatacggaggaaatccatatccttcgtgaacagaatctttctactgagcttatgataaaggacctccatcttgaattggatgtattgaaggatttgaatgtgaaacttcaagcagaaatggatttacacaaaggtgaaaaagaagtacttcagagagagtttacttctcaaagggaagagaaggaaaatctagaggggatacaccacactctggtggatgagatggataccctaaaaactactacaacaatgaaccagaagttgattgaggaattgcaaatcacaaacttaaaactgaaggaagtgtgtgcaaggagtgaagttgagaaggcacttctctcagaaaaactccaagaggtggagaagctatctgaagaatattcactcttggagaactcactttcagatgcaaatgctgaaatggatgcattgagggagaagataaaagcacttgaagcttcagaaagctctctcaaggatataatttcctgtcatgtttctgagaaggctgttcttgtatcagagctagagatccttggtaaaagattatctgatgctttagagaacaaatctatcttggatatctcattatctgatatgaaactagacctagaagatttgagaacaaagctgaaagattctgaagaatcctgtcagtatctccttgcaaataactcagcactttctggtgaactggatgcattgagggagaagataaaagcactacaggcctcagaaaggtctctgaaggatgaaatttcctgttatgtttctgaaaaggttgttcttgcatcagaggtagagatccttggtaaaagtttatctgaggtttcagagaagaattctatcttggatacctcattatgtgatatgaaaactgagttagatgaattgagaacaaagctgaacgattctgaagaatcctgccagactcaccttacaaataattcagctctttctgctgaaaagaacaatctgttctctcagctggagagcattacattggccatgaaagcactagaaggtatgcacaccaatctggaacagatgcactcctctgtatcaagagagaaggattttgcatatgatcaagtaagggaactgcaggatcagttgagaattaagaatgaggaatttgaagtgttagcaaagtcacatcaattgcaagcaaacagctatgagatacaaatttcttctctgcaagagaaaaaccattatatggaggaggtgcttgaacaggaacagcagaaaaacgtaaatgcttctattagtacagttattttggagaactgtttggtcgatgagcaagacaagaaggctgctcttttcactgaatgccaaaagtatgctgtggaaaatcattcagccaatatgttggtttcacagttgatgggggaagctagatatcatggggaggagagaaaaacattgctaaagcacaatgaaaaactgaggcaagggatttcaaagcaaatgaaggttctgaatatctgcaaagatctagcacctgctgatttagctgaggacgaagttctgttgcagactgttttagatgaaaccattaacactctgagacttaaggatgaaactgaagatgtgaataggctcatgaacactgagttctcagttctctcagtagttttgttgcaattagggatggagctcagagatctgcacttacagaagtgtgccattgagaaagaagtggagagtggagaaacagagttgctttgtttgcaaaacaaaaaccaacagatgttggaacagaatgaacaactaaggaatggattacaggaaagcagtgaaagggaggaggtgctgaaaactgaagtattcatcacacaagagaaactatcttgcttgagagagtcctaccagacatcacaagatgtaattttcaacctgaccgaaaaaaatgagtccttgtctaaggaataccagtccttgagtgagaagtacaattccttggaagatgagaatgatactgttcttgaagaatgcatgatgctcgagaacctgtgcctgttctttaggggacataataatgagattgcatctgcattggcttctcttaccaatgagatggctttgttgagtttggctaagagcgatcttgatcttcaagttgatgagctgagcagaaggtcagtggcgcatgaatcagaaaatagtcacttaaaggagtacatcatatgcttggtagagattctcagaactcgattagtcctttcagagtttgatttggacaccaatcaaagtgtctgccaggagttggttgttaaacttgagaattgcatgacacagctggcgcagaaggatggtgagctaatggaagcagaggaggaagttcaactattgcaagaaaagaaccaggaactctgtggagttgttagatctctacaagttgcaactgaaggtgctaaagtggtggaaggagaactggagaagaaaatcacaagactgattgaacagtgttcttgcaaggatgtcgaaattttacttcttcaccaagacaatgaggcattgcaatcagaagttgagcaatgtgagagggaatttgttgttctgatggatgatgcaattacctcttcagtgaattctgcggtgtatgaagaaacagcattcaagcttatgatgaatggtaaagctacagagaatagagcaatatccctaaaggagttgctaatgaaggaggtctcttcccgagatgctcacattgaggagttgcagaaaaagttggctggcattcaggacgaacatgcagaactaaaagctgagttgaacacacatctagctctcgtagcatcattggctgatcatgtcagtgtgttggaagaagattgccgttctctgtcaaaaccctgtagtacagaagacaaagaggaaaccgcatgtgtacatcatgttcaagagggcaatgatgggctggaatctcattgcttacccaaaggaactccagagttacaagggttgattgcaagaatagaagcacttcaagtagttgtatcaaatgctaaagatcgtcaagatcaggagtcagctgagtctgcagctaaattggcggcagtaagtgcagaaattcaagaccttaaagcaagaggtggctcacgcatggagggaaaagaaatatattctgatcatgagaaacaagatgttgagatctccaaagggaagcaagtccagatcatgaaggatattgagctggaccaaatatccacttgtccaccatatggtgctcgagctgccctctatccgcttggaactggtgcaaatgccgaactcgatgacgatatgcttcagctgtgggaggctgcagagaggagctgcaagaaccaaacggccaagtcctcgtcatctgagcacgacatacaagccgtcgaggatctgaagagtgagcacccttcgtctgagctagcaaggggaagagaccttggaatcaataagctagaagcgtcgaagggagctgcagagcctcatgaggcgtggagcaagaacgtacttgagaggctcacttctgatgctcagaggctgttgagcatccaagcgagcattgaagagctgaagcagaaaatggaggggcagtcaaagggaaaatcccctatgaactctgagtacagcagtgtgagcgctcaggtgcatgagacagagggccatgtcttggaacagatcaatctgaacaacaaattgactaggacggctgagaactaccccacactgtcagataatatgagcaccgagcgagaagggtattccagcaggaggaagatctccgagcaggtgcagaaagggtcggagaatgtggcaaggttggaactggagcttcagaagattcagtatgtcttgctgaagcttgaggaagagcacgagtacagaaggctcaaagtctctgataagcgcactcgcgtgcttttgagggactatctgtatgggaggaaggaccgcggtggcgggcagaagaaaaagaagagggtcccgttctgtggttgtgttcgtccgaaatcaagaacagagccgtagcctttctttttgttcgacctgcacctccaagtggtagccgtagtccgaaatcaagaaataaaacaaaatcgacctgcacctccaagtggttggctaagtgtcgcctgtgcattggaagaggaggtggtgttcctaggatccctttgtaattgagttagcattttagtatcttttttcttttatttttgaaactagcattatagtatcctgatgaagaagcttatgtactaaattttttgttttcctgtctaaatgaggccattctggctagtttaatgcgttaatactgtcgtatatcaaggcgttctctttccatctataatagcttcgtgtttacagcccaagcagtgcattttgcttccaggttcagactgcagaagcaaagcaccgggactagtaagtcatttctttaatattgatgaataatctca

SEQ ID NO: 2632 - DNA, 7314 bp, Zea Mays
gagagagagagagagagagagagagagagagagagagagcacgggatgggttgaggaacgagatggagggagaaagtgggcagcctgctggatcttggcatctcgccgccgccgctcacttccgctccacctgttactgaaggtcggtgttatattttcttaaactccagtttggtgcagtgtgggctagttatctactagacttgccactgtttcaagtcgtttctgtttgtaataactatgcaggtgcagattccgttgatcccacatctgaaaagcaggggagtcgacgaccctcatggttttgaggataatatattgcatctctgcactgttctaagcgtgaggaagtaaagcattatttattggttggagtagtttctgttgctatccggcaccaatggcgactttggttcgtcatgattcaaggcagtactcttggtggtgggttagccatatcagccccaagaactcgaaatggctccaggaaaatctcagcgacatggacacaaaggttaaagcaatgatcaaacttatcaatgaagatgctgattcttttgcaaggagagcagagatgtactacaagaaacgtccagagctaatgaaatttgtggaggaattctatcgagcataccgtgcgctggcagaaagatacgatcaggccactggggcacttcgtcaggctcacagaacaatttctgaagcatttccaaatcaaatgccgtcaatgtcagacgagtcaccctcttctttcagccaagagatggagcctcatactccagatatgtctacttttacacgtgcggcatttgattctgatgatcttcagaaggatggagttggtatgtcaccacagcgtttcacctccaagagaaatggtacacaccctgaggaaacaagtgcattgtcaagtagaaaaggtctaaagctgttcaatgatttgtcatcgagtagtgaaaatgctcctcgtgctggttttgatgggaaagtacggaaaggcctaacctttgaaagcccagaagttaaagggaaagatggtatcagcaatgagatggcaaatttgcagcaagaagttgcaagactattatccgagagccagaatctgaaacagcagatgctgtcagaatccgagcgggcaaacaaagctgaaaatgagatgcaaatgctcaaggcaacagtattgcaattaagtgctgataaagacacatcacttacgcaatataatcattcctctgagcgaatatctacgttggagtccgagctcttgaaggcgcaggctgacctcaagaagttaactgatgaaatggctgcagatgtccagaagctaattaatgctgaaacactcaatattgctatactgtctgaggctgagggtttggatcagaagatgaagatgcaacaacaagaactagaacaaaagcttaaggaattggagagtttccgctcaagcttccaggaggagcatgaaaagcgtatgcaggctgaaagtgctctactttcccaggggaaggaacttgctcaatctcatgaagaagtacagaggttgactatagaaataaagatggcgaatgaaaagttgaatgagctcaagcagaccaaggaggaccttcatgacactgtttgtgagctgaagagggatgttgagcgccttacagaacaaaaccagtcatctgaggtgcttatacgggaacttggtgacgagataaatacactcaaggattcaaaaaatgaactccaaagtgaaataaaaagccttaagagcaccatttcacagctaaacactgagaagaatgcagctgcgcttcaacaccagcagtctgtggagcaggtttcggtaatcgaatctcagctgtcaaagctacagtcagagctagatgagactgagcagaaagtacagttgctgacacaagatcttgaaaagaaaaaagaagaagcggagaatatccatttcaagctgcaagatgaatgccataggcgtatgcaaattgaagcaactcttctcatgacagagggtctacattcccagttgcaagaagaaatgaaaacactgacacaagattttgacggatcaacaaagaagcttagtgagttagaaaataataagttagacctggagagcacactgaaagaactgaataacaccattttaggtttgaactcggagaaggatgcagcactccttcaacaacagcagtctttagacaaagtatctgatttggaattagaactctcaaagatgcagttggaaatggagaagtctgagcaaaaaattctcttactggagcaagaaattgcacggaagactgaaagtgtcgacagcttggagataagttttaaagatgaatgtgagaagaggctacaagcccaaacatcgcttgtgtcattggagaaaatgtattgccagtcacaagaagatgttagaaggttgcagatagagattgagaagcagaatgacaagttgaatgagttggagaacttgtcatctgaacttaacaacaccatcctacttgtaaacactgagaaagatgcaaccctccatgagaaccagcagtccttagcgagaatattggatcttgaatctgaactcatggtcttgaaaactgaactggagaatgttgaaaggaaagttcacatgatagagcaagaactcatatataagaaagaagaagcggataacctccaaattagcctacaagatgaaactcaaaaacgggttgatggtgaaacatctcttcttatgatgaaaaatcttcattcggagtcacaaaatgaagtgagagggttggcactggaactcgagaagctgaatggtaatttaagacaggtggagaacagtaaggttgatcttgaaaacattgtaaccaagcatacggaggaaatccatatccttcgtgaacagaatctttctactgagcttatgataaaggacctccatcttgaattggatgtattgaaggatttgaatgtgaaacttcaagcagaaatggatttacacaaaggtgaaaaagaagtacttcagagagagtttacttctcaaagggaagagaaggaaaatctagaggggatacaccacactctggtggatgagatggataccctaaaaactactacaacaatgaaccagaagttgattgaggaattgcaaatcacaaacttaaaactgaaggaagtgtgtgcaaggagtgaagttgagaaggcacttctctcagaaaaactccaagaggtggagaagctatctgaagaatattcactcttggagaactcactttcagatgcaaatgctgaaatggatgcattgagggagaagataaaagcacttgaagcttcagaaagctctctcaaggatataatttcctgtcatgtttctgagaaggctgttcttgtatcagagctagagatccttggtaaaagattatctgatgctttagagaacaaatctatcttggatatctcattatctgatatgaaactagacctagaagatttgagaacaaagctgaaagattctgaagaatcctgtcagtatctccttgcaaataactcagcactttctggtgaactggatgcattgagggagaagataaaagcactacaggcctcagaaaggtctctgaaggatgaaatttcctgttatgtttctgaaaaggttgttcttgcatcagaggtagagatccttggtaaaagtttatctgaggtttcagagaagaattctatcttggatacctcattatgtgatatgaaaactgagttagatgaattgagaacaaagctgaacgattctgaagaatcctgccagactcaccttacaaataattcagctctttctgctgaaaagaacaatctgttctctcagctggagagcattacattggccatgaaagcactagaaggtatgcacaccaatctggaacagatgcactcctctgtatcaagagagaaggattttgcatatgatcaagtaagggaactgcaggatcagttgagaattaagaatgaggaatttgaagtgttagcaaagtcacatcaattgcaagcaaacagctatgagatacaaatttcttctctgcaagagaaaaaccattatatggaggaggtgcttgaacaggaacagcagaaaaacgtaaatgcttctattagtacagttattttggagaactgtttggtcgatgagcaagacaagaaggctgctcttttcactgaatgccaaaagtatgctgtggaaaatcattcagccaatatgttggtttcacagttgatgggggaagctagatatcatggggaggagagaaaaacattgctaaagcacaatgaaaaactgaggcaagggatttcaaagcaaatgaaggttctgaatatctgcaaagatctagcacctgctgatttagctgaggacgaagttctgttgcagactgttttagatgaaaccattaacactctgagacttaaggatgaaactgaagatgtgaataggctcatgaacactgagttctcagttctctcagtagttttgttgcaattagggatggagctcagagatctgcacttacagaagtgtgccattgagaaagaagtggagagtggagaaacagagttgctttgtttgcaaaacaaaaaccaacagatgttggaacagaatgaacaactaaggaatggattacaggaaagcagtgaaagggaggaggtgctgaaaactgaagtattcatcacacaagagaaactatcttgcttgagagagtcctaccagacatcacaagatgtaattttcaacctgaccgaaaaaaatgagtccttgtctaaggaataccagtccttgagtgagaagtacaattccttggaagatgagaatgatactgttcttgaagaatgcatgatgctcgagaacctgtgcctgttctttaggggacataataatgagattgcatctgcattggcttctcttaccaatgagatggctttgttgagtttggctaagagcgatcttgatcttcaagttgatgagctgagcagaaggtcagtggcgcatgaatcagaaaatagtcacttaaaggagtacatcatatgcttggtagagattctcagaactcgattagtcctttcagagtttgatttggacaccaatcaaagtgtctgccaggagttggttgttaaacttgagaattgcatgacacagctggcgcagaaggatggtgagctaatggaagcagaggaggaagttcaactattgcaagaaaagaaccaggaactctgtggagttgttagatctctacaagttgcaactgaaggtgctaaagtggtggaaggagaactggagaagaaaatcacaagactgattgaacagtgttcttgcaaggatgtcgaaattttacttcttcaccaagacaatgaggcattgcaatcagaagttgagcaatgtgagagggaatttgttgttctgatggatgatgcaattacctcttcagtgaattctgcggtgtatgaagaaacagcattcaagcttatgatgaatggtaaagctacagagaatagagcaatatccctaaaggagttgctaatgaaggaggtctcttcccgagatgctcacattgaggagttgcagaaaaagttggctggcattcaggacgaacatgcagaactaaaagctgagttgaacacacatctagctctcgtagcatcattggctgatcatgtcagtgtgttggaagaagattgccgttctctgtcaaaaccctgtagtacagaagacaaagaggaaaccgcatgtgtacatcatgttcaagagggcaatgatgggctggaatctcattgcttacccaaaggaactccagagttacaagggttgattgcaagaatagaagcacttcaagtagttgtatcaaatgctaaagatcgtcaagatcaggagtcagctgagtctgcagctaaattggcggcagtaagtgcagaaattcaagaccttaaagcaagaggtggctcacgcatggagggaaaagaaatatattctgatcatgagaaacaagatgttgagatctccaaagggaagcaagtccagatcatgaaggatattgagctggaccaaatatccacttgtccaccatatggtgctcgagctgccctctatccgcttggaactggtgcaaatgccgaactcgatgacgatatgcttcagctgtgggaggctgcagagaggagctgcaagaaccaaacggccaagtcctcgtcatctgagcacgacatacaagccgtcgaggatctgaagagtgagcacccttcgtctgagctagcaaggggaagagaccttggaatcaataagctagaagcgtcgaagggagctgcagagcctcatgaggcgtggagcaagaacgtacttgagaggctcacttctgatgctcagaggctgttgagcatccaagcgagcattgaagagctgaagcagaaaatggaggggcagtcaaagggaaaatcccctatgaactctgagtacagcagtgtgagcgctcaggtgcatgagacagagggccatgtcttggaacagatcaatctgaacaacaaattgactaggacggctgagaactaccccacactgtcagataatatgagcaccgagcgagaagggtattccagcaggaggaagatctccgagcaggtgcagaaagggtcggagaatgtggcaaggttggaactggagcttcagaagattcagtatgtcttgctgaagcttgaggaagagcacgagtacagaaggctcaaagtctctgataagcgcactcgcgtgcttttgagggactatctgtatgggaggaaggaccgcggtggcgggcagaagaaaaagaagagggtcccgttctgtggttgtgttcgtccgaaatcaagaacagagccgtagcctttctttttgttcgacctgcacctccaagtggtagccgtagtccgaaatcaagaaataaaacaaaatcgacctgcacctccaagtggttggctaagtgtcgcctgtgcattggaagaggaggtggtgttcctaggatccctttgtaattgagttagcattttagtatcttttttcttttatttttgaaactagcattatagtatcctgatgaagaagcttatgtactaaattttttgttttcctgtctaaatgaggccattctggctagtttaatgcgttaatactgtcgtatatcaaggcgttctctttccatctataatagcttcgtgtttacagcccaagcagtgcattttgcttccaggttcagactgcagaagcaaagcaccgggactagtaagtcatttctttaatattgatgaataatctca

SEQ ID NO: 2633 - DNA, 7404 bp, Zea Mays
tgtattgtccgtttggggtggggtccgcctcctactgtgctgaagcagcctttcttcttggcactacgcccgcccgcccaccggaccctgcagcagagtccactgtccacggccaaaggcgagagagagagagagagagagagagagagagagagagagagagcacgggatgggttgaggaacgagatggagggagaaagtgggcagcctgctggatcttggcatctcgccgccgccgctcacttccgctccacctgttactgaaggtcggtgttatattttcttaaactccagtttggtgcagtgtgggctagttatctactagacttgccactggtgcagattccgttgatcccacatctgaaaagcaggggagtcgacgaccctcatggttttgaggataatatattgcatctctgcactgttctaagcgtgaggaagtaaagcattatttattggttggagtagtttctgttgctatccggcaccaatggcgactttggttcgtcatgattcaaggcagtactcttggtggtgggttagccatatcagccccaagaactcgaaatggctccaggaaaatctcagcgacatggacacaaaggttaaagcaatgatcaaacttatcaatgaagatgctgattcttttgcaaggagagcagagatgtactacaagaaacgtccagagctaatgaaatttgtggaggaattctatcgagcataccgtgcgctggcagaaagatacgatcaggccactggggcacttcgtcaggctcacagaacaatttctgaagcatttccaaatcaaatgccgtcaatgtcagacgagtcaccctcttctttcagccaagagatggagcctcatactccagatatgtctacttttacacgtgcggcatttgattctgatgatcttcagaaggatggagttggtatgtcaccacagcgtttcacctccaagagaaatggtacacaccctgaggaaacaagtgcattgtcaagtagaaaaggtctaaagctgttcaatgatttgtcatcgagtagtgaaaatgctcctcgtgctggttttgatgggaaagtacggaaaggcctaacctttgaaagcccagaagttaaagggaaagatggtatcagcaatgagatggcaaatttgcagcaagaagttgcaagactattatccgagagccagaatctgaaacagcagatgctgtcagaatccgagcgggcaaacaaagctgaaaatgagatgcaaatgctcaaggcaacagtattgcaattaagtgctgataaagacacatcacttacgcaatataatcattcctctgagcgaatatctacgttggagtccgagctcttgaaggcgcaggctgacctcaagaagttaactgatgaaatggctgcagatgtccagaagctaattaatgctgaaacactcaatattgctatactgtctgaggctgagggtttggatcagaagatgaagatgcaacaacaagaactagaacaaaagcttaaggaattggagagtttccgctcaagcttccaggaggagcatgaaaagcgtatgcaggctgaaagtgctctactttcccaggggaaggaacttgctcaatctcatgaagaagtacagaggttgactatagaaataaagatggcgaatgaaaagttgaatgagctcaagcagaccaaggaggaccttcatgacactgtttgtgagctgaagagggatgttgagcgccttacagaacaaaaccagtcatctgaggtgcttatacgggaacttggtgacgagataaatacactcaaggattcaaaaaatgaactccaaagtgaaataaaaagccttaagagcaccatttcacagctaaacactgagaagaatgcagctgcgcttcaacaccagcagtctgtggagcaggtttcggtaatcgaatctcagctgtcaaagctacagtcagagctagatgagactgagcagaaagtacagttgctgacacaagatcttgaaaagaaaaaagaagaagcggagaatatccatttcaagctgcaagatgaatgccataggcgtatgcaaattgaagcaactcttctcatgacagagggtctacattcccagttgcaagaagaaatgaaaacactgacacaagattttgacggatcaacaaagaagcttagtgagttagaaaataataagttagacctggagagcacactgaaagaactgaataacaccattttaggtttgaactcggagaaggatgcagcactccttcaacaacagcagtctttagacaaagtatctgatttggaattagaactctcaaagatgcagttggaaatggagaagtctgagcaaaaaattctcttactggagcaagaaattgcacggaagactgaaagtgtcgacagcttggagataagttttaaagatgaatgtgagaagaggctacaagcccaaacatcgcttgtgtcattggagaaaatgtattgccagtcacaagaagatgttagaaggttgcagatagagattgagaagcagaatgacaagttgaatgagttggagaacttgtcatctgaacttaacaacaccatcctacttgtaaacactgagaaagatgcaaccctccatgagaaccagcagtccttagcgagaatattggatcttgaatctgaactcatggtcttgaaaactgaactggagaatgttgaaaggaaagttcacatgatagagcaagaactcatatataagaaagaagaagcggataacctccaaattagcctacaagatgaaactcaaaaacgggttgatggtgaaacatctcttcttatgatgaaaaatcttcattcggagtcacaaaatgaagtgagagggttggcactggaactcgagaagctgaatggtaatttaagacaggtggagaacagtaaggttgatcttgaaaacattgtaaccaagcatacggaggaaatccatatccttcgtgaacagaatctttctactgagcttatgataaaggacctccatcttgaattggatgtattgaaggatttgaatgtgaaacttcaagcagaaatggatttacacaaaggtgaaaaagaagtacttcagagagagtttacttctcaaagggaagagaaggaaaatctagaggggatacaccacactctggtggatgagatggataccctaaaaactactacaacaatgaaccagaagttgattgaggaattgcaaatcacaaacttaaaactgaaggaagtgtgtgcaaggagtgaagttgagaaggcacttctctcagaaaaactccaagaggtggagaagctatctgaagaatattcactcttggagaactcactttcagatgcaaatgctgaaatggatgcattgagggagaagataaaagcacttgaagcttcagaaagctctctcaaggatataatttcctgtcatgtttctgagaaggctgttcttgtatcagagctagagatccttggtaaaagattatctgatgctttagagaacaaatctatcttggatatctcattatctgatatgaaactagacctagaagatttgagaacaaagctgaaagattctgaagaatcctgtcagtatctccttgcaaataactcagcactttctggtgaactggatgcattgagggagaagataaaagcactacaggcctcagaaaggtctctgaaggatgaaatttcctgttatgtttctgaaaaggttgttcttgcatcagaggtagagatccttggtaaaagtttatctgaggtttcagagaagaattctatcttggatacctcattatgtgatatgaaaactgagttagatgaattgagaacaaagctgaacgattctgaagaatcctgccagactcaccttacaaataattcagctctttctgctgaaaagaacaatctgttctctcagctggagagcattacattggccatgaaagcactagaaggtatgcacaccaatctggaacagatgcactcctctgtatcaagagagaaggattttgcatatgatcaagtaagggaactgcaggatcagttgagaattaagaatgaggaatttgaagtgttagcaaagtcacatcaattgcaagcaaacagctatgagatacaaatttcttctctgcaagagaaaaaccattatatggaggaggtgcttgaacaggaacagcagaaaaacgtaaatgcttctattagtacagttattttggagaactgtttggtcgatgagcaagacaagaaggctgctcttttcactgaatgccaaaagtatgctgtggaaaatcattcagccaatatgttggtttcacagttgatgggggaagctagatatcatggggaggagagaaaaacattgctaaagcacaatgaaaaactgaggcaagggatttcaaagcaaatgaaggttctgaatatctgcaaagatctagcacctgctgatttagctgaggacgaagttctgttgcagactgttttagatgaaaccattaacactctgagacttaaggatgaaactgaagatgtgaataggctcatgaacactgagttctcagttctctcagtagttttgttgcaattagggatggagctcagagatctgcacttacagaagtgtgccattgagaaagaagtggagagtggagaaacagagttgctttgtttgcaaaacaaaaaccaacagatgttggaacagaatgaacaactaaggaatggattacaggaaagcagtgaaagggaggaggtgctgaaaactgaagtattcatcacacaagagaaactatcttgcttgagagagtcctaccagacatcacaagatgtaattttcaacctgaccgaaaaaaatgagtccttgtctaaggaataccagtccttgagtgagaagtacaattccttggaagatgagaatgatactgttcttgaagaatgcatgatgctcgagaacctgtgcctgttctttaggggacataataatgagattgcatctgcattggcttctcttaccaatgagatggctttgttgagtttggctaagagcgatcttgatcttcaagttgatgagctgagcagaaggtcagtggcgcatgaatcagaaaatagtcacttaaaggagtacatcatatgcttggtagagattctcagaactcgattagtcctttcagagtttgatttggacaccaatcaaagtgtctgccaggagttggttgttaaacttgagaattgcatgacacagctggcgcagaaggatggtgagctaatggaagcagaggaggaagttcaactattgcaagaaaagaaccaggaactctgtggagttgttagatctctacaagttgcaactgaaggtgctaaagtggtggaaggagaactggagaagaaaatcacaagactgattgaacagtgttcttgcaaggatgtcgaaattttacttcttcaccaagacaatgaggcattgcaatcagaagttgagcaatgtgagagggaatttgttgttctgatggatgatgcaattacctcttcagtgaattctgcggtgtatgaagaaacagcattcaagcttatgatgaatggtaaagctacagagaatagagcaatatccctaaaggagttgctaatgaaggaggtctcttcccgagatgctcacattgaggagttgcagaaaaagttggctggcattcaggacgaacatgcagaactaaaagctgagttgaacacacatctagctctcgtagcatcattggctgatcatgtcagtgtgttggaagaagattgccgttctctgtcaaaaccctgtagtacagaagacaaagaggaaaccgcatgtgtacatcatgttcaagagggcaatgatgggctggaatctcattgcttacccaaaggaactccagagttacaagggttgattgcaagaatagaagcacttcaagtagttgtatcaaatgctaaagatcgtcaagatcaggagtcagctgagtctgcagctaaattggcggcagtaagtgcagaaattcaagaccttaaagcaagaggtggctcacgcatggagggaaaagaaatatattctgatcatgagaaacaagatgttgagatctccaaagggaagcaagtccagatcatgaaggatattgagctggaccaaatatccacttgtccaccatatggtgctcgagctgccctctatccgcttggaactggtgcaaatgccgaactcgatgacgatatgcttcagctgtgggaggctgcagagaggagctgcaagaaccaaacggccaagtcctcgtcatctgagcacgacatacaagccgtcgaggatctgaagagtgagcacccttcgtctgagctagcaaggggaagagaccttggaatcaataagctagaagcgtcgaagggagctgcagagcctcatgaggcgtggagcaagaacgtacttgagaggctcacttctgatgctcagaggctgttgagcatccaagcgagcattgaagagctgaagcagaaaatggaggggcagtcaaagggaaaatcccctatgaactctgagtacagcagtgtgagcgctcaggtgcatgagacagagggccatgtcttggaacagatcaatctgaacaacaaattgactaggacggctgagaactaccccacactgtcagataatatgagcaccgagcgagaagggtattccagcaggaggaagatctccgagcaggtgcagaaagggtcggagaatgtggcaaggttggaactggagcttcagaagattcagtatgtcttgctgaagcttgaggaagagcacgagtacagaaggctcaaagtctctgataagcgcactcgcgtgcttttgagggactatctgtatgggaggaaggaccgcggtggcgggcagaagaaaaagaagagggtcccgttctgtggttgtgttcgtccgaaatcaagaacagagccgtagcctttctttttgttcgacctgcacctccaagtggtagccgtagtccgaaatcaagaaataaaacaaaatcgacctgcacctccaagtggttggctaagtgtcgcctgtgcattggaagaggaggtggtgttcctaggatccctttgtaattgagttagcattttagtatcttttttcttttatttttgaaactagcattatagtatcctgatgaagaagcttatgtactaaattttttgttttcctgtctaaatgaggccattctggctagtttaatgcgttaatactgtcgtatatcaaggcgttctctttccatctataatagcttcgtgtttacagcccaagcagtgcattttgcttccaggttcagactgcagaagcaaagcaccgggactagtaagtcatttctttaatattgatgaataatctca

SEQ ID NO: 2634 - DNA, 5759 bp, Zea Mays
agccactgttgctcggcgaggttgcggcgtgggttctggcggagtttctccggttccacagtcgcggcgaaatgccccaggtcaccaacgcccatgcttctatgaccgagagactccgggcttgaccaggacggatttgagcgaatatcttgaggttcatattgttgctggaggggaatggaaactccatcagaggccttgaagccggcggaggctaaaccggcgaagccacggccagtggcgcccacgggcaggttcgccttggggactgcttcgtccattaaaaagcgagctgatggttcggctccggcggaggtgggtgtgccccggtcttccttgatgaagtctacctcgtcgctgaacgccagttcggcgacgagaagaagcagcacggggactgctgggaagcaacaggacaatgggagctcagctgctgctaagaagtctagtcctacgctgtcggatggcgcgaggaagactaaactggtgtcagctcccgctgctggctcaaaaccagcagtggagaagaaaacatccttggtcgagaggacaggtgccgatttggccaggaagcctgctgttaaggcatccccaacttcaacactgaagaaggtccagtcaaagacagagagctccaatggcagcagtggcagcaccaggagagtgtcctccaatgcttctgtgccatcgccacgttccgtcacaagcaatgcagcaaggaaactgggtactcaagcatcatctgctgcgtctaatcggcggaagagctcaaccgcagatagccgtgattcgagattcatgatgctgccacaggtggatttgaaggctagcgatgaagtgaggctggattcaagaggtcatcgagttcgtagtctcaagcagctgaggttatcacatgctcttgagtttgtgtatctgagggacaaccttttatcaagtttggagggcattgagattctcaagggggtaaaggttcttgatttgagttttaatgattttaagctccctgggtttgagcctcttgggaactgtgttgtcctccagcaactgtatcttgctggaaatcaaataacttcacttgctagccttcctgaacttcctaacttggagttcctttctattgctcaaaacaggctaaagtcagtttgtatggctcgacagcctcgacttcaagtgttagcagctagcagaaacaaaatatcaactttgaagggatttccacattttccttctctagagcatttgcgtgttgaggagaatccactacttgagatgccacacttggaagctgcttctatcctacttataggtcctactttgaagaagttcaatgaccgagatctgaaccccaacgaggctgaggtagctaagcaatatcctgctcatacagctatttgcattcgggatggttgggaattttgctcccctgaacttgctgctgattcaacattttctttcctacttgagcaatggaataataagctgcctcaaggttacatggtgaataaagcttatgttgaccatccgtttgaagaggatccatgccattgccattttagattcacaaatcttggtggtgagggtgagctagtcctcaaataccaatggtttctgggtggcaaaacaccaacagattttgttgctatccctggtgcatcgagcgaggtgtactggccaaaacgtgaggatgttggaagatgtttgaaagttgaatgcactccaatagtaaatggtgcagaattttcgcccgtttttgctgtatctttacctgtttctccaggtactggatgtccaaaggtcatcaatctggcagtcagtggtgaagtagtggaaggaaacatactcagtggagttcctgaaattgcctggtgtggtggaacacctgggaaaggcgttgcaagttggttaaggcggaggtggaacggcaatgctgtagtaattgatggagctgaggggatggaatatcagttgacagtcaatgatatcaattcaagtttggtatttatgtacacccctgttacagacgagggtgtcaagggagagccgcaatgtacaatgacagattttgtgaaggctgcaacaccatcagtcagcaatgtgcatgttctgggagatattgttgaagataacattatcgtagggaaaggaaaatacttcggtggcagagagggactaagtaaaatccggtggtttagagagaaggaaaatggtgaatttcttcttgtgctatcagacagcatggagtatacactaaccaaggaggacgtggggagacacctcaaatttgtatatatccctgttaaccttgaaggtcaggagggtgaatctgcttgtgcgataacagatgtagttaagaaagcccctccaaaagtattcaatctaaagattgttggggaatctatggaaggaagcaagatatctgccagtgctactgttacaggtggaactgaagggtccagcagggttcaatggtacaaggcatcttcctctgaatttaagaatgaacatgagcttgaagcccttactccgtcacgagtttctaagacattccgcattcctcttggtgctgttggatattatatcgttgcaaagtttacacctgtggcacctgatggtgaagtcggtgaaccagcctatgctacatcagatggccttgtggaaacactaccacccagcctgaacttcttaacagtcactggtgaattctctgagggtcagatattaacagcatcatatgggtatatcggaggacatgaaggaaatagtttatacagctggcaccttcatgaggctgaagatgacgaaggcactccactttcagaggcaaccggtttgctacaatactgtgttacaaaggaagctgttggaaagtttgtttctttcaaatgcacccctgtcagagatgatgatattgttggtgaggcaagatcattcataggaaaggacagagttactccagggatgccgacattactttctcttgaagtaactggtgatgcaattgaaggaacaactatgtttgccagtaaaaggtattggggaggagaagaaggggacacaatgttccgctggatactgacaaattctgatggaaccgagaaagaaattgaaggagcaacaagttcatcatacaccttgaaatgcaatgacattggcttctacatatctgtcttgtgcaagcctgttagaaatgatggagttgatggttctttagtgtcgactgaagcgattggtcctattataccagggccaccaacatgtcaatctcttgaactagctggctctatggttgaaggtggccgtttgacctttcatgctgtgtatacaggaggtttgcggggaagttgcatccaagaatggttcagattacatgatgatgggcacaaggacaagttgactgctgatgaatgtctagaccttgatctagctgatatcgattgccggattgaacttatgtatacacctgtacgagaagacggagtgcacgggttaccaaggagtgttacttctgatacaatcttacctggggagcccaagggtgtcaatcttattctacctgagtgttttgaggacaatgaaatttctcccatcaaaacctatttcggtggcaaggaaggcactggcaaatatacatggtttcgaaataaagagaaacttgataacttggaatttgatctggttgctgaatcatcagaagttgttggagaaaccttaaaatataagccttcattgaatgatgttagttcctatctgattctttattgggttcctacacggcgtgatggaaaggttggtgatcctttgatggctatctctgatgatccggtcatggcagcttttccatctgtttcggatgttcacttagagcagaaaagttcagatgtatattgtggactaggcatctattatggtggatatgagggattaagcttgtatagatggtacagggaatctagtgatggaactaggcttcacatagatggtgctgattcagtcacatacgaagtgacagatgctgattacagctgccgtctactgtttggttatactcctgttcgttcagatgggataagtggagaagaaaaactctctgaaccatctgatgtaattttgccagaactactcaaaatcgagacactcaatttcaaggggaatcaggttgaaagagaaacactgactgctgctgaacaaattccgtacagtgagattcaacaacatatatggaaaaattataagaaagagatgaaatatcaatggtttatttccaatgaatcaggaggcgatcagtcttttgaaccattggcaacccagtgttctcgctcatacaaagtgcgctttgaggatattggtcgttgcctgaaatgcgaatgctttgtcactgatgtatttggacgatctagtgaattggtatccgctgtgactgctcctattttgccaggaaggcctaaaattgaaaagctggagattgaaggaagaggtttccacactgacctatatgccgttcagggtacctatagcggaggcaaagaaggcaagagtaaaatacaatggctcagatcgatggttggaagccctgatcttatctccatacctggcgaaactggaagaacgtatgaagctaatgttgatgatgtagggtataggcttgttgcaatttatacacctgtaagagaggatggagttgagggacaacctgtttctgtttcaacagaacagattgcagttgagcctgaactttacagggaagtgaaacagaagctcgatgatggttcagtcaaatttgaggttctgtgtgacaaggaccgaacacccaaaaaggcacaagtaatgggccatttggagcggagggttttggaagtcaaccgaaagaggataaaagtagtaaagcctggatctaagacatcattcccgagtactgaagtacgaggaacctacgctccaccgttccatgtcgagctgtatcgcaatgaccagcaccgcttcaagattgttgtcgacggtgatactgaagttgacttaatggtgcaaacacggcacatgcgagaccgcatcatcctcacgatcagaggcctcgcccagaagttcaacagcacctccctcaacacacttctcaggatcgagtcatgatagacctgacagtgtaaaaaccaactattacgggaagctgtaccccttgttccgattggttagagtgcgtggttttagtaggattcgtgacatgccagccttttgtgtgtatgggtgtgggacgggccgagcgtgttggattacaattttttccctgacacatctctcaaatcagagcagcatcagctggttgctctgactggtgccgtcgtgcgtcatgaaatgtacatagggtggttagagcgagaaagagagtggtgtttcttggtgctgtatttattatgcactggttgggttgggttttttcgactgccattctcatactaagtattggttctttcttttttcggtcgttgggtttgcatatacttgtaccgacaacacagcttggggtgattgggcgagtgctgttcagaatgcctggtccacacttgtgtacgactggaatcctacggtggcgtattcacatgctgttttatggtgcaaatgtaaattcatctgttcataaacgagaatcaaaatcgtcggccacgtgtattcgtcgtattcgtaccgatgtatactaccttataaaccagtactaatctcacggtggcatcaattatcttcctctgtttcacaaggcacacgtt

SEQ ID NO: 2635 - DNA, 3773 bp, Zea Mays
  misc_feature (1)..(1): n is a, c, g, or t
nttagtattggtgagaatatccagaaggaaagccaaatgcccatggatccaagtgcttttcaaataatagaatgtgccgaagctcctaatacaggagttgttagtagtaagtttgctctgaatgtagcatgcgatagtcccatggatttaaatttgacaaatgttgggacttcagataacatcctgtacacttcagagtttgctgtaccaggtcgaaccgaggatagaagcatgcaagttgattttcatgatgcgaaagctgctttacataagccaaatcttcccctggaagtagtggatacagatacccatgatctgcagtcatccagaaatactgagagcacaattctgccatcattcggtgatgatcctatgaaggattcctctggtgctctgaataatggtctagggaggagcacttcatctcaagtaaccgaactgacacatcttcatagatcccacccgcctgctgactacaatccattctccttgcattcccatgattcaccatctgtatctggtaacagtgagcattctgttccgacagctttgacacttggtaataatatctatttcagtagtgcagagagtgagggacagcctgaggaaaaccataacctattggatgtaaacttaggatttgatgtgacaacgacagaatttggtaatgttgtcaaaagaaaaggtgaatctggcaatgacttaatgaatgcaggcagtcagaattggttgactttaccacttactgtcagctgcttggataatgcttctgctgttagtaatgggaggataggtttagagcagattgtggatgaaggtgtccctgttatctgtcaggatcatgatattatgctggatattgaccagcggggcagtattgatgttttgtctggccaggatcacaacctcaaactatgtggtatcagtattcctcaagcagtccttttggcaacagaagagagaaataaggatgttgatgatgagatcgttcgcccaggtcgagacttagcttctcagatatctgttgattctgatcacacttaccatggaagtactgaggatcctgtgggcatgtcaagtacaacacctgattcggtatcctcctggattgaagccattgtaccagaagctaacaaggaacaccaatcatgcaaatcttctctacttcctatctgttcttcagaaaaggtatcagcaccaaaggaggatagcaagaaggcgttgtcagattcagtagtcaactctgtagtaaaatctcctcctcgaattaatattgcaagctccacagtattgaagacttcaggattaccccctaaactgccattaaaaaagaacagcaaaagtcaaaactcttatatccgcaagggtaatgccctaattagaaatccagccaatggaaatcatcttcattcttcttctagtctagattctcaaaataagttgagtaagcctgttatgaggagaagcatgaactttgtcaggaatgtcgattcaaaagacgcagcacattctcatatttcagttgaaagacccaagaccccacctttgccacttcataccaaatccatcagttgtgctgtgaatgttttggagccattgtctcaaaatttgcagcaacaggtccttgaaactgaaaaggaagattccagtgggcaggttaactcaggtgctgacaatctaagcattattagtttgcacaagtctgaagcccttgatgctggtaaagcaatttatgttaggccaaagttaaatcaactagttgcacaggggcggcatcttggtgagtcgagtaacatttccttggataaagtgacgttgctgcagccttccgcaacatctgatctctatttcaagaaaaggaaaaatcagattattttgggtccctctacttctgatgccccgagttcaaaagatacatttcaggctgaaaatataaagtcaggtgagagtaaagttctaatgtcttcatcttccaacaacaatatcactgtggcaaaggacaggctgcacaaagctcttcagacaacaaatactgtcagaagtttctctcatgtatggacacttaatggacaaaatcctcgaaagaaatcttatgtgggagctagtcatatgaaggtcttacctcgtatacttccatggaaaagaaaaatattctgccagaactttagaggcagttattcttcgttgttgaatacaagctctataggaataatgagaaaattattgcaaacaaggaagagaagtactatttacactgtctctactgatggattctctcttcggaaatctggagtgttaagtataggcgggtcaagtttgaaatggtcaaggtccctcgagaaacattctcgaaaggttaatgaggaagctacacaggcagttgctgaagttgaaagaaagaaaagagaaaagagaaaacggcagtctctccgtagcaagggaaggaatgatcggtactctgcatcagttgctgccaatcaattaacaaacagaagcagagcatcttcagattcaagggtgtcatcaacttgcaatgaatatgtgcgtgttaacaaaggtaaccaactggtcagaaatccgaagaaagtaatccgcatgctagcaagtgagaaagttcgatggagtttgcacactgttagaacacgattggcaaagaagaggcaatattgtcaattcttcacccgcttcggcgagtgtaaaaaatctggtggcaagtgtccctacattcatgaccgagctaaagtggttatttgtactaaatttcttaaaggcttgtgttctagtactagctgcaaactaactcacaaggtcctgccagaaagaatgccagattgttcttactttctgcaagggctatgtaccaacacagcctgtccctataggcatgtgaaagtgaactcgaatgctcctgtctgtgaagattttttaaagggatattgtgctgatggtgatgagtgtcgtaaaaagcacagctatgtatgcctcgtctttgaggcaacaggagagtgcccacaaggatcaagatgcaagcttcatcacccgaagaagaaaagcaaatccaagagaagcaaagtagacaccgtccaaaacaacagttggggtcggtattttgagacaaacgttggccatggcagtggagcaagaatagtttatttggaggaagatgagagacagaaaccagagcaagtctctggtgaggagtttgctgacttcattgaacttggtgccggtattgaagtccctgaagatgcagacacttcggatgacatacagctgatggaactggacttagggaatctcgaggtgcaggctgacaataatgacgcgataatcaagccacttcggatcatgagaacggcaagagtttgatgagttctttggttggatacagctgcagtgttcctgggtcagggtggtattttacgctatgtttgacgtggcatataggcgctgactggagtttctatttctcgaagactggttctgacgggggcaatcggtttttgcttggttgaaggtttgattttgttcatcttgtacatcttttattaggaaatatattaggaccatatggcagtggtagaggccatgagggttactggctgttaacccgtgttttttcaacattacccagagttgaatgtaacaaacagtgctttacaatatgaaatgaatgaaggtttgcatacaggaaatgaagctttcattttgtgtatattgcacatttgcaccgcacatcttttggttataaattcgttaattccttccgtaag

SEQ ID NO: 2636 - DNA, 2848 bp, Zea Mays
actatcaaacgtggaacaaatttgccggcgctttattgatgaaagaagaagcaagcttagcaggttgattgctgataaactggggtggtccagtttcagtggattctggttagcaatggatccaagtgtgcgtcgacacatgacaagggaaaagactgaaactatactgaaagttctagtgaaacaattctttatagagaaagaagttacatcaaccttggtaattgactcactgtatagtggacttaaggcacttgaataccagagcaagaacaaaaagggcatacctaaactaacagagacagatgctcggagcactccaatggtacttattgatcaggatatgtttgttttggctgatgatgtgatacttctgcttgaaagagctgcattggacacactgccacaccaaccattgcccacgaaggatgataaaagttcacaaaaccgcacgaagccgaatagaagtggcacatcaagaggctgtggctttgaagcgccaagaggaactcattcgtgaagaggaagcagctgggctagctgaaattgaacttaaggcaaagcgtagtgctgctgaaaaggaaaaacgtgccaagaaaaaacaggcaaaacagaagaaaaatagtcgaagaagtaataaagggaagagtggcaagtctgacatcaataaggaaatacttatgtacagcagtccttcaggtgatagaatcctggatgatttttctggacaaacggaagaaatgtcctcaaatgctgacaaccctgaagaagtttctgatatatctgacagcagagacgataattcagatgcgcttcatgttgatattgaagaccgtgaaagtagccctgttaattgggagacagatgcttcagaaactcaagctactgtgcctggaagtagtgaggtgcaaaatgaccatgcagggaagaggacctctactgtagatgatagctcatcgacttgttcatcagactcagtcccttcagttatcgtgaatggatcatatacaggaggtgcctggacaagcgtcagatccttatccaataggggaaacaaccggaggaataaggatactgaagcacgggcagcacttgcacaaggtggatcaagttcagcgcataatggttttataggatctggcggcagtgcctctggccactcaaaggaaagatacgaacctgaggatgataaagttgtcatgcagaggaagcaacatgcacggcacattgatgtcattagcccctctaagtcaagaatggcagtgtcttcattttcttctgtgagccctgttaagaagcaacctaacttgtctcatcagccaaaatttttgctagaaagcaccaatagttcaaatcaccgtgcaagcgaagtttcaggcgccgtgactgccactacaacagcaggtgcctcttcaaccctggcagctcagttagtttcaaataaaggacctgtatccagtgctgcaacccggaatgagaagccagttctagttacaaataaacccctgcaggttcttgtaccatcaaaatctgaagcgcagaaacaggcttccctaactggcagcgcaagcactcaggtcgtttcggtatcaaggcccttgagtgccccgcaagtccctgcagcaaaacaaagtgtgccagccacaacagctcagaacgcacctcttctttctcgctcagtgagtgctgttgggcggttaggaaatgagccctccgccaatgctcctagcttcattccccggtcacgaacctatcgcaatgccatgatggagaaaagttctggtggcgtaagcagtctcacacatcagcaaggttcatctgagcaggccgtcgcaccatcccaatcgatgtttacatcgcagccttccattctgtcatcggagaccttgtctatgaaagaggaaacgtcgttgagacctgggtttacatttggaaccgtaaagcccgagtcactgaacccttaccagggcagagaagagaactcactgcaagcgagcagcagcagcagcagtgactgtacgccatcgagttcgaacatcagaagtgagatcgcgaagctcagtttgaacggaagatcacggagcaagcaactcctgtctgaaatctctaccagatttactccctaccagccacaaggcttggtagctgacgagttcccacacctggacatcatcaacgacctgctggatgaggagcagagtgacaggagaagggttcttcagcctggtttcgtccagcaattctctgtgcataacggcgtcagcgcgcctgattatggcttgttcagtgagccgtacctgttcgaccggtccgagcagtactttgacgaggagcctccaaggttctacagtccattgagcagcgctcctcggaggatgagggaccggagctactcgcacttcgatctcccttcatactccaggagcagccagcttgatggtctattgatgagccagtggccgccatacagccgcgccgacctcgccatgcctggttttgggtcagacacaggtggctactcctatcagccgcagggtttcccgagtccagcgagtgcagcaagcagatacccgtcgtatcgccctgccaatgggcattgagagttttagcgattgcaattggtaataatgtgtggtggagtccatgctgctcgcttctgagctgagtgtaattgtaatagtccccccatagcagtgatataaagaatggttcctctgttttattcaatccatagttatatcatttgcctctctttttctatagttcagttttgctcagtggcaataaatctcggctaaaatgatctggacaatctaggctcagttttccctagttttgctgagtggcc

SEQ ID NO: 2637 - DNA, 2855 bp, Zea Mays
atcaaacgtggaacaaatttgccggcgctttattgatgaaagaagaagcaagcttagcaggttgattgctgataaactggggtggtccagtttcagtggattctggttagcaatggatccaagtgtgcgtcgacacatgacaagggaaaagactgaaactatactgaaagttctagtgaaacaattctttatagagaaagaagttacatcaaccttggtaattgactcactgtatagtggacttaaggcacttgaataccagagcaagaacaaaaagggcatacctaaactaacagagacagatgctcggagcactccaatggtacttattgatcaggatatgtttgttttggctgatgatgtgatacttctgcttgaaagagctgcattggacacactgccacaccaaccattgcccacgaaggatgataaaagttcacaaaaccgcacgaaggatggcaactcaggtgaggagtttagcaaagattctattgagcgtgatgatagacggcttatagagctaggctggaagacattggagctttttgccttgactcatatatttagccgaatagaagtggcacatcaagaggctgtggctttgaagcgccaagaggaactcattcgtgaagaggaagcagctgggctagctgaaattgaacttaaggcaaagcgtagtgctgctgaaaaggaaaaacgtgccaagaaaaaacagaagaaaaatagtcgaagaagtaataaagggaagagtggcaagtctgacatcaataaggaaatacttatgtacagcagtccttcagagacgataattcagatgcgcttcatgttgatattgaagaccgtgaaagtagccctgttaattgggagacagatgcttcagaaactcaagctactgtgcctggaagtagtgaggtgcaaaatgaccatgcagggaagaggacctctactgtagatgatagctcatcgacttgttcatcagactcagtcccttcagttatcgtgaatggatcatatacaggaggtgcctggacaagcgtcagatccttatccaataggggaaacaaccggaggaataaggatactgaagcacgggcagcacttgcacaaggtggatcaagttcagcgcataatggttttataggatctggcggcagtgcctctggccactcaaaggaaagatacgaacctgaggatgataaagttgtcatgcagaggaagcaacatgcacggcacattgatgtcattagcccctctaagtcaagaatggcagtgtcttcattttcttctgtgagccctgttaagaagcaacctaacttgtctcatcagccaaaatttttgctagaaagcaccaatagttcaaatcaccgtgcaagcgaagtttcaggcgccgtgactgccactacaacagcaggtgcctcttcaaccctggcagctcagttagtttcaaataaaggacctgtatccagtgctgcaacccggaatgagaagccagttctagttacaaataaacccctgcaggttcttgtaccatcaaaatctgaagcgcagaaacaggcttccctaactggcagcgcaagcactcaggtcgtttcggtatcaaggcccttgagtgccccgcaagtccctgcagcaaaacaaagtgtgccagccacaacagctcagaacgcacctcttctttctcgctcagtgagtgctgttgggcggttaggaaatgagccctccgccaatgctcctagcttcattccccggtcacgaacctatcgcaatgccatgatggagaaaagttctggtggcgtaagcagtctcacacatcagcaaggttcatctgagcaggccgtcgcaccatcccaatcgatgtttacatcgcagccttccattctgtcatcggagaccttgtctatgaaagaggaaacgtcgttgagacctgggtttacatttggaaccgtaaagcccgagtcactgaacccttaccagggcagagaagagaactcactgcaagcgagcagcagcagcagcagtgactgtacgccatcgagttcgaacatcagaagtgagatcgcgaagctcagtttgaacggaagatcacggagcaagcaactcctgtctgaaatctctaccagatttactccctaccagccacaaggcttggtagctgacgagttcccacacctggacatcatcaacgacctgctggatgaggagcagagtgacaggagaagggttcttcagcctggtttcgtccagcaattctctgtgcataacggcgtcagcgcgcctgattatggcttgttcagtgagccgtacctgttcgaccggtccgagcagtactttgacgaggagcctccaaggttctacagtccattgagcagcgctcctcggaggatgagggaccggagctactcgcacttcgatctcccttcatactccaggagcagccagcttgatggtctattgatgagccagtggccgccatacagccgcgccgacctcgccatgcctggttttgggtcagacacaggtggctactcctatcagccgcagggtttcccgagtccagcgagtgcagcaagcagatacccgtcgtatcgccctgccaatgggcattgagagttttagcgattgcaattggtaataatgtgtggtggagtccatgctgctcgcttctgagctgagtgtaattgtaatagtccccccatagcagtgatataaagaatggttcctctgttttattcaatccatagttatatcatttgcctctctttttctatagttcagttttgctcagtggcaataaatctcggctaaaatgatctggacaatctaggctcagttttccctagttttgctgagtggcc

SEQ ID NO: 2638 - DNA, 2971 bp, Zea Mays
caaacgtggaacaaatttgccggcgctttattgatgaaagaagaagcaagcttagcaggttgattgctgataaactggggtggtccagtttcagtggattctggttagcaatggatccaagtgtgcgtcgacacatgacaagggaaaagactgaaactatactgaaagttctagtgaaacaattctttatagagaaagaagttacatcaaccttggtaattgactcactgtatagtggacttaaggcacttgaataccagagcaagaacaaaaagggcatacctaaactaacagagacagatgctcggagcactccaatggtacttattgatcaggatatgtttgttttggctgatgatgtgatacttctgcttgaaagagctgcattggacacactgccacaccaaccattgcccacgaaggatgataaaagttcacaaaaccgcacgaagatgctgttgttataggatggcaactcaggtgaggagtttagcaaagattctattgagcgtgatgatagacggcttatagagctaggctggaagacattggagctttttgccttgactcatatatttagccgaatagaagtggcacatcaagaggctgtggctttgaagcgccaagaggaactcattcgtgaagaggaagcagctgggctagctgaaattgaacttaaggcaaagcgtagtgctgctgaaaaggaaaaacgtgccaagaaaaaacaggcaaaacagaagaaaaatagtcgaagaagtaataaagggaagagtggcaagtctgacatcaataaggaaatacttatgtacagcagtccttcaggtgatagaatcctggatgatttttctggacaaacggaagaaatgtcctcaaatgctgacaaccctgaagaagtttctgatatatctgacagcagagacgataattcagatgcgcttcatgttgatattgaagaccgtgaaagtagccctgttaattgggagacagatgcttcagaaactcaagctactgtgcctggaagtagtgaggtgcaaaatgaccatgcagggaagaggacctctactgtagatgatagctcatcgacttgttcatcagactcagtcccttcagttatcgtgaatggatcatatacaggaggtgcctggacaagcgtcagatccttatccaataggggaaacaaccggaggaataaggatactgaagcacgggcagcacttgcacaaggtggatcaagttcagcgcataatggttttataggatctggcggcagtgcctctggccactcaaaggaaagatacgaacctgaggatgataaagttgtcatgcagaggaagcaacatgcacggcacattgatgtcattagcccctctaagtcaagaatggcagtgtcttcattttcttctgtgagccctgttaagaagcaacctaacttgtctcatcagccaaaatttttgctagaaagcaccaatagttcaaatcaccgtgcaagcgaagtttcaggcgccgtgactgccactacaacagcaggtgcctcttcaaccctggcagctcagttagtttcaaataaaggacctgtatccagtgctgcaacccggaatgagaagccagttctagttacaaataaacccctgcaggttcttgtaccatcaaaatctgaagcgcagaaacaggcttccctaactggcagcgcaagcactcaggtcgtttcggtatcaaggcccttgagtgccccgcaagtccctgcagcaaaacaaagtgtgccagccacaacagctcagaacgcacctcttctttctcgctcagtgagtgctgttgggcggttaggaaatgagccctccgccaatgctcctagcttcattccccggtcacgaacctatcgcaatgccatgatggagaaaagttctggtggcgtaagcagtctcacacatcagcaaggttcatctgagcaggccgtcgcaccatcccaatcgatgtttacatcgcagccttccattctgtcatcggagaccttgtctatgaaagaggaaacgtcgttgagacctgggtttacatttggaaccgtaaagcccgagtcactgaacccttaccagggcagagaagagaactcactgcaagcgagcagcagcagcagcagtgactgtacgccatcgagttcgaacatcagaagtgagatcgcgaagctcagtttgaacggaagatcacggagcaagcaactcctgtctgaaatctctaccagatttactccctaccagccacaaggcttggtagctgacgagttcccacacctggacatcatcaacgacctgctggatgaggagcagagtgacaggagaagggttcttcagcctggtttcgtccagcaattctctgtgcataacggcgtcagcgcgcctgattatggcttgttcagtgagccgtacctgttcgaccggtccgagcagtactttgacgaggagcctccaaggttctacagtccattgagcagcgctcctcggaggatgagggaccggagctactcgcacttcgatctcccttcatactccaggagcagccagcttgatggtctattgatgagccagtggccgccatacagccgcgccgacctcgccatgcctggttttgggtcagacacaggtggctactcctatcagccgcagggtttcccgagtccagcgagtgcagcaagcagatacccgtcgtatcgccctgccaatgggcattgagagttttagcgattgcaattggtaataatgtgtggtggagtccatgctgctcgcttctgagctgagtgtaattgtaatagtccccccatagcagtgatataaagaatggttcctctgttttattcaatccatagttatatcatttgcctctctttttctatagttcagttttgctcagtggcaataaatctcggctaaaatgatctggacaatctaggctcagttttccctagttttgctgagtggcc

SEQ ID NO: 2639 - DNA, 1715 bp, Zea Mays
aagcaatgagttccatttagcagcaccggcggcacggcaccccgcagtcccgggctcccggcgtcccgcacccacgccctacaggcagaccaagcaaatggcgatctcgatctcgcaggaggccttcgactccatggtccgggagaacatggaggacctcggcatggaccccgatgaggccctcgctgacgccgttgaggcgctcaccctccagggcgccgatctctcaggtatcgttaagcgcgtgccgggagaggccaccgcggcggaggtgagcccggtggtgcgggttctggacgaactgaaggcctctctcagcgccagcggcgggtcggagcaggatctcgacggacttgtctctctgctcgatgagttgcgcaatctgtgctgctccggcgagggttcggagaatgcagcgatcgcggtacggaatggcgtcgtggaggcgctcgtcgccctgtgcgcgtccgctcgggtcgagcaggagaggctgcttgcttcggccttgaagagtctgagctccgtactccgtgatgtggcaagcactgaaaagttcagacgaagtgagggacccagaattgtcatggatctcttgcaaggaggctcagaaaattcagatttattggatgctggatttagtgttgtggcagcaggttctgctggcaatgaagttgtgaaagagtcctttatggacctgaaggtcgatgaactcattctgcgggttatgaaggataaatcaaaatctaatgtgcaaagtttgtatgatgccattcgtgttctgttgaaacctgatgacaaccgagtggtagcttctcaggtatatggatactcccggagatttgctgaaatcggggttgcagaagttcttgtcaatgcacttcgtgagcaagtcgctccttccagtttgccatctgcttgtgctgctttaaagtcgattgcagtcaatgatgaaatatgccgttccatatctgaaaatggtggaattgatgtgcttcttcaatgcatcgacggggctggtgagcagaagaacaaagctgtagcaagatcttgctgctctttgttgtccaaggttcctaaagttgacatccagattttctgaagatcctgctataattcaagaggttatgtctatggtgacggtcctcacactgaggtcaccagaaaatgcagcacgtgcaatggaagaaggctatgggacactggctatacagtcaatgcaaaggttcccctcctccgtgcagactcagaagcaagcatgccttatgattcgcaatcttgttgcccgaaaccctgagaataggatcgtcctgcttaatgatggtgcagaaaagcttattagaaaggcaatggcgctgcacagaagctgtaaagatgctgcttcgtctgccttgagggacctgggcctcgacaactacaatgcatagacaccagtgaccagtcacaccatagaaaatgtgcgtcgagttagtttggtagcggtagaatgttttggaggagaaatacattgtatgagttatcgaggtgccgcactgaaatgagtttgtagaattgcgctactgtggttgcatcaatggtttcagtttgttgggcaatcaaacttcagggctattaggttgtttccagcaaatcgtacatatgatcatacaaaacacttcttttatagagtgagctttaaaatagtagatggagatatataatgaataagttgtttgaga

SEQ ID NO: 2640 - DNA, 1069 bp, Zea Mays
gtttggttacgagtcaggatgagatgggacataacaatcccacacactagactgtttgattgagtgtgaaggttcagacgagaccgtctctaaaaaaaatattatcactcgaatgctgtcccggttcatccctcggaatcagactgacaataccgtcctcaggacaaggcacctcagaagcccttctcgtccgcgccgcctccttgaccccgctggccggcgagctgctcagcgcggcttttttttgcatccacaatgccgcagcttggcacatgttcattgcctggagctgcaatctatggcacttcaactaggagatttggaggtttggagtttcagcaacataaagttaatcacatctcatttggtcggaaagcgtctgttaaagcaacattgaaaactgtgagatgcaatgccactcaaacacaaagcgtccaaaagaaatcttcaagtgcaactattcagcgtgataagaaaggaaatgtacaagggccaaaactggatgacggaagcggtgggttccctccattccgctttggcaaaggaattcgagaagtacctgcttgctcagaggcaccgagctggagatgatggcggcaacgggctgttgcaggcatgattgctttccgctggtctcactggcactagcagctactagtttctgatctgaagtgcttccttttgaacataacatgtgtctctgggttaaaatccaactgcaattgattgttctgggaacttgctctgccattgatccgtgtggtgtcaagtactgtggaaatcgtctgctgcgtccactcgaactttctcacctcgtcttcagcaaggttcataggaagttaggaacacagtggttaaaactccaagctcttcggaggaacttttttttggtcataataaggaaaacatctcctaggatgatgggaagttcatagtcagccgcggtcctgacattttaggggcctaagacaaaatttaaaatggaggaccttattatataaatattatcaatataaacactcaaaatacatcttaaaatgtatatatcaaataacaagtaaataaaaag

SEQ ID NO: 2641 - DNA, 1475 bp, Zea Mays
attttcctttgttaaggtaatggcaggatctggaaatttgcagactttccgcttactgcgctatcttagaggaagaatttctgcagaaggccaagtgaattatggattgcagatggcagtaagcttggcaataggattcttattccttggaggtggaacacacacattttcaactcagaatagtgcaattgctgcattactaatctcactttacccacgtttacccactggaccaaatgacaatcgctgccatctccaggcattcaggcacctatatgtaatagctacagagcctcgatggattcagacagtggacattgacacagaacttccagtgtattgtccattggaagtgacagttgctgaaacggattattatgatgagaccaactattgtgaggtgacaccttgtcttctgccagaacgctcagtggtctgtgatgcaccatctgctagttgcagtaatcaaccaaacagcactaatggtagctacttcagagttgatcagctagtaagcactttctcggccaatccaagcttgattgcttttgcaaaactctgctccgtgtcatggaagagcagatgcaatagcaattttcaggagttctgttctcaagtgctatatgaatgtatgagcaaagatagaccatcactgttacaggcctatatcagtttttacacaacaatagagttaatgtgggagcatttgaagactgggaattttcctttttataattcccttttccttcccaacttgaaggtcgctttggcctacaacgaagcattagttgattctagaatcacaaatggaggaattattcattcgacattcttggagtcacttatgaagcgagtgggagacatctttgcggagctgccaaacctcaaggacaacctccaccgatacttgagcacgggcacatggcctgacacacaaaacgacgtggtggttctctcgtggtacctccaatggtacaatataccacctgcccatgttgtggcttctgcagttgagaaggtcagaccgagagtccctgccggtgtatctatgctcccactgcttcgcctcctgctgccaaccacacaccttgtgggactgatggagatcgagaaggtacagattgtcatggaatgctaaaggatgagcgtggaaaattcaatcaaccttctctgcatgcgggttacttgtgatgaacggtagcaagtattgcttagtgcacttgtgatgaaatctgccagggactaagctgttctgaattaagtttgagacaaaagaatcccataatttttattgtgctttgctttagattcatattttctgcatgaattgtttcgattctacccatgagaagtactccctctgtccttatcagaggtcaaaccctctaagtttgacaagtttatagaaaagagcaaccatataaaaatgtaagtcttatatatatatttcataatatacctaataaattttatgc

SEQ ID NO: 2642 - DNA, 2547 bp, Zea Mays
gcagcggcaggaggagccgtgtgggcgcgggtgcgtccgagagaggggaatcgggccgctgcttccggcgacgcagtcactctgctccggcgctgacgagatgaaatgacatgaggagggagcggtcgagacggcgattgacgacgcaccgcacgccatcggatctgtcctctacttctgcctcatgttgactcctcggcgctcatccgcctattattttaaaatggagatgaagaatcgagatcgtccatgatccgtattcctccctcctcgttgactgccgcggccagcgatctggtcgtcaccttcctggaccgaccccaggccacggtgcagcagcctgcactctagtccgtgcgtgtcgcgtcgcgtctgcgggcggcattgcgtatcgtttctgtaggagcagaggagcagctgcctgaggcaattgttcccgtccccgcagagcggcatgtctccgcctccccctggcggctccaatggccgccgccaccagcagcagcggcaggaggcggtttcgtccatggaatccggcggcggcgcgtcgggggcggcgaccaagcgcttcacctggaagggcccggtaatcgtcctagtcttcgagctgctggagagcatcgcgttctcgggcgtggctctcaacctggtggtgtacctggccacggtgctgcacgggagcaccgccttcaacgccgcccacgtcgacacctggaacggcaccaccttcatcgtccctgtcatcggcgccttcctcgccgacagctactggggcaagtacaggaccatcctcgcctccatcgtcttctacctcgtgggcctggtgctcctcaccgtgtccgccgcgatcccgtcgctgcggcctgccacggcgtgccagatgggggagtcgtgcgcgccggcgaccaagacgcagttctccgtcttcttcgccgcgctctacctcacctccatcggcacgggaggggtcaagtccgcgctgctccccttcggcgccgagcagtacgacgacgacgcgggccggccggagcggaagcaggcctttttcagctggttcttcgccgccatcaacctgggcatcttcgtcgccggcacgctcgtgtcgtggctggagcagaacgtgtcgtgggcgctcggcttcggcatcggcacggcctgcctgttcgtggccgcgctcgccttcgcggcgggtacgccctgctacagggtgcagatgccgacgggcagcccactcaaggacatcatcagggtgttcgtcgccgccttcaggaagcgcgacgtcaggatggaacgggacgagggcgcggcggtgctgctgcacgaagacgaagccgaagacgaagacgaagacggcgatagcgctggacagcagcagcgactggcgcgcaccaagggtctgcggtgccttgacaaggccgcggcgatcatcgtcatggacggagacaaggagcgggagagcgaatggtctctgtgcacggtgagcgaggtggagggcgtcaagatcctggtgcggatgcttcccatctggatgacgtgcgtgctgtacgcggcgtcgctggggcagatgaccaccaccttcatccagcaggggatggccatggacacgcggctgggcggccggttcaaggtgcccgtggcatcgttggtgtccgtggaggtggtgttcatgctcctgtgggtggcgctgcacgacgccgccatcatcccggcggcccggcggctgacggggcgccccggtgggctgacgcagctgcagcgcatgggcgtggggcggttcctggtggtgctggccctggggacggccgcgcttgtcgagaggcgccggctccgcgccatccacggcgggagcggcccgatgagcatcgtgtggcaggtgccgcagttcgtgctggtggcgggctccgacgttttctgcggcatcgcgcagctggagttcttctacggggaggcccccgccgcgatgcgcagcatctgctcggccttctccttcctggcgctgtcgctggggttctacgtcaactcgctggtggtgacgctggtggcggccgtgacgaagcggcccgggtggctggcgacggacctcgacaccggccacctggactactacttctggctctggaccatcatcagcgtcgccaacctgctgctctacatggtgctcgccgcccggtacacgcccaagcaggtcgccgctgccgtggtggagccgatgcgtcccagcaacagtggcggcagcgacgaatgattaatttggcacatcgatcgactgcaacttgatccgcttactatacagtaaaaaaacgagatatggtcgagtaggatacactacactgtacacctaacactagtagtaaaatggatgctccccagtcaacatttctttcagatcgacctgttattttgtgtttagttcagctcctcatgtaaagtgctattgttggtaaaaaaaaatagagcgtcaaccaaacgaataaaaattagaagatgttaattttatgctgtataattttcggtataaaatagataaaatgaaataaaatagagaga

SEQ ID NO: 2643 - DNA, 1203 bp, Zea Mays
tttgtaaaagtatcgttatccctttaccttctctccagccccacgcacaggttatgcagttcctcagaggttcctggaagctgcaacaatggagctcaagtcactcgccaatccattcccatgccggcgtccaccggacccgaagaagaagatccggccggcgcgccgcagcagggctccgtatctgaagtcgacctgcgcgctctccaggcggagggcggtctcagacatggcggttgtcggcgcagtggccctctccacgcccacgccggcgctagcagagcagcctgacgtcaccagctttcaggtaccggaaggtggggagtggagtcatactcgaagatgtcgtcgagggggaggggcccgaggcgcgggagggcgacctggtgcagttcaactacgtgtgccgccgcgcgaacggctacttcgtgcacagcacggtggaccagttcagcggcgagagcaggccggtgacgctcgcgctcggcggtgaagagatgatccgaggcctgagagacgtcctgattgggatgaagtccggaggcaagaggagggctctgatccctcctgaagcaggctacgtcagcgagacactgaagcccataccggaggagtttggaccgaggcgaagcctgctgtcccacgccaaggagccgctggtgttcgaggttcagttgctcaaggtcctgtgatgctgcgttcatggtgccatcgtcgtggccagttcgttgtgaacttaaatgttcttcctttggaaacgaaatgccgttcacttcagaatggttctgctctggaatggaaaagcgaatggtttttttttttgtgtggatttcctcatgaccatttgcagatactgccgaaaacctgtcactcggcatagatgttcgtggcactgcagcagccagcagcagcagccgaatgtctccagtgctggggcctggaatggatttcctacttcttaatttaaggctctcttttatattgatagtttgatttaatttttgtatctctgctctagagcagcagttcttaaattaggggatcttaaatagtcactgacatttgagacccacttgtcatggttggatactctaccaacacacagacgaaccggagccaccatcgcgcgagctctgacagctgaattgaggggagggtttcatttcagacatgaaaatgactttgttttcttcctaccagtag

SEQ ID NO: 2644 - DNA, 721 bp, Zea Mays
cccatcccacgcctcgccgtgtccaggctttaagccacacgcacttgagctccaccgccactaccaccagtaccacaccactccgcgctagctgaggacggtacagcggcacagaggtgcgacgtacgacgacgacgacgcaggcgccacacatggcatcccagctctccgccgccgtgccccggttccacggcctccggggctacgccgcgcccaggtccgcggtggcagcgctgccgtccgtgagggtgggcaggaagaggtcgtcgtcgcagggcatccgctgcgactacatcggctccgccaccaacctgatcatggtgacgacgacgacgctgatgctgttcgcggggcggttcgggctggcgccgtccgcgaaccgcaaggcgacggcggggctgaagctggaggcgcgcgactccggcctgcagacgggtgaccccgccgggttcaccctcgccgacacgctggcctgcggcgccgtcggccacatcctcggcgtcggcatcgtgctcgggctcaagaacaccggcgccctcgaccagatcatcggctagatccctacgtcgccgttgttaagatcagactcagcagcctcgatcgcgccgccggccggcaggtgcaggtggtgactttgtaacgtgtgtgcgtgcgtacgtgtacattgcatccatcttggttccaatggacatatagctcctgttgctcctctaaaaaacca

SEQ ID NO: 2645 - DNA, 721 bp, Zea Mays
cccatcccacgcctcgccgtgtccaggctttaagccacacgcacttgagctccaccgccactaccaccagtaccacaccactccgcgctagctgaggacggtacagcggcacagaggtgcgacgtacgacgacgacgacgcaggcgccacacatggcatcccagctctccgccgccgtgccccggttccacggcctccggggctacgccgcgcccaggtccgcggtggcagcgctgccgtccgtgagggtgggcaggaagaggtcgtcgtcgcagggcatccgctgcgactacatcggctccgccaccaacctgatcatggtgacgacgacgacgctgatgctgttcgcggggcggttcgggctggcgccgtccgcgaaccgcaaggcgacggcggggctgaagctggaggcgcgcgactccggcctgcagacgggtgaccccgccgggttcaccctcgccgacacgctggcctgcggcgccgtcggccacatcctcggcgtcggcatcgtgctcgggctcaagaacaccggcgccctcgaccagatcatcggctagatccctacgtcgccgttgttaagatcagactcagcagcctcgatcgcgccgccggccggcaggtgcaggtggtgactttgtaacgtgtgtgcgtgcgtacgtgtacattgcatccatcttggttccaatggacatatagctcctgttgctcctctaaaaaaaag

SEQ ID NO: 2646 - DNA, 1840 bp, Zea Mays
gaccctgcatgcgcgcctcccgctccccttccgcctccggtggaccgtcgacagcgcccggccccggcggctgcactgcgcgccgcgtgcggccggcgggcagtgggagccagcagccgctgctccagcaaggcggccgtgccgctttggtagcgcttgcccgaaacgaagcgttacctgtccgcttacgtttcagcgcgagcttagtgcctccttttggaaccctggtcttgcatgatactaatattttcgaggataacagcaagaagcattcataaagccatacacatttctcattcatattcttcaagctttcgaaataaagaattctctagttataagccaacgtttcagcatcttagcactaacaacccgatgaggccaaatgattcgttggaggctcaagacatggttcctgctgagggaaaccacagttgcttctcaagtgttcagtccactccagaaattgagaagaagtatgtgcatcgtgtctatgatgccatagctccccatttcagtgcaacaagatttgctaaatggcccaaggttgcaggattcttgaattccttgaggccagggtcggttgtactggatgctggctgtggtaatggcaagtatttgggtttcaaccctgattgtttattcataggatgtgatataagcccaccgcttattgagatatgtgctgggagagggcatgaggtgttggttgctgatgctgtcaacctcccatacaggaatgattttggcgatgcagcaatttcaattgctgtgttgcatcatttgagtactgatgataggcggaggagggccatagaagagctaatccgtgttgttcgaagaggtggtctggtgcttataacagtctgggctagggagcaggaagacaagtctttgctcaacaagtggactcccctctgcgagaaatatactgaagagtgggttgaacagagcagtcctccagtacgcagtaaatctggaactcttctggaaagcattgcagaaactgatgaagatgctggtttcacgaagcaaacagatgaccgattgaaaagctgtcatggtgaggtggaggacaagaccattgactgtagtaattcaaagactgatgaaaatgagaaaaaccagcaggagtactttgttccatggcatctaccatttcaccgagctgaaattggtggtgcatctgctgctctggaaaatggatttgcaaagaaagatgagaagaagggtacagtggtctacaatcgttattatcatgtttttgttgaaggagaacttcagagattggtttctggcataaagaatgctgctattgttgaccagttctatgacaaatccaactggtgcattgttctcgagaagctttgagctgcagaaaaaggaatggcacaagaagccatcagaatatgatatttgtggggattcagtggtaggcgagccaaatgtgtttatcccgaagtgtatgatgcattgtttaagggatcctgaaatttatggtgcattgttaagacttatgtcagattgcccaatattttgagggccatctggacttgaagaaatatttgctgtcaatctggtcaacaccgtgaattagcatgattgctagtactgtttttgatataagtatgagctttcattgttctacggcatcactgttcattagctggtggagggatgcttatagttcatttgcacctctagcctactattcaaccacgtattagccgttcgatggatcaaaacagactctggctaataattagctagctgatagttagcaactatcagttagctaactaatggattcaaacatgttcttatgcttcttgcattttac

SEQ ID NO: 2647 - DNA, 1452 bp, Zea Mays
aaccagaatcgccgcaagccaatctgtctccgccaggcgccaagccaaccctcaccaccacccgtccaccgtgcatcaccgcccacagcctttattcgccaccgcagcaccccctgctcggccgcccgcccccgagttcccactcggccacttcccacatctctctctctctggctctctgctcgccacgcgccgtaccagcgccgcgcgccacatggctccctcgttcactagcctcctctcggccgcgaactccgccgccgccgcgaccgcctcgcggctcccctcggccgccgccggacgggcatccacttttgtgcgcttcccgcatcacccgacgggctgggctggggcctccgtcgcggcgccgcgtacggcgcgcaagcgggcacccggcgtcgcctacgccaccgcagctaccgagaagagcatctacgactacaccgttaaggacattgatggaaaagatgttcctcttaaaaagttcaagaataaggtgttgctgattgttaacgttgcttctcaatgtgggttgacaacagcaaattacactgaactatctcatatctatgagaagtacaagactcaagggtttgagatccttgcatttccttgcaatcaatttggtgcacaagaacctggatcaaatactcagattaagcagtttgcatgtacaagattcaaagctgaatttccgatttttgacaaggttgatgtcaatggacctaatacagctcccatctataaatttctgaagtccagtgcaggaggatttttgggtgatctcgtgaaatggaattttgagaagttcttagtggataagaatggcaaagtcattgagagatatccaccaacaacttcacctttccagattgagaaggacatccagaaactgctcgcggcataagtacttccaagtctttcagttgagtatctcagtatctgtatataggctccgacacttcagaagttcttttgaatggcgtccctgggaaacgatttcacagcaaacgtggaatccttgcaaatacatttcactgcaaaattggttcaatgctgttcacctacttagggcttcccttgggattacaaagacccaaccttggtgcttttcttccacttattcagaaaattgagaaaagacttgcgtcaacctctgtcttcttatcccaggctggcagattgcaaatgattaatgcagtcttctcacttccaacatattacatgagcattctcaagctcccaaaaatggtgatcaaacatattgacaaattcagacgacactgcctttggagaggagcagatttaaatgcaaagaaacatcctcaagtagcctggaaaacagtttgcaagccaaaatttcaggggggattgggtgtgataaatttagagctacaaaacaaagcccttcttatgaagaatctgcataaattctacaacagagctgacatc

SEQ ID NO: 2648 - DNA, 3206 bp, Zea Mays
tttgagaaaggaaactcaagcttgatctaggtgatcgcttgagagagggaaagagttgaaagagacacatcctaagtggactccttaatagagagctcagtggattcgcacgccaccgaccgcgccgctctgctcgccttcaagtccggcgtacggggcaacctctccgactggggctcccgctcccctagaatgtgcaactggactggcgtcacgtgtgactcgacaggacgcgtgacgcgcctccttctcaagaactctaacctcagcggcgtcatctccccgtcgatcggcaacctctccgctctcaggaagctcgatctccggttcaaccacctctccggcaccatcccgcgggagctcggcatgctgtcccagctcctggagctgaggctcggccacaacagtctcaccggtaccatcccggaggccgtcgtctgcaactgcacctccctgacctccatcatcctgagcaacaacagcctcaccggcgagatcccgttctccgcacggtgccggctcccgcgcctgcagcagctcagcctctacgagaacaggctcgaaggcggcatcccctcgcccatgtccaacttcaccagcctcagctgggtgcttctgcagtacaatcgcctcggcggcgtgctgccgtcccagatgttcagcaagatgccgtccctccggtacctctacctgtccggcaacagcttctcgagcgacggcgggaacaccgacctcgagccgttcctcgcctccctggcgaactgcaccgggctgcaggagcttggagtggggtcgaacggcatcggaggcgagatcccggcggtcatcggcaacctgtcgtccgccaatctctccctgctctacttggacgacaacgagatcaccggtgccatccctcgcgccatcggaaaccttgcctcgctgacggatttagagctgcaggacaacatgctggaggggccaatccccagcgagctgttccatccacgtgggcttacaaagatagtcctctcgaataaccagatcaatgccgaaatacccaaatccatcggcttattagctcagcagctagccaccatcagcatatcgaatagcggtctccgaggcgagataccagagaccttgtcgaacctcaccaacttggactacgttcttcttgaccacaaccagctctcgggtgccataccacctggtggtcttagctgccagatgatcctggacctttcgtacaacaagcttacaggccagatccctagtggcatgcctgggctccttggtagcttcaacatgtaccttaatctctctaacaacctcctagaggggcccgtgtcgtcactggagttcggcagcatggagatgatccaagctcttgacttgtcgggaaacaagctctccggcggccttccgtcttccatgggcgccttgaaaaacctccgtttccttgacgtttcttccaacggccttaccggtgtgattcctcggtctctgcaagggttgccgctccagtttgccaacttctcacacaacaacttcaccggcgaggtgtgcggcggagggtcattcgcgaacctcacgggcgactcgtttctcggcaatcctggcctgtgcgggtctgtccccggcatggcgccatgcggcggaaggaaacgtggccgcttcctgtacatagccatcggcgtcgtcgtcgccgttgctgtcggcttgttggccatggtgtgcgctgttgttgatcactacctgatgaggtcgtccaggtcgaggttggcaatggcagccccatctagtctactaccacgtttctccacgacaggattggtcaaggccaccggcgacggcgagaaggagagcggcgagcacccaaggatctcgtactgggagcttgccgacgcgaccgacggcttttcagaagtgaatctgatcgggaaaggaggatacgggcatgtctacaggggtgtcctccatggcgagagcgagacggtgatcgccgtgaaggtcctgcgccaggaccaggccgctggtggcgaggtggtcgccggcagcttcgagagggaatgccgggtgctcaggagcatccggcaccggaacctcatccgcgtggtcaccgcgtgcagcacgccggagttcaaggcggtcgtgctccccttcatgccgaacggcagcctcgacagcctcatccacgggcctccggcggcggcggcaggcgggccgcggcacctgggcctggacctggacctgctgctcggcgtggccagcaacgtcgccgagggcatggcgtacctgcaccaccacgcccccgtcaaggtcgtgcactgcgacctcaagcccagcaacgtcctcctcgacggcgacatgaccgccgtcgtatccgacttcggcatctccaagctggtggcgaccgacgacggcgcgagaggtccagaggtgacgggcgaggcatcgacgtcgtccgtgtgcaactccatcactcggctgttacaaggctctgtcggctacatcgcgcccgagtatggcttgggaggccgcccttcgacgcaaggcgacgtgtacagcttcggggtgatgctgctggagatgatctccgggaagaggccgacggacgtgatctccgaggaggggcacggcctgcacgactgggccaagaaactcttgcagcacaagcgtgacttgggcgccgtcgtcgaggagcgctcgctgctgccgtttggcccgccgccgcggggcgagatggaagaggtcgccgtcgtcttggagctgcttgagatcggtgtcgcgtgctcgcagctcgcaccgtcgatgagaccctccatggacgacgtggcgcacgagatcgcgtacctcagggacggtacgtggaggaagtacggggtgacagatctcaaaaccaccatttttgaccagcaaactccaagatgcaccgactagttctatcttcagttgtccggtgccaaacgattagcacaaccgacagatctagcgtatatgtaactaagtttgaagtattgggatatagatcatggcctggtgtcaatgtgtgctactagctgtattgtactcgccgactgtccgtaaataaaccaccaatttgtaaagctgttttaaattatgtttaaaaattagctaagcgtataaagatatatattaatatttctgacatcaaattagcactataaatattagtgctttccttataaacttggttacatttt

SEQ ID NO: 2649 - DNA, 1008 bp, Zea Mays
aagacatactaaacgttagtcgtagtcagataaccaaacaccccaaactgcctgttcaccattttcgccccaaatctgccgaggggattagccgatcgaagcgtcatcggcggctgcgacaatggcggggctgtcgctgcggtgcggcgactgcggcgcgcagctgcggagtgtggaggaggcgcaggcgcacgctgagtccaccaaccacgccaacttcgtcgagtccactgaggccgtcctcaaccttgtctgctccaactgcggcaagccatgccgctcccataccgaggtggacctgcacacgaagcgcacgggccatacggagttcgcggacaagaccgcggaggcggccaaacccatcgacctcgaggcgccgcttaagccggcctccgatgatgccacggacgtcgatgcgtcggcctcggcgactgaggagacacaagagacggttgtgccagaggtgaacaaggaggtgctcacggaccttgagggcatgggtttctcgacagcacgtgccactagggcgcttcacttctctggtaatagcaccattgaatgtgctattaactggctttctgagcaccaagaggacgcagatattgatgagatgcctctggtaccagctaactcaaaaacggaggttaacaagccaagcctgactcctgaagaaatgaagattaaagcacaggagctaagggagcgtgctcgtaagaagaaagaggaagaagagagaagaatggaaagagaaagggagaaggaaagagtacgaatcggaaaagaacttcttgaagccaaaagaattgaggaacaaaatgaaaggaaacgcatgatagaattgcgaagacttgagaaagaggaggagaaaagagctagagaaaaaatccgccagaaattagaagaagataaggctgaaaggagaaggaaactaggattgccaccagaagacccagcagctgccaaaccaagtgcaccacctcctgttgaagagaagaaggtcaagaccag

SEQ ID NO: 2650 - DNA, 1056 bp, Zea Mays
gttggatcgtaactaacgctagagaagcactccgaagacctgctctccttcgttctgtttgttgtttttcttctcccgtccgcagtccgcttggcgtgcgcgacggctagggcgaccgccgccgccctacgccctacgtccagctgcccatgtcttcttcgggccccttgccggcgggaactcaccagaccaggaatcgtgctggcaaccggcgcaagtctggagggttttattatgcatttcctcagatgcaaccaaatgaatttcgttatgattttaggcacatgctattttgctgtgtggtttgctgggtcgatgcataagcggccctactgttcaccagatagggctgataaagctaattactcctacaataatgatggagagaagagcaatgttccttcattaaagaaccttcctccaattgttcatcatgaaacattcttcagcaatgttcagaatgactacaatcaaacaggattagtgcctttggagggatgttctgccagtgaggcttcacagcttctcagtgatcgctggactgctgcaatcaacatgtacaatgaccaaacaattgacccctcagagaaaccggtaatgtattctggatctagcagctcatcatggggtcacctgaagcttcctcatcagatgaacttcctcgaggagttgcgccgtgcagtggacgctcatacagaatttgcgtcgcctgtcgtcacctggaactaatcgaagctgttcgccaggtctatgtatgatgtatcccatacacggatgatgtgccaaaaggctttcgtctgacctgcagctgcttctggaatctgcatctgtacaattgtaccattgttacccctggccttgtagctgcaaagcagtttgttgtaacaattaaatgaggcgccggatcctcacgccatcgaaagtttgaaacagcttggttgttgtatggtagttccaagacttggtgattataatgtgcgcattttctcgacctggagttttagaatatgtagaaggtaatgcttattgaaaacctcagcttttaacttcaacggt

SEQ ID NO: 2651 - DNA, 3345 bp, Zea Mays
aattcaatccattcacatcacagctagctagctatctgcggttgcaggtgagctcgtcagccggttcatctccttcgcgttgaacagatgctgctcctcaagctacgaaagatcggaggagaagcgggagaggctgcggcacctcctgatgaggtctcacaccgtcgtcgaggaggcagatgcacggcacatcaccaactccgggatgctgacgcagctgaaggtgctgtcggaggccatgtaccagggctaccatgcgctggacgccctgagattccagctcgacgacgagttcttgctccggcggcgaaaggggagggcaaggcacaggccgcactggagaacctggaaacagccatggcgaacagcgcagagttcgtcgcgcttctgtgcgggtgtgagcgcctgtcccgtcggccctacgacgcgtacctctacctcgggagtatcatgtttggccgacacgccgagaagcaaaggctcctcaacttcttgctgcagcagcagccaggcgacgacggcgcaccgcctcccgtcctcccaatcgtcggcgctcttgcggccgggaagaaaactctggtcgcccacgtgtgcgccgacgacagggtgcgctcgaaattcgcttcggtgctccatctgagaggagacgacttcctcctgaacaccgtccaccatgagaaggccatgctgctgggggtatcgtcactcgtagttgtcgagcttgtctcggacgtaggcgacgaggaatgggacgcgttctactcgttcgtggcgagagcggctagtgcaggaagcaaggtgatcgtcatagccaagcatgcaagatcagtagcaaggtttggtgggtcagcaagaccaccaatctttctcggcgctctgtcgtacgaggagttctggtacctgttcaagaacctggcgttccaagccgcggacccgggcgagcatccaaggctagtgcacatagcagaggggtttgctaaggaactgcaccagggtggatcgcttgtcgcagcgaacgcgttggctgatgtgctgagaagaaacctgaacgctcaggtctggctgtcgatactgaacaggtgcagaagagtggtcgagaagaacctctgcgcctacgggcagcaaccgaagctgctcctggagcaaggccgtgaggtggacataacggagttcgtcgttccgagccctgctggtattggtcaccttcgcatgataccttgtactagtagaggtagtagcaaggcttactctcgagttgtcaatgatctaccaaaggtggcgtttggagagctactgttagatccttctgttaggcccaaaggagaatttagtctgctgacgtggaaatcaaggttacccccttatacttcattcatcaacttcgttccagattgcaccgcagacatgcctcaaggacatagcttgtcaggcaggaagcgccaagcagtgcctttctgataacacaatgtatttacatgtcggatgtactgttttcagacatctagctacagtgattattgaacagtttgcaagctactgctggaatgttgtttacaaaaccagacaggagtggtgttgtttactgtttcaagagagacactcagacagaaatagtgcgatgtggaactaaccaactttacacctctccactttcgacccttcaacactacaattttacttggccaaacaacattttttttcttttgctaaggaaaatgtgttgcacaaggccgggtatcgatttgcaccccctcgccctctaaaatactagtcagtagtcatatgaccatagatggtcatgcacgtatggtacaggcacaactcatataataaagctcgttatcccccattgttgccattcaagttggtccacatgatctgacaacatgagaaaagtgaagtctttacagacaagtatgctgcatcgacgacgaccaattcacatggtccctagttcccgttcctgtgactctcctcatctaccgcgtcctcaaaacgttggtcattgatctggagctgcacatataaataccagttgcgttaccaatcaacttggaaagatcgaaaatatatatcagttgcgttaccaatcaacttggaaacgtcgaaggacccagatccaatggcttaggctaccaagggaggctatatctgaacttcaaatattacagtcctgatgaagtatttccatcaggttcatagatgatgctccctctgtcccaaactaaaattcgttgactttttaatgggttggtgtatgtgttctatatatatgtctacattcatcatctagttgaatatagacataaatcaagagctaaaacaaatatgtatatgccttcataaatatactgcatgccaatacagtagggaattcagaaattgcaaaatagcacccaaataacactcttgaacagggggtgcgtgggcagacacatccagacccacaaccaagttagcatcagttcagcctaaataacatgttctgctctggttcatttaagaaaatactcgggaattagattctaattagatcttaaaatgttagcaacttcctaaactatagttctgcaaacatgttctcacaacaatcgacctatggtaggtagcagaagatatgaagacgaaacaaacattaaacaaattaaaggcagtgacaaccaaacatataaggacagctcaggctgccagatcaaagaagaaatagtgtgttggggagagccctgaccgaaggtccatattaacaagggattgtctagtttacaatttcagggtaacaaacagaatcaagttcaaagcacaagggagcttcggatcatggaggaagttgaagcttcagatggatataagctgaagctctcaaatcttcaaagcgccgtacggcacgtcaaggacatcgaatgatgaaactgcacttctatttctatgagcaacatttatgtaataggaagggtagaactgtaatttcatacaaagatgtatattagtttgagcctatagatagatgaacaatgtccattcgggcatctctgcatttgtgtcccctccccgtgtttagagaacctccaaggtatatgcttccaaaggttactgactactcaacttccattgtattcaagtctttccctaagatgcaattattggcaatgtgctttactaggttattcgattgaaggaacatgcattccaccttcaaccaatttggtgcaactcatcttttacactttgtaacttctcatgaatttaggtatattgttagaatgggtgttcctatattatccatgtatgtgggctgctcgcacattagagttagtgttcccctaggtctatatatgtaatcatcct

SEQ ID NO: 2652 - DNA, 3559 bp, Zea Mays
cactcttcccccactcccccagcacgccactgctcacacagaccaccccccactcggaggcggagtggagctcctccaatccgtcccgaatccggacgccgctcgcaccgcccgcaccgcccgcagatggacgcccgccccccgatccgcccgctctgaccagacgaacccggtccccgcccccgccgccgccgctggagcgcggtaatggcgggcttctagcgcgtcggacttaaagatctagcctttctattttgtttcctctctgcctcttttctttcgctggcaccgatggtcaccgagatggcggcgcgcggcggcgaggcggcggcgttcggcgcggaggccgaccgcggcgacttcgaggtcttccgcagcggctccgcgccgcccaccgtcgagggcgccctgggcgccgccgcggccgctgccgacctgctcgtggatgacgacctccgcgccgacccggcgtaccagagctactactactccaatgcgcacctcaacccccgcctcccgccgccgctcctgtccaaggaggactggcgctcctcgcaccaccgcctccgctccgcggccttcggcgggatcggggacggcaggaggcagcagcagccggctgcccaagggacggtcggcctgcccgggatcgatcttgcccgccagaggagcttctccaccgtctttcaggaggattcgtatcagcgtgatatggataggcagactgccagccacaatagtagtgaatcattatgttcttctggaatacagtatggtctaaatcgtggacctggaactattggaggcctgcactctagcaatagtttacgaagcttggatgaaattccgaacaatgatctgccatcaaatacatttgcttctcttttagggtcatctctttctaggagtgcatctccagatcctgagcttgtgaggagggcccctagtccatcccttcctccaatcggtgtgaaagttggcaacactgataagatgaatggtggttcctcttctttccgtcgtagttcatccgcaatcggtggatctgatgatctggtggctgccttatctgggatgaacttatcatctagggcaatgagtgggcaaactatggaccagtctcagctctatcaggatgttgataacgtccagaagtttctttttgatcgacagggtgaccaaccaaatggcaatcagcagcactacatgaggcgtcctgagcatggacaatctaagttatctgatggatattctgccaatttggccaattcatccacgatgagaaaccagattaattctggcagtttcacatcttttgacagtttgtctcttggatctggctttccttcccctaggattggttctagatcccctggagggactgtatcttctcgacaaaatttagctggtatgtctaacatgctaaactataatggaattggaagtccaactgcgtcaccttctcttcagacttctattgatccagcgtatatccagtaccttgctcaaattgcagctacctgggatgatcctctaatggacaggagccatctgggaagttcttacatggacttacttggtacacagaaagctaaccttggccctttacttcagtcacaaaagcaatatggttactgtggcaatcttggatttaaccttggtggttatgctggaagtccattgacaagtcctgttcttccctcttcacctattgcaccaggcagtccacttaggcatggtgaccgcaacatgcgctttccaccaggcatgagaaacttcggtaattcctttggttcatggaattcaggcatgagtggaaagatggatgctaatttgatgccctctctcctggaggaattcaagagcaacaaaagtaaatcatatgagctctccgaaatagctggccatgttgttgagtttagtgctgatcaatatggaagccggttcatacaacagaagctagaaacagccagtactgaagaaaaggacatggttttttcagaaattatgcctcaagctctcacattaatgactgatgtatttggaaattatgttgtccaaaagttttttgagcatggaagcactgcccagataaaggaattggctggtcagcttattggacgtgtccttgctcttagtcttcagatgtatgggtgccgggttatacagaaggctatagaagttgttgatttggatctgcagactaaaatggttgcggagctggagggtcatgtcatgcgctgtgtacgtgatcaaaatgggaaccatgttatacagaaatgcatagagtgcattcctcagcatgctatcgagttcattgtctcgacattctatggccaagttgtaatgttatccactcatccatatggttgccgagttattcagagggttctagagcattgtgatgatcctaagacacagcaaataatgatggatgagattctccagtctgtttgcttgctagctcaggaccagtatggcaactatgtggttcagccccatgagagatcagccattattgagaagctaattggccaagttgtgcaaatgagccagcaaaagtttgcctctaatgtcattgagaagtgcttagcctttggaaatcctgtagaacgtcaggttctgatcggtgagatgcttggatccactagcgaaagcgaacctcttgaggtaatgatgaaagaccagttcgcaaactatgtggtgcagaaggtgctagaaacttgtgacgatcagcagagggagatgatcttaacaaggataaagacacacttgaacacactcaagaagtacacatacgggaagcacatagtagcgcgtgtagagaagcttgttgctgctggagagaagcgccttgggcttcaaccagcatgcaccgccgcctgaagggcaaactctctaagttgtacagctaacagttgctaggtttgcctcatgtttttttctctactaaaaaccttatatgaaggccccttttggcctcgccaggaaaaaaaataaatactgtatgtttgcggggaagagtgtacattaattctgtagcagaaagaccccctacccatgtggcggaatcaagggaggagtgatgcgtgtgagtccgatcgatctgaaggctgctgtaaagaggaagatggaaggggaaggagtgagaagcatgtcagttactctgctgctgtacaaattaaacttagctcttagagtgaggagaaagtaagctgttagctgtctgcctaaaggaaagaaaggaaaaaaaaaagaagctggaggccattggcaccctgtttcatgtgttggtatagctgctgtggctctcctgttgtctgtctggcctttgttgtaacataaagctgaggcgcactagcctgccttcgttttcacagttaagctgaagttattagtatcagctttcctgaactgcttggtatgtaatgtgactctgtttcttccttgtactaatgcttgtctcatgtaatccaggcccctaatgtctgaatgttttaatctcatttttcacctctgataaacgttgtttttttgtttggttttgttgctgctgagg

SEQ ID NO: 2653 - DNA, 5002 bp, Zea Mays
gtgccaatccaaaaccgccacgtgccatatccggtgatacgcctccccggcctctcgtgtctcgtcgtctccctctccctccacaacggcatagctgcagcagccaagtcctctccgctctcttcgccgccaccgccgacaaataaccgccgcaattcgaagcaagagagccgcaccaggagaagatatagtgagagtgagagcccgaggagggggtggcgcgatggggctctcgggcgcgacgatctcggcgccgctcggctgctgcgtgctgcggtgcggggcagttggcggaggtaaggccctgaaggcggacgcggagaggtggcggcgggcgggatggagccgacgcgttggcggaccgaaggtgaggtgcgtggcgaccgagaagcacgacgagacggcggcggtcggggcggcagtgggcgtggatttcgcggacgaggaggactaccgcaagggcggcggcggcgagctgctttacgtgcaaatgcagtcaaccaagcccatggaaagccagtccaagatcgcttccaagctatcgcccatatctgatgaaaatacagtgcttgatttggttatcattggttgtggtccagctggtctttctctagcttcagagtcagctaagaaaggtctcactgtaggtctcattgggcctgaccttccattcacaaataactatggtgtgtgggaggatgaatttaaagatctcggtctagagagctgtatcgagcacgtctggaaggatactattgtctacctagacaataacaagccgatactgattggccgttcttatggcagggtgcaccgtgacttgctccatgaggaactgctgaaaagatgctatgaagctggcgtgacatacctgaactccaaagtggacaagatcatagaatctccagatggacacagagtagtctgttgtgacaagggtcgcgagataatttgcaggcttgccattgttgcttcgggggcagcatctggtaggcttctagagtatgaggttgggggtccccgtgtttgcgtgcagactgcatacggagtagaagttgaggtggaaaataacccatatgatcctagcttaatggttttcatggactacagagattgtttcaaagaggaattctcacacactgaacaagaaaatcccactttcctgtatgctatgcccatgtcacccacacgagttttctttgaggaaacatgcttagcttctaaagatgctatgtcttttgatctacttaagaagaggctgatgtatcggttgaacgcgatgggaattcgtatcctgaaagtttatgaggaggaatggtcctacattcctgttggagggtccttaccaaacacagatcagaaaaaccttgcattcggtgctgcagcaagtatggtgcatcctgcaacagggtactcagtggtcagatctttgtctgaggctccaagatatgcttctgtgatatcggacatcttaggaaatcgagttcctgcagaatatatgctcggaaattcacaaaattacagtccatcaatgcttgcatggagaacactgtggcctcaagagaggaaacgccaacgatccttcttccttttcggattagcgttgataatccaactgaataatgaaggcatacaaacattcttcgaagcctttttcagggtgccgagatgtttttgataaccactatttttccttgaacaggatgtggcgaggatttcttggctcgaccctttcatccgtcgatctcatactattctcattctacatgtttgcgatagctccaaatcaattgcgaatgaaccttgtcaggcatctcctctctgacccaactggctcatccatgatcaagacctacctgaccttataaaaccatttgcaccaggctgcaagaactcttagaaactgtacagttttgtagttgtacataagttagagaggatctggggggttacttggcggcggatctaggggttagcagcaatgctataatacactgtaaatcttttatggttgctatggtgattggatagagaagcacaccgtgttgtgcacgatggaagaataataagagagatcaggtgatggtcatggttcctgcattggccaattttaggttgcatttgctgtttcaaggcttcttacatgtccaatcaattacacccttattttaggttgctcaatgccaattttcttgtggaacaatatttgcaaaagcaaaaaagggaaaaacataattggatgtgcaagaatagtatgaggctgtccttgctcctgcgccatggcatttagctgcaagatgttggggaaggagaagacctgtaggagactaaggttggaggcaagggagagaaaggaaggagggcaggaggagaggcggaacaacccgtctccctccatctctctaccttcttctcctgcgcccctatccatcgctcgcaccacccactgaccggccggcggcatccttattaccataacatcacgggacggtggcgcgatgcaaggaggcccactgagcccggatgagtactgggtgatatcgccgccggcgctgctgcaccagccggcgtccaccatcgtcgtggccatcgaccgggaccggaacagccaactggccgtgaagtgggtggtggaccacctcctctccggcgcctctcatatcgtcctgctccacgtggccgtccattaccacacgacccatgggttcgccatggttgagaccacgcagggtgcgctggaggctgaaatgaaggagatctttgtcccctacagaggattcttcaaccggaatggggtaaatgtggaagtatccgaggtagtattggaagaggcagacgtgtccaaagccattctaggttacatcactgcaaacaagatccagagcattgcgctcggcggagccaacagaaatgcgttcaccaagaaattcaagaacgcggacgtgccgtcgaccctgatgaagtgcgctccagactactgcaacatctacgtcgtggccaagggcaagtccgtcaatgtcaggctcgccaagtgcggcgtcccgccgatgcacactggcgccgacatcgcttcggacaccgactccctccgggaatcggtgctctacatgcgacgcggctccagggggcacctgccgcgggtgacgcctgacgcctggcgctccattgacgggcgcacaccgccggagctatccacgcggccactgttccgcgagcgcttgctctcgtcatcggccaccaccaagaactttgtcgtcctgccaggaaaggacaacttcgagacgtcctcccgctcggcgagacacgactcgttaggcggcgacctcgacttcggcccgagcacgcgcttctcctacatagacttgggcgagaacctcgatatgtccaccactctccccgctctggaacccatgtcaccggccaccggcgcgcagcgggataccgaggccgagatgcggcggctccggttggagctcaagcagaccatggacatgtacaacgcggcgtgcaaggaggccatcaacgccaagcagcgggccaaggagatgcatatgatgaagctggaggaagcgcgtcggctggaggaggccaggaacgccgaggaggctgctctggcagtggccgagatggagaaggccaagtgccgcgcggccatggaggccgccgaggcggcgcagaggctggctgacctggaggcgcagcggcgccgcaacgccgaggtgcgcgcgcgccgggaggccgacgagaaggtgcgcgctctggatgccatttccaaccacgacttccggtaccgcaagtaccacatcgacgagatcgagatggccacggagcgcttctccgacgagctcaaaatcggcgagggcggctacggccccgtctaccgcgcctccctcgaccacacccccgtcgccatcaaggtgctccggcccgacgcgcaccaggggaggaagcagttcctgcaggaggtggaggtgctcagctgcatccgccaccccaacatggtgctcctcctcggcgcatgcccggagtacggctgtctcgtgtacgagtacatggaccacggcagcctcgaggaccggctgttccgtcggggcggcacgccgccgctcgcgtgggcccagcggttccggatcgcggcggagatcgcgacggcgctgctgttcctgcaccaaacgaagccggagccgctggtgcaccgggacctgaagccggccaacatcctgctggaccgcaactacgtgagcaagatcagcgacgtcgggctggcacgcctggtgccgccgtcggtggcggacaacgtgacgcagtaccggctgacggcgacggcgggcaccttctgctacatcgacccggagtaccagcagacgggcaagctgggcgtcaagtcggacatctactccctcggcgtgctcctgctgcaggtggtcaccgcgcggccacccatggggctcacgcatcacgtcgagaaggccatcgacgcgggcacctttgagcagatgctcgacatcaccgtcaaggactggcccgtcgaggaggcgctcggctacgccaagctcgcgctcaagtgcacggagatgcggcggagggaccggccggacctcgccacagtcatactgccggagctcaaccggttaaggaacctcggccacgcgtacgaggcacgcatgagcgccgccagggccaacggtggaagtggagagagtggtgcccagatcagcggggactcgacaacggtgggtggttcatgggaaacggcggacagctagcgggcggtccggtgatcggtgtggccggtggcccggatgagtcagttagagagcgagctttttttttgatacgggggagttaaaaaatccaaaaatcttggtgtatgtacagttctgtctatgagaaatactaacgcgtcttgcagtgctgctgcctgctgcctcatccttttgagggtcgtcatccatgatccatttttttattctgttggcccaacctagaaattacgattgcg

SEQ ID NO: 2654 - DNA, 1550 bp, Zea Mays
taagcaaaagatagagtcatagaaccctggcattgacataaaaccaccacatatatcccattggccattcccatctgctgatcctgaccggccgacccgtcggccgtcgccaactcgtctgctcagcccatctgtatcacaattcccaagagcttgagctccaagtacccggcctgcgcccacggccgggcccaggaaccgccgttctgctgcaccggcggcggaagaagagacggatagcgtggggatccggctgatgcgccggcggcaatgggcatttgggattccattctccccggcggcggccggcgcttcatcaagcgcaaggacagcgacgccggtgaggcaggtcgggcactagaggaactgaggggctcactgtacaacgactttcatacttcagaaggggccaggcgccagcagcagaagctttgtggccctattgttgcactgacattcaactttgtggttgctgttgggattatcatggcaaacaaaatggtgatgggtgctgttggatttaacttcccagttgcactgtcattaattcattaccttttcgcttttgctttaatgtctgttctcaaggcattatacttgctgccaattgcttctccttccaaatccactcctttctcctcattatttgctttaggtgctgtcatgtctttctccactgggcttgccaatatcagcttaaagcataacagtgtaggtttttatcagatggctaagatagctgtaactccaaccatagtggtagcagaatttattcttttcaagaaaaaggtttcccttcgaaaggttagcacgctggttgttgtctcatttggtgtggccgttgcaaccgttactgatttggagttcaatttctttggtgcttgtgtagcactagcttggattattcctagtgctgtaaacaaaatcctgtggtcaaatttacaacagagtggaaattggacagctcttgcgttaatgtggaagacaaccccaattaccatatttttctttattgttttgatgccattgttggatcctccaggccttttatctttcagttgggatttcaagaacagcagcacaattatcatatctgctttgttcggtttccttcttcagtggtctggtgccttggcacttggggcaacctcggctctcgcacatgttgtgctgggtcagttcaagacgattgttataatgctctctggttatctggtatttaaatctgatcctggattcaccagcctctgtggagctgttattgccctcgcagggatgtcagtgtacacttacctggggatgaaagagtcagccgccaacgctaggagaaattccttaaattcaaggcaaaattctcatttgaagaaggccaaggctattgtagatggagaaaatccagaaacaaagcctatggattctgtgtaaaatgagtgccgtcctcctgctaggtttaagaacctgccattggaagcaatgaggtttggtgagcatacttatggaccaaccaaacctgatctcttcccagcatggttcagtaaagaaaagtaaaa

SEQ ID NO: 2655 - DNA, 1854 bp, Zea Mays
taagcaaaagatagagtcatagaaccctggcattgacataaaaccaccacatatatcccattggccattcccatctgctgatcctgaccggccgacccgtcggccgtcgccaactcgtctgctcagcccatctgtatcacaattcccaagagcttgagctccaagtacccggcctgcgcccacggccgggcccaggaaccgccgttctgctgcaccggcggcggaagaagagacggatagcgtggggatccggctgatgcgccggcggcaatgggcatttgggattccattctccccggcggcggccggcgcttcatcaagcgcaaggacagcgacgccggtgaggcaggtcgggcactagaggaactgaggggctcactgtacaacgactttcatacttcagaaggggccaggcgccagcagcagaagctttgtggccctattgttgcactgacattcaactttgtggttgctgttgggattatcatggcaaacaaaatggtttggctgactttccaatcattttaaactttttatgtctgtctatttgcattccttttataaacgcctttccttgtaggtgatgggtgctgttggatttaacttcccagttgcactgtcattaattcattaccttttcgcttttgctttaatgtctgttctcaaggcattatacttgctgccaattgcttctccttccaaatccactcctttctcctcattatttgctttaggtgctgtcatgtctttctccactgggcttgccaatatcagcttaaagcataacaggtttttatcagatggctaagatagctgtaactccaaccatagtggtagcagaatttattcttttcaagaaaaaggtttcccttcgaaaggttagcacgctggttgttgtctcatttggtgtggccgttgcaaccgttactgatttggagttcaatttctttggtgcttgtgtagcactagcttggattattcctagtgctgtaaacaaaatcctgtggtcaaatttacaacagagtggaaattggacagctcttgcgttaatgtggaagacaaccccaattaccatatttttctttattgttttgatgccattgttggatcctccaggccttttatctttcagttgggatttcaagaacagcagcacaattatcatatctgctttgttcggtttccttcttcagtggtctggtgccttggcacttggggcaacctcggctctcgcacatgttgtgctgggtcagttcaagacgattgttataatgctctctggttatctggtatttaaatctgatcctggattcaccagcctctgtggagctgttattgccctcgcagggatgtcagtgtacacttacctggggatgaaagagtcagccgccaacgctaggagaaattccttaaattcaaggcaaaattctcatttgaagaaggccaaggctattgtagatggagaaaatccagaaacaaagcctatggattctgtgtaaaatgagtgccgtcctcctgctaggtttaagaacctgccattggaagcaatgaggtttggtgagcatacttatggagtgagtttccttcaccaaccagttcatccgaaaacttaatttcactttctttagttcttgcttggagttctattattctttaggcaatggtggtcaaaattgttttcatcgttgatcacattcattgcacgtaggaattatcattgattctagttttaggtaactttggttactgttccaatccatatcctgtcatgctttatttgtttacttgccttgtggattctgttcctcagaaaatagatgaaaggtggctgaaaatggttcctggttgaatttg

SEQ ID NO: 2656 - DNA, 2077 bp, Zea Mays
gaggaggatgacaacaaagtgtggggggcaagggcacatcacgcgctccactgcagtctgcagagtttcaggcggccagcttcctcctccccactcgttcggctcaccacctcggtgaccgctgcccttgacgcctgcttcggacgcggcctggccctgaaatctccgtgcgtgtttggccgaaatccacgggagggtgctcgtctttgctgagctgctccggcctccggagcggagctctgcctacttgagttcaggcttgttccgccatccgaggacaagattcggagcgtcgccgaagggaggcgatgaaggggaaaggcggggcgatggaccgcaggtcctccgccaggtggagggtgttgctgctctgcgcattcagcttcggcctcggcatgctcttcaccgaccggttctggacagcaccggatagcagtaaccatatcatgtctcaaagccggaggcaagagcaagagctccaacttgtatcagaggattgcagcacaaagaggaagcatggggaagacaaggatataatgggagaggtaaccaagacccatgaagctatacaatcattggataagtccatctcaacgctgcagatggagcttgcagcaaagcggagcacacttgagctgctccgatctagtggttcaccagtaacctttgaaactagccaaccaaggaaaaaggcatttgttgtcattggagtcaatactgcattcagcagccgcaagcgccgtgattctgtccgggagacatggatgcctcaagtgctacatctgacagtatactggacaaagctatagattcagaggacgctcagcatcatgactttcttaggctggaccatgttgagggataccatgaactctcagctaagacaaaaatattcttctctactgctcttggcatctgggatgctgacttctacgtcaaggttgatgatgatgtgcatgtaaacttaggaatgcttgccactacccttgctcggcataaattgaaaccaagaacttatattggctgcatgaagtcaggcccagttctcgctgacaagaatgttaagtaccatgaacctgagtactggaaatttggggaggaaggaaataaatacttccgtcatgccacggggcagatatatgccatttcgaaagatctcgctacttatatttcaatcaaccagcctatcttgcacaaatatgcaaatgaagacgtgtcgcttggatcatggttcattggtttggaagttaatcacattgatgaaaggaacatgtgctgtggaactccaccagattgtgagtggaaagggcaagctggtaatgtctgtgtagcgtccttcgattggagctgcagtggcatatgcaagtctgttgagaggatcaaagatgtacatgctcgctgtggtgagggggattcagcagtttggagtgctcttttctagcgcataccttctttgcccgtaaatatgtagcatacttgctaagctctcgcggcggacacctgcataggcaactcaagtaaacttgacaaaaaccaaagatcgtggagtatgatctgaaactgcagaaacagtatgttgcttggaaatattctgcaacaacataattttgctccgtcactgttcgtggcttttggcggtgttagggactccaaagtagggttgcaactgatcttacatgtaggggggagagtttcccagctgatgacgcgtatggaagtaagagatcatgtagaggggcattgttttatgcaaattttgacattcttttgcgagtttcacacattcagtcgttcatgagggtgtaccatgatgtaacatatgagaagccgtggacggatgttggtttagcaaatcttgttccaaaagcagtgattagtgctacaaagcaaagggtactaacgtgccaagatcatgggttttgtaccgaatcactatattgagggcgcgtttggattggagggaaaacggaggaaaattacaggaatagcagttctttggcaagtctttcgcacagtacaggtcgtgacaaaaaatcagataggaaggtgtactttttgaggaaaaaattaagagagg

SEQ ID NO: 2657 - DNA, 2148 bp, Zea Mays
aaaagaaaagggaacgaaaatgctttcaaaagtgggaagaggaggatgacaacaaagtgtggggggcaagggcacatcacgcgctccactgcagtctgcagagtttcaggcggccagcttcctcctccccactcgttcggctcaccacctcggtgaccgctgcccttgacgcctgcttcggacgcggcctggccctgaaatctccgtgcgtgtttggccgaaatccacgggagggtgctcgtctttgctgagctgctccggcctccggagcggagctctgcctacttgagttcaggcttgttccgccatccgaggacaagattcggagcgtcgccgaagggaggcgatgaaggggaaaggcggggcgatggaccgcaggtcctccgccaggtggagggtgttgctgctctgcgcattcagcttcggcctcggcatgctcttcaccgaccggttctggacagcaccggatagcagtaaccatatcatgtctcaaagccggaggcaagagcaagagctccaacttgtatcagaggattgcagcacaaagaggaagcatggggaagacaaggatataatgggagaggtaaccaagacccatgaagctatacaatggagcttgcagcaaagcggagcacacttgagctgctccgatctagtggttcaccagtaacctttgaaactagccaaccaaggaaaaaggcatttgttgtcattggagtcaatactgcattcagcagccgcaagcgccgtgattctgtccgggagacatggatgcctcaaggagaaaaactgcaacaattagaagaacaaaagggaatagtaatccgcttcactatcgggcacagtgctacatctgacagtatactggacaaagctatagattcagaggacgctcagcatcatgactttcttaggctggaccatgttgagggataccatgaactctcagctaagacaaaaatattcttctctactgctcttggcatctgggatgctgacttctacgtcaaggttgatgatgatgtgcatgtaaacttaggaatgcttgccactacccttgctcggcataaattgaaaccaagaacttatattggctgcatgaagtcaggcccagttctcgctgacaagaatgttaagtaccatgaacctgagtactggaaatttggggaggaaggaaataaatacttccgtcatgccacggggcagatatatgccatttcgaaagatctcgctacttatatttcaatcaaccagcctatcttgcacaaatatgcaaatgaagacgtgtcgcttggatcatggttcattggtttggaagttaatcacattgatgaaaggaacatgtgctgtggaactccaccagattgtgagtggaaagggcaagctggtaatgtctgtgtagcgtccttcgattggagctgcagtggcatatgcaagtctgttgagaggatcaaagatgtacatgctcgctgtggtgagggggattcagcagtttggagtgctcttttctagcgcataccttctttgcccgtaaatatgtagcatacttgctaagctctcgcggcggacacctgcataggcaactcaagtaaacttgacaaaaaccaaagatcgtggagtatgatctgaaactgcagaaacagtatgttgcttggaaatattctgcaacaacataattttgctccgtcactgttcgtggcttttggcggtgttagggactccaaagtagggttgcaactgatcttacatgtaggggggagagtttcccagctgatgacgcgtatggaagtaagagatcatgtagaggggcattgttttatgcaaattttgacattcttttgcgagtttcacacattcagtcgttcatgagggtgtaccatgatgtaacatatgagaagccgtggacggatgttggtttagcaaatcttgttccaaaagcagtgattagtgctacaaagcaaagggtactaacgtgccaagatcatgggttttgtaccgaatcactatattgagggcgcgtttggattggagggaaaacggaggaaaattacaggaatagcagttctttggcaagtctttcgcacagtacaggtcgtgacaaaaaatcagataggaaggtgtactttttgaggaaaaaattaagagagg

SEQ ID NO: 2658 - DNA, 1992 bp, Zea Mays
cataaatactaggatcttacatcgtttctggacaacactacagggatcttgtgaagacataggatggttgcaaagaactcgggcatcacttcgttcagttgatgggacaggtcacttcaaggagattttgcatgagataaggttttggatatgaacatgatgatgctaggatgaccaatataaatttgtttaaggaatttactgccctaagcagggaccatcgatgacctcaagaagctggtggtggcgtagatgggaacgcaccccgagaagatttgcatctagaggtggtgaccccacctctgtcctcaaccgccacctcgtacctcgtcttcggcgccgccggctcctgccccccttggcacgccttcggggtcctcgctggcggcaagcacctccgtcccggaggcatctgccgctgcagcatagaccaccgcgtcctcgctcagcagcaccgatgtcgatgatggcaacaaggaggacggctccgcgagcacccccgagatctgctgctgccactcccacgcagctcttgcttgtgagatctgtgtgcaggttgatgtcctcgtggcgccacgccgacctcaccgccaccaagcgcgccacccatgtcctcaccgacctcgccaaaaactataagaataggtgtagtcactgtcggggtgtacatccaattgagttttgagttggtgtttagctttcccttaccagggacggatcaaagcaccgtaataagtgtcgatatagctctttcaattgcgcctattgttttgtgcgggctatatggatcaaggaaccctctttgcagcagaggtttgttttgtgttctgctgctagtagtcgcatgtcagtttaatcttttgagttctggaagctgttggtcccttaggtgtttgggagatccttttgaatcgaagcacacacactcaggtgctatgacctttggcatttcatagttgcatatttaactggtgtgcgaagagcaccaggatagcacccttgcagcaggaacttacttttggttgcttttctgttgcctgtcatatcccgatatttgtttcctgcaaatttactttgtttaattgtattctattgattttacagcttttgtacttgtacagttacattgtcatctggtttctattgcacgtgtagctgattagttgtagtcactatcttgcaagcatagatattagggaggtattatgtccagtcaagttttgtgttggctatgtgtagcgaattaggattgcttttcctgggatggatcagagcacatgtactgtggcgatatagttgtttcaatagtatagttgccaaattttatgtgtgtgctatatagaccagggaacccacttagaagcagaaaattttctgtgtgcgcgcgaaattttctgtgtgtgctaacaaattgcaggcaaccatcttaacaacaaaagaggctcgtacaatagcagagatgatgctaaaccacttgtgcatgcaaagtatcaaaaaggagaccagacacatgttgatgaaacatctaaaaaggtcctggaatctgaatgcacaaatgtggagaccttatagaaaagggcacaagcacacatgcatcttgctgatcttgatttggcggaggcagacatcaagaaagctctagataaactacagatccagacatgttaatcatatgtactactgaagttggcttaatgaaatcttttgagaataacttgcctatttaacttgtgtcctttttgatggtggcgttgtttgttagctacaaaatcatcaatcaaagattgtaattatatcatatcactgttttctattaatttttaagctgccgtagcaaggcacgggcatcctactagttcccgtatatggtacaaaatgcaacattcgtctcaggatttatgtttctcgactatggtgacaggcctgttttcatccttctttcttcgttgtcttgtattctttttgtcaagttgggcatccaagtatctgcca

SEQ ID NO: 2659 - DNA, 3464 bp, Zea Mays
atcgcgcggtgcacgttctgccgctccgctcacgcccgcggccgaacgctcccccgcaccttccatcctccgcgcagccacagctgcgattccctgctccccgcaccttccatcctctgcgcagccacagccgcgattcccgccgccccgccgcgctcaccttccctcccgcggcagagtgctccctcgacggggccgccccaaccatcgccctcctcatccgccatcgcgatccactcctcgacgcaatccatctaccccacagaactgctgccggcgtggcagatctcctcctcggcacctagatctcctcggcgcgatcaacggctgagcccgctgcccccaccacacaaccgatatgctctccatggaaggtcagggacctgctcgcccatgatctccatggaaggtggtctactgtcgacggcctctccctcgtgctccttcgtcaaccccgtccgccgcgccgccgagccccgagatcgcgccgatccgccattctcgcgccctcgccccgacacgcgctcaccaccggccctcaccaacctccactcgcgttccccacaccaccctccaccccatccgcgtccgccccatccgtagcacgcgggctgcagccgccccatccctaaaatgtgggcgctggcgctaccacggctccgcaccatgcctccgcgctgccagacagcgccgggcgataccatgcccccaccccggcttcttcctgccagtgaggagcagcggaagcccgaaccgaatccaaccgagtcatctcaacgactccgccagtttccaatcgccccttttttaggcgttcaagttccttcgagatgatgacaagcagaggagagagatagcgtctccttcaatccctctggcgacaccaacaacgcatccccgtggccatcctcgattctccttgccaaggaggcgacagccaagtcgtcgcggtcacggccggcgatccactcgagggtgttcctggtgagtagcaccactgcggtggggatcggggatgggggaggcggcaatggcgatggcggggtgcagctcgccgacaaccttaagatcttcaaggctgacaacttcgatctcgacgtctagattccttccaaggctctgtgcagctgttcatccatttctcccttcgatgtcggtgtttgtccctgctatgtgtgttggatcaccattgacatatatgtggaactgcctaaggaccacttcaaatgtgtatgtagcagcttcagcacagcaaccagcaatggccccatagagagaatgcagataagccatcttcagtatgccatacactccatagaatacaacgccagaggatgccatactgataagagaaggcaccaatcccttatacagcgagaagaatccttcagtttggatcatgtggcgggcaacaccaatgaccccacctaaagcttcaccaccaggagcatccatctttgtcctgatctgaaaccaacagctcaaatcagggatcttgtgaagacataggatggttgcaaagaactcgggcatcacttcgttcagttgatgggacaggtcacttcaaggagattttgcatgagataaggtggaacaatcacttctcatcacaggttttggatatgaacatgatgatgctaggatgaccaatataaatttgtttaaggaatttactgccctaagcagggaccatcgatgacctcaagaagctggtggtggcgtagatgggaacgcaccccgagaagatttgcatctagaggtggtgaccccacctctgtcctcaaccgccacctcgtacctcgtcttcggcgccgccggctcctgccccccttggcacgccttcggggtcctcgctggcggcaagcacctccgtcccggaggcatctgccgctgcagcatagaccaccgcgtcctcgctcagcagcaccgatgtcgatgatggcaacaaggaggacggctccgcgagcacccccgagatctgctgctgccactcccacgcagctcttgcttgtgagatctgtgtgcaggttgatgtcctcgtggcgccacgccgacctcaccgccaccaagcgcgccacccatgtcctcaccgacctcgccaaaaactataagaataggtgtagtcactgtcggggtgtacatccaattgagttttgagttggtgtttagctttcccttaccagggacggatcaaagcaccgtaataagtgtcgatatagctctttcaattgcgcctattgttttgtgcgggctatatggatcaaggaaccctctttgcagcagaggtttgttttgtgttctgctgctagtagtcgcatgtcagtttaatcttttgagttctggaagctgttggtcccttaggtgtttgggagatccttttgaatcgaagcacacacactcaggtgctatgacctttggcatttcatagttgcatatttaactggtgtgcgaagagcaccaggatagcacccttgcagcaggaacttacttttggttgcttttctgttgcctgtcatatcccgatatttgtttcctgcaaatttactttgtttaattgtattctattgattttacagcttttgtacttgtacagttacattgtcatctggtttctattgcacgtgtagctgattagttgtagtcactatcttgcaagcatagatattagggaggtattatgtccagtcaagttttgtgttggctatgtgtagcgaattaggattgcttttcctgggatggatcagagcacatgtactgtggcgatatagttgtttcaatagtatagttgccaaattttatgtgtgtgctatatagaccagggaacccacttagaagcagaaaattttctgtgtgcgcgcgaaattttctgtgtgtgctaacaaattgcaggcaaccatcttaacaacaaaagaggctcgtacaatagcagagatgatgctaaaccacttgtgcatgcaaagtatcaaaaaggagaccagacacatgttgatgaaacatctaaaaaggtcctggaatctgaatgcacaaatgtggagaccttatagaaaagggcacaagcacacatgcatcttgctgatcttgatttggcggaggcagacatcaagaaagctctagataaactacagatccagacatgttaatcatatgtactactgaagttggcttaatgaaatcttttgagaataacttgcctatttaacttgtgtcctttttgatggtggcgttgtttgttagctacaaaatcatcaatcaaagattgtaattatatcatatcactgttttctattaatttttaagctgccgtagcaaggcacgggcatcctactagttcccgtatatggtacaaaatgcaacattcgtctcaggatttatgtttctcgactatggtgacaggcctgttttcatccttctttcttcgttgtcttgtattctttttgtcaagttgggcatccaagtatctgcca

SEQ ID NO: 2660 - DNA, 3531 bp, Zea Mays
atcgcgcggtgcacgttctgccgctccgctcacgcccgcggccgaacgctcccccgcaccttccatcctccgcgcagccacagctgcgattccctgctccccgcaccttccatcctctgcgcagccacagccgcgattcccgccgccccgccgcgctcaccttccctcccgcggcagagtgctccctcgacggggccgccccaaccatcgccctcctcatccgccatcgcgatccactcctcgacgcaatccatctaccccacagaactgctgccggcgtggcagatctcctcctcggcacctagatctcctcggcgcgatcaacggctgagcccgctgcccccaccacacaaccgatatgctctccatggaaggtcagggacctgctcgcccatgatctccatggaaggtggtctactgtcgacggcctctccctcgtgctccttcgtcaaccccgtccgccgcgccgccgagccccgagatcgcgccgatccgccattctcgcgccctcgccccgacacgcgctcaccaccggccctcaccaacctccactcgcgttccccacaccaccctccaccccatccgcgtccgccccatccgtagcacgcgggctgcagccgccccatccctaaaatgtgggcgctggcgctaccacggctccgcaccatgcctccgcgctgccagacagcgccgggcgataccatgcccccaccccggcttcttcctgccagtgtaatcggccactacttctccactgctgctcgccgtctcctcaaccaccgctgcgccacacaatcctcccgcgacgtgtctgattcaagccaggatgtctcacaggaggagcagcggaagcccgaaccgaatccaaccgagtcatctcaacgactccgccagtttccaatcgccccttttttaggcgttcaagttccttcgagatgatgacaagcagaggagagagatagcgtctccttcaatccctctggcgacaccaacaacgcatccccgtggccatcctcgattctccttgccaaggaggcgacagccaagtcgtcgcggtcacggccggcgatccactcgagggtgttcctggtgagtagcaccactgcggtggggatcggggatgggggaggcggcaatggcgatggcggggtgcagctcgccgacaaccttaagatcttcaaggctgacaacttcgatctcgacgtctagggatcttgtgaagacataggatggttgcaaagaactcgggcatcacttcgttcagttgatgggacaggtcacttcaaggagattttgcatgagataaggtggaacaatcacttctcatcacaggttttggatatgaacatgatgatgctaggatgaccaatataaatttgtttaaggaatttactgccctaagcagggtaagtgtttcctgaactacaattgttttttttggctttttgcagatctgcacatctgaatttcctattatcctgttgggctgcctcttttttggagtgactgtagcaaccacttctaattcattttcaattgtattgaactggatgttgaccttcctagcataattagctctattttttaaaaaaatagttcattatgtatgtttctattttttatggtaccgcctatgtttatataaatttagcctagcactgcttgaataacaagtgattgaatgaggctcatatgcaaccattaaatcaatatttatgaaccaatgtttgttaaagtaataaaacatttacaaggaccatcgatgacctcaagaagctggtggtggcgtagatgggaacgcaccccgagaagatttgcatctagaggtggtgaccccacctctgtcctcaaccgccacctcgtacctcgtcttcggcgccgccggctcctgccccccttggcacgccttcggggtcctcgctggcggcaagcacctccgtcccggaggcatctgccgctgcagcatagaccaccgcgtcctcgctcagcagcaccgatgtcgatgatggcaacaaggaggacggctccgcgagcacccccgagatctgctgctgccactcccacgcagctcttgcttgtgagatctgtgtgcaggttgatgtcctcgtggcgccacgccgacctcaccgccaccaagcgcgccacccatgtcctcaccgacctcgccaaaaactataagaataggtgtagtcactgtcggggtgtacatccaattgagttttgagttggtgtttagctttcccttaccagggacggatcaaagcaccgtaataagtgtcgatatagctctttcaattgcgcctattgttttgtgcgggctatatggatcaaggaaccctctttgcagcagaggtttgttttgtgttctgctgctagtagtcgcatgtcagtttaatcttttgagttctggaagctgttggtcccttaggtgtttgggagatccttttgaatcgaagcacacacactcaggtgctatgacctttggcatttcatagttgcatatttaactggtgtgcgaagagcaccaggatagcacccttgcagcaggaacttacttttggttgcttttctgttgcctgtcatatcccgatatttgtttcctgcaaatttactttgtttaattgtattctattgattttacagcttttgtacttgtacagttacattgtcatctggtttctattgcacgtgtagctgattagttgtagtcactatcttgcaagcatagatattagggaggtattatgtccagtcaagttttgtgttggctatgtgtagcgaattaggattgcttttcctgggatggatcagagcacatgtactgtggcgatatagttgtttcaatagtatagttgccaaattttatgtgtgtgctatatagaccagggaacccacttagaagcagaaaattttctgtgtgcgcgcgaaattttctgtgtgtgctaacaaattgcaggcaaccatcttaacaacaaaagaggctcgtacaatagcagagatgatgctaaaccacttgtgcatgcaaagtatcaaaaaggagaccagacacatgttgatgaaacatctaaaaaggtcctggaatctgaatgcacaaatgtggagaccttatagaaaagggcacaagcacacatgcatcttgctgatcttgatttggcggaggcagacatcaagaaagctctagataaactacagatccagacatgttaatcatatgtactactgaagttggcttaatgaaatcttttgagaataacttgcctatttaacttgtgtcctttttgatggtggcgttgtttgttagctacaaaatcatcaatcaaagattgtaattatatcatatcactgttttctattaatttttaagctgccgtagcaaggcacgggcatcctactagttcccgtatatggtacaaaatgcaacattcgtctcaggatttatgtttctcgactatggtgacaggcctgttttcatccttctttcttcgttgtcttgtattctttttgtcaagttgggcatccaagtatctgcca

SEQ ID NO: 2661 - DNA, 3587 bp, Zea Mays
atcgcgcggtgcacgttctgccgctccgctcacgcccgcggccgaacgctcccccgcaccttccatcctccgcgcagccacagctgcgattccctgctccccgcaccttccatcctctgcgcagccacagccgcgattcccgccgccccgccgcgctcaccttccctcccgcggcagagtgctccctcgacggggccgccccaaccatcgccctcctcatccgccatcgcgatccactcctcgacgcaatccatctaccccacagaactgctgccggcgtggcagatctcctcctcggcacctagatctcctcggcgcgatcaacggctgagcccgctgcccccaccacacaaccgatatgctctccatggaaggtcagggacctgctcgcccatgatctccatggaaggtggtctactgtcgacggcctctccctcgtgctccttcgtcaaccccgtccgccgcgccgccgagccccgagatcgcgccgatccgccattctcgcgccctcgccccgacacgcgctcaccaccggccctcaccaacctccactcgcgttccccacaccaccctccaccccatccgcgtccgccccatccgtagcacgcgggctgcagccgccccatccctaaaatgtgggcgctggcgctaccacggctccgcaccatgcctccgcgctgccagacagcgccgggcgataccatgcccccaccccggcttcttcctgccagtgtaatcggccactacttctccactgctgctcgccgtctcctcaaccaccgctgcgccacacaatcctcccgcgacgtgtctgattcaagccaggatgtctcacaggaggagcagcggaagcccgaaccgaatccaaccgagtcatctcaacgactccgccagtttccaatcgccccttttttaggcgttcaagttccttcgagatgatgacaagcagaggagagagatagcgtctccttcaatccctctggcgacaccaacaacgcatccccgtggccatcctcgattctccttgccaaggaggcgacagccaagtcgtcgcggtcacggccggcgatccactcgagggtgttcctggtgagtagcaccactgcggtggggatcggggatgggggaggcggcaatggcgatggcggggtgcagctcgccgacaaccttaagatcttcaaggctgacaacttcgatctcgacgtctagattccttccaaggctctgtgcagctgttcatccatttctcccttcgatgtcggtgtttgtccctgctatgtgtgttggatcaccattgacatatatgtggaactgcctaaggaccacttcaaatgtgtatgtagcagcttcagcacagcaaccagcaatggccccatagagagaatgcagataagccatcttcagtatgccatacactccatagaatacaacgccagaggatgccatactgataagagaaggcaccaatcccttatacagcgagaagaatccttcagtttggatcatgtggcgggcaacaccaatgaccccacctaaagcttcaccaccaggagcatccatctttgtcctgatctgaaaccaacagctcaaatcagggatcttgtgaagacataggatggttgcaaagaactcgggcatcacttcgttcagttgatgggacaggtcacttcaaggagattttgcatgagataaggtggaacaatcacttctcatcacaggttttggatatgaacatgatgatgctaggatgaccaatataaatttgtttaaggaatttactgccctaagcaggtaataaaacatttacaaggaccatcgatgacctcaagaagctggtggtggcgtagatgggaacgcaccccgagaagatttgcatctagaggtggtgaccccacctctgtcctcaaccgccacctcgtacctcgtcttcggcgccgccggctcctgccccccttggcacgccttcggggtcctcgctggcggcaagcacctccgtcccggaggcatctgccgctgcagcatagaccaccgcgtcctcgctcagcagcaccgatgtcgatgatggcaacaaggaggacggctccgcgagcacccccgagatctgctgctgccactcccacgcagctcttgcttgtgagatctgtgtgcaggttgatgtcctcgtggcgccacgccgacctcaccgccaccaagcgcgccacccatgtcctcaccgacctcgccaaaaactataagaataggtgtagtcactgtcggggtgtacatccaattgagttttgagttggtgtttagctttcccttaccagggacggatcaaagcaccgtaataagtgtcgatatagctctttcaattgcgcctattgttttgtgcgggctatatggatcaaggaaccctctttgcagcagaggtttgttttgtgttctgctgctagtagtcgcatgtcagtttaatcttttgagttctggaagctgttggtcccttaggtgtttgggagatccttttgaatcgaagcacacacactcaggtgctatgacctttggcatttcatagttgcatatttaactggtgtgcgaagagcaccaggatagcacccttgcagcaggaacttacttttggttgcttttctgttgcctgtcatatcccgatatttgtttcctgcaaatttactttgtttaattgtattctattgattttacagcttttgtacttgtacagttacattgtcatctggtttctattgcacgtgtagctgattagttgtagtcactatcttgcaagcatagatattagggaggtattatgtccagtcaagttttgtgttggctatgtgtagcgaattaggattgcttttcctgggatggatcagagcacatgtactgtggcgatatagttgtttcaatagtatagttgccaaattttatgtgtgtgctatatagaccagggaacccacttagaagcagaaaattttctgtgtgcgcgcgaaattttctgtgtgtgctaacaaattgcaggcaaccatcttaacaacaaaagaggctcgtacaatagcagagatgatgctaaaccacttgtgcatgcaaagtatcaaaaaggagaccagacacatgttgatgaaacatctaaaaaggtcctggaatctgaatgcacaaatgtggagaccttatagaaaagggcacaagcacacatgcatcttgctgatcttgatttggcggaggcagacatcaagaaagctctagataaactacagatccagacatgttaatcatatgtactactgaagttggcttaatgaaatcttttgagaataacttgcctatttaacttgtgtcctttttgatggtggcgttgtttgttagctacaaaatcatcaatcaaagattgtaattatatcatatcactgttttctattaatttttaagctgccgtagcaaggcacgggcatcctactagttcccgtatatggtacaaaatgcaacattcgtctcaggatttatgtttctcgactatggtgacaggcctgttttcatccttctttcttcgttgtcttgtattctttttgtcaagttgggcatccaagtatctgcca

SEQ ID NO: 2662 - DNA, 3625 bp, Zea Mays
ttgattagcccttgacatttatcaccaagggacaaagcacactaactgctttatactctgggacataaatactaggatcttacatcgtttctggacaacactacagggatcttgtgaagacataggatggttgcaaagaactcgggcatcacttcgttcagttgatgggacaggtcacttcaaggagattttgcatgagataaggtggaacaatcacttctcatcacaggttttggatatgaacatgatgatgctaggatgaccaatataaatttgtttaaggaatttactgccctaagcagggtaagtgtttcctgaactacaattgttttttttggctttttgcagatctgcacatctgaatttcctattatcctgttgggctgcctcttttttggagtgactgtagcaaccacttctaattcattttcaattgtattgaactggatgttgaccttcctagcataattagctctattttttaaaaaaatagttcattatgtatgtttctattttttatggtaccgcctatgtttatataaatttagcctagcactgcttgaataacaagtgattgaatgaggctcatatgcaaccattaaatcaatatttatgaaccaatgtttgttaaagtaataaaacatttacaaggaccatcgatgacctcaagaagctggtggtggcgtagatgggaacgcaccccgagaagatttgcatctagaggtggtgaccccacctctgtcctcaaccgccacctcgtacctcgtcttcggcgccgccggctcctgccccccttggcacgccttcggggtcctcgctggcggcaagcacctccgtcccggaggcatctgccgctgcagcatagaccaccgcgtcctcgctcagcagcaccgatgtcgatgatggcaacaaggaggacggctccgcgagcacccccgagatctgctgctgccactcccacgcagctcttgcttgtgagatctgtgtgcaggttgatgtcctcgtggcgccacgccgacctcaccgccaccaagcgcgccacccatgtcctcaccgacctcgccaaaaactataagaataggtgtagtcactgtcggggtgtacatccaattgagttttgagttggtgtttagctttcccttaccagggacggatcaaagcaccgtaataagtgtcgatatagctctttcaattgcgcctattgttttgtgcgggctatatggatcaaggaaccctctttgcagcagaggtttgttttgtgttctgctgctagtagtcgcatgtcagtttaatcttttgagttctggaagctgttggtcccttaggtgtttgggagatccttttgaatcgaagcacacacactcaggtgctatgacctttggcatttcatagttgcatatttaactggtgtgcgaagagcaccaggatagcacccttgcagcaggaacttacttttggttgcttttctgttgcctgtcatatcccgatatttgtttcctgcaaatttactttgtttaattgtattctattgattttacagcttttgtacttgtacagttacattgtcatctggtttctattgcacgtgtagctgattagttgtagtcactatcttgcaagcatagatattagggaggtattatgtccagtcaagttttgtgttggctatgtgtagcgaattaggattgcttttcctgggatggatcagagcacatgtactgtggcgatatagttgtttcaatagtatagttgccaaattttatgtgtgtgctatatagaccagggaacccacttagaagcagaaaattttctgtgtgcgcgcgaaattttctgtgtgtgctaacaaattgcaggcaaccatcttaacaacaaaagaggctcgtacaatagcagagatgatgctaaaccacttgtgcatgcaaagtatcaaaaaggagaccagacacatgttgatgaaacatctaaaaaggtgttggcaaatcttcattggtgcatctcttactgaaagattctgcagtggctcgaccagcccaaacaattgggtgtgcagttggtgttaaacatattacttacagtagcccagggagttcatctaatagcgtcaagggtgatgctgaaaggaacttctttgttgagctttgggatgtttctggacatgagcgctacaaagagtgccgttcacttttttattcacaaattaatgaggaaaacaaagacaaatttgaacaagtgggcagtggaggtttctgaatctgggaccttttcagctcctcttgggtctggtggtcccggtggccttccagttccttacctagttattgccaacaaagtggatattgctccaagagatggtagaagagtgagcagtggtaatcttgttgatgttgctcgtcaatgggttgaaaaacaaggtctgcttccatccagtgaagtgcttccacttgcagataactttcctggcaattctggtttgctcacggctgccaaagaggcaagatatgataaagaagctctaatcaagttcttccgcatgttgataaggagaaggtatttttcgaatgagcttcctgcccctagcccatggtcactcactcccagggaagataccattcttcccgtagaaactgtgaacgatgatgacatgttccaaagaaaaagctacggcggacagagctacaaatacaatggggttaccccactgcctgcacagcggaacctaactccgccccccacactctatccacagcagccaatgtcctcttcatcagaaaactacagataccacagattttcctcttcgtcaatacctgattcaagtggtggttcaaaaagccgagcgaaccttaatatatgatgggatatgtaagtccttatccattatcacctggagtgtgggaaaaaaacatgacacctgggttttttggttctcaggtttttgatctttttgagttgttcatctgtctttgatttgattgtaatatgtgcatgttgacagggcgccagagcattatgtttgtgggatcactagtgataattctttggttcttctctgtatatctcctaattttgtgtatgaattcaatatagttatttaggaaaacacattacatggtcagatggtctacactgtgcaacggcaatctgaatcaatcttttttcctgagtcccttcaagtcacctgggagaaatcaagtctcgtggtgttatggggcacagcaactttatataaatcagcattcagtctgatgggttttcactctatctggttccttatagacagattaaaggcatgtttggttcattacctcaattgccacattttgcctaacttttctacctaaggttagttattcaattcgaacgattaaccttaggcaaagtgtggcacatttagccacaaaccaaacatgccctatgattgtcaagcacatattttgttggcttgagaaatgtgtttggtataggcgaaccctactggcagggattttcgacaaatttgaattttagtttgaaaaaagtagcacgtggagtccacatttgtcattaattgctactttctccgttttcaagttgtaagacatttcggattttatagatatattgtttttataaacatactatggcg

SEQ ID NO: 2663 - DNA, 2143 bp, Zea Mays
ggtctgtctaacagtccaaaacttcccacagaaaatgtcaagcatagtagaagattggatttctcgtgcaaatgcaaaacagagacggggtagggctggtcgtgtgaagcctggtttatgtttctgtctgtatacaaggcatcggtttgaaaacgtcatgcgtccatttcaggtgcctgagatgttacggatgcctttgactgagctgtgcctgcaaataaaatcacttcatcttgatgacatcaaatccttcctgctaaaggcagtagagccccctaatgaagaagctatttcctctgcagttgacttgttatacaaggttggagcttttgaaggacatgaagagttgtcacctcttgggtatcatctggcgaaactgcctgttgatgttttgattggaaagatgatgctttatggtgctatctttggttgtttatcaccaattctgtccgttgctgctttcctgagttataaatctccatttctctctccaaaagatgagaagcaaaatgtggagaaagcaaaagccacattattgaatgagaaccttgatggatctagttctgtaacagataataaacaatccgatcacctgctaatggtaattgcatacgacaaatggtcccgcatactgctacaggtttctaataagctggtttttttaatttcagaatggtgataaatctgctcgtcagttttgccattcattctacttgaatagtactgtgatgcacatgatcagggacatgcgtcttcagtttggtaccttgttagcagacattggacttatagatcttcctaaagatactctgaggcacaaggtgggcagtagaaaaaataatctcgagagctggttttctaatatgtctcttccattcaatgcctatgctcgctgcacctcggttattaagtcggtgatgtgtgcaggtctataccctaatgtggcagcatctctagagggtgttgatcctggagctctaggtggaagaaagccatctgatgttctgttcagtaaggaccgtcctcgatggtatgatggaaggcgagaagttcatatacatccatcatctgttaatcacagcttgaaagctgttcaatatccatttttggtgtttcttgaaaaggttgagacaaccaaggtgttcttacgtgatactagcgtcgtttccccctactcacttcttttgtttggtggttccatggtaatccaacatcagacaggagtggttgttatagatggatggttgaggctgtctgctgctgcacagactgctgttttattcaagcaacttcggatgactcttgatgctgttctaaaagaactgacaagaaaaccagagatggcaacttttgttgacaacgaagtggtcaggtccatcattcatttattgttagaagaagacaaggctcgataagcatgaattcatggcttttgatcagtatcggtttctgccgatgtgcacgttagtctgcacaggattcttattgcacaatgtggctgattgctaatgtggaagctgcaaagcggaaaaggagtttaatatattattcggctggctggcttcaggtgtttggactgctgcagctgtaatctatagaaacaaaatactatagaaaccacagttgcagtcggattaaagccgcagcaagccgcagtgattaatgtgttgcttgttttatatggaacaagtttgtgtcggtctagtattagtgtaatacccttgtcctaattttggagcttacgtgcatcaacgtacagagcagataaaactcaaaagcctgaattgccgtcaattttccatctgacactttggacagaaaaaatgaaaaaaaatgaagagggaaaaaccatatacatatatgaaactgtagcaaatactattatagatggcagttagtgatgatgagagttgcattaggattcctgatatttagcgttgcacaccttgcacttgttgtacctcgtgatagttgcaattgaaaaattttggaacccaaccgtacgtgcatctcgtacaaagtactgtccgttctgaattacttttttcttgagaattttccgtgcttatgacaagtgttttagtactgtaaaaaagtgactagtacaggcgtacagctcggtaggtttaggacgaatgatatt

SEQ ID NO: 2664 - DNA, 1675 bp, Zea Mays
aatgtcaatgctctgtatattttgtattgtgcatagtttgtgggcattcttctggatagtccattactactttagtatcttgtcagatttacatagatagaggttttaagacccagtcagtatcaccagatgtcaaaatgtgttacccttgaacgacaaggttggttaaagaattagctggattggcaaacaattgaaatttcatgcatgaaagatgtctactctctcagacccctcaaaagaagatacttcacctgagggttcaggtactacccagagaaatggagcctggagtaacacattgaacactcttctgcagcaagcctcagtatatggtgtggccgctgggtattgtttatcagcgtccctgctctcgatcatcaataaatgggcaatcatgaaatttccatatcctggagccctgacagctctgcagtacttcactagtgttgctggagttctcctatgtggacagctcaagctcattgagcacgatggacttaacttgaggacaatgtggaagttcttacctgctgctgtgatgttctacatctccatcttcacaaatagtgaactcctgcttcatgccaatgtggatactttcattgtgttccgctctgctgtgcctatatttgtcgcgatcggagagacgctgtatcttcatcagccatggccatcgctcaagacatggctttcactctccacaatacttggtggaagtgtgatctatgttttcacagacaaccaattcactgtgactgcttacacctgggcagtggcctacctagcaagcatgtccattgatttcgtgtacatcaagcacgtcgtaatgaccattgggctgaacacatggggccttgtgctatacaacaatctcgaggctttgatgttattcccccttgagctccttataatgggagaatttgatcagatgaaggtcgacagctccaagacgggctatttctgctaccgggttcacagtgcttggcatagtgaacaagctcctgactgttgttattaatttgcttatctgggacaagcatgcctcttttgtgggcaccattgggctcttgatatgcatgtcaggtggcgtgctctaccagcaatccaccatgaagccgaaggcgcccaaggttgagccgaaggaagagaacgacaacgacgaggagcagcagaaattgctgcagatgcagggtgttcaagagagcaatccaactcagaaataaagctcttcataaaccttacaacgaagtaatgctttgatggattaccttctttgcaacagcctcacctgaaacgtttttgtattggctaatacttggaaaaaagcatatggatgagtagtcatgaattaggagctacaaaatatcatgtttttgatattagaagtcgtgaggggacctaattatcactatgcaattctttattactgtattaccacttacatttgtaacgcaaaatcgttatgataggataccaggtactcggcaaatacctgcattgaatacttcctatacaaaagcatccgtctcatacagttcgggggtgacagtggtagtatgatctgtttttaggcatttctctgctggagttagcctatatgttctgtaacttattgttggtgatgaagacattggttcttgtgctaaatagagttttcttatcatcgttgttg

SEQ ID NO: 2665 - DNA, 3274 bp, Zea Mays
agacttcctctttcttccccttctcagcctttccctctcttctctgctctttgcatctctctcttgttcctcccttcctctctctaaaaaagggttctgatccctttctagaagctcctgggtttctgttgccgacccgagctccccaggggcgctcaggaggcgccgagccggcgaccgctccggcggatctgaggagccgccgcggtcgctttgcctccgttgcgatactgcacaggttccttgtaaactattgattgggaaacactctgaagaagagtttgttggctgcataacatctcctgaagctggtttgaagtttgctgataggaaagatcatgggcgctctctgtgatttctgtggggagcataggtctatggtttactgccgatcagatgcagcatccttgtgtttatcatgtgaccgtaatgtgcattcagctaatgctctttctcggcgtcatacaaggacacttttatgtgaccggtgtgcttcacagcctgctatggtccgctgtctagcagaaaatgcctcgctttgccaaaattgtgattggaatggccacattgcaggatcctcatctgccggacacaaaaggcagactataaattgctattcaggatgtccatcgtctgcagaactttctagaatatggtccttcgtttcagatattcctaatgtagcacctgagccaaactgtgagcaaggaataagcatgatgagcatcagcgacagtggtgtcagtaatcaagataatgctgcaggggacagtattttgttagatatagctagtgcaacacttgtaagtgatattggtacttgtgacaagcttttggtaggttcctcttcaggagctggagtgaacctacttccactggctactggtcaaacagaaacagctggatctgtggattccacaccagataaggttccctatacgccagataaagatatgttcagtaaggacagcatatatgaagatttttgtgtggatgacgctgaccttgctttcgaaaattatgaagaactctttggtacctctcatattcaaacagaacaactctttgatgatgctggaatagacatttactttgaaatgaaggaagcacctgctgggaattccactgaggtttgtagtttgctaatgaatatttttttcttaatccgttacaatcattcacatccatgtgcacatgcacttctcatagtgttggtgttctctttgctatgccaattaactgaaccaattctgtagtcctcccaatttgtgtaacttataagccgttcattttcctgttaactcatcaaaattgaactgtgtgataagtttttccaggtgcagtttaatttttagtttgggaagggcaggcctggtgcagtggtaagagttctcactaagtcaccagatcacgggttcgaagctgcctctccgcattttcttataggccctaggttttcttctttctttgatccatagcttattattgacaaactattcaaaatggttgacttttctgaagtgacaaaaggcaggaagaatcttgccttctttatgttagtcttgggttttgggatatagcttgtgccaaatttatgtgtctggttttgtgtttaagaagcaaccagtaaccacagataggactgtaaattgtaacctatcagcattaaatgtatgtcagctagggatgaaactggatctgatacagacggatattagtgatcctgcatccatcctattttccatattgtatctcattttttttctggaatctcagaaccggatagggatatattagagtgatatttatctatacatatcagaaatctgtttttgtatccagatttgattacgatcggatattaaatgttcagattcagataaggactatacatataggattttgaattttcaggatggacagataacgggaaatatccgttacgttttcatccctcatgtcaccagatctgtaaaccatttggtgttatcctgtagtcagcgtatctggtttggacaaattagacgttgcgtttttgtgttttattatatgattattataggattcttgtctcatgcttttcagcagtccaagctgaagcaacctgcaaatagcaatgcggtatctgccgactctgggatgtcgaaccctggagtgaaagcctcctggccccgagggctcaattgctggaggtagtagagacagtgcactcacacgatacaaggagaagaaaatgagaagaaagttcgacaagaaaatcaggtacgcttctcgtaaggctagagcagatgtgcgaaagagggtaaagggtcggtttgttaaggctggtgaagcatatgactatgatcctctctgccaaacgaggagttactgaagcatatgatctttatccagttttaaattagcaaactgcaaccaaggctcgttgcagctagaacaaaagcactggcaatccaagctattgggccaaactgtgccttcgaaaagaaaaaaaaaggagaaagctgtcggcatgataaaatatagagaaatatttggatgttgcagaagtttttgagtgaggatcctcctttttcctcctgtacagtggttggaagcggtttgagtctctccatcttttgtgaattagcctgaatccagctaaacagacttgttgcattttgatctccattctgcatttctgctgactgccatcagtctacgtacacgggctggcggctgcggtgtttttggaggtgttcgtccagattagacaagatggctagatgtgatctgtgaaatatccttctattataataatgtaaaatttgctgggacctggatgtttctgctattatcaatgtgcaaataccaggtcgtagccaaactggtcgtcagtttgttctttttaagttggtgatggaacccatccaactggacagtggacaccaactttctgtgctcattctgtccaaaccaacctccaaactgactcgatgttagtactatttgtattatgtgactcctgagcaagtgagcttgtgctcaaacctcaaatacgtcctcttgtaccaaaccacgatattggagggtaaatttttgacctgttcctttgttgttgaaacttctggttattttggaaaaaacaaatgtggaacactgctttgtggcttttctgttctgcactgttgtactcagtcttgcaaattagaagacgatgtggcatttttagacatagttatgtatttagatatatactatgtctaaatacctggtgaaagaaatgtatctagaa

SEQ ID NO: 2666 - DNA, 1517 bp, Zea Mays
tattcgcatgctatctcattcagtcctgagttctgatcctctccgtctctccctcctccctctccatccaaagtgtagtgtagacagtaacccacatctcgtttcctcgccgcggccacggcgccgactgagcgaggtcttcatctgcgcttcaccagcgacgattatccactaggtaggggatcatccgatcatgtcgagcgcggcggtgaacgggctgtccggcgccggcggcggcatcatcgcgcagatcatcacctaccctctccaaaccgtgaacacccggcagcagacggagaggtcaacgaagaagaggaaggccaggagcggcgccagcgccaccccagcctccaccatgtaccagatgctccaggtgattcatcgcgggcttcaggatggagtgggttgtacagcggcctcaagccctctctcatcggcactgccgcgtcgcagggaatctattactacttctaccagatcctcaagaacaaggtggaagatatagcggttgctcgtagcaagaagggccttggggatggtactgtcgggatgctttcttggcttggtattgcagctgttgctgggtcaatcaatgttcttctaaccaatccaatatgggttcttgtgacacgtatgcagacacatactcaagcgaaaagaaaaatattggagtctaagagggagcttttactgaaagaaatgtctagggcgaattcgttggaggttgcagttctgaaggataggctggttaaattggagtcagaaaaagctcgtccatatggtactcttcaagcgatccaggaggtttaccatgagtctggtgtaagaggattttggaaagggcttattccaacattaatcatggtatgtaatccatcgattcagttcatgatctatgaaacattggcaaagcgtctgcagtcaaagcgttctggaaagcagctaccaaaaaggcacctcacagctatggaggtttttttattgggtgcattggcaaaacttggagctactgtagtcacctatccattgctagtcgtgaagtcaaggttgcaggcaaaacaagaaattggcagcaatgtgatgtccagatacacgggtacaatagatgcgataataaagatggttcgctacgaaggactacacgggttttacaaaggaatgggcacaaaaattgtacaaagtgtctttgctgcctcggttctctttatggttaaagaggaattggtcaagttagcagtgcttttagttgcgagtagtaggactatgcttattactacatccaagaaacaataggtggtggtgtatttgggagaaaagctcatttttttgcctcaacttgtaatgtatagggtcccattatacatatcctgttcaagatcaatatgaaattctttactggttactagagaaaaccttaaagcctctcaaaagccataccttccccttattaatgaaggataaaatcatctaaaagatattacatgttttgggtttaactgatatacaaaattaagggt

SEQ ID NO: 2667 - DNA, 1062 bp, Zea Mays
ttcttcacatcaaggccccatcggtcttcagtgtgcgcaacattgggaagactctcgtgtccaggacacagggtaccaggattgcctctgatggtctgaagcacagagtctttgaggtttgtctagctgatcttcagggtgacgaggatcaggcttacaggaaaatcaggctccgtgctgaagatgtgcaaggcaggaatgtgctcacaaacttctggggcatgaattttaccaccgataagctcagatctctagtaaagaagtggcagacattgattgaagcccatgttgatgtcaagacaaccgacaactacatgctgcgtttgttctgcattggttttaccaagaggcgcccaaaccaggtcaagagaacctgctatgctcaggcatcccagattcggcagattcaccgcaagatggatgagattatgatcaaccaggcttctacatgtgacctaaaagaacttgtttctaagttcattccggaggttattggcaaaaagattgagaagtctacctccagcatcttcccacttcaaaacgtcttcatccgcaaggtgaagatactcatggcccccaagtttgatctcgggaagttgatggaggttcatggcgactacaaagaggacgttggtgtgaagcttgagaggcctgtcgagggtgatgaggctatgcaggaggttgctgctgccgagtagtttatttgctacttctttatctagacgaatctggacaggaggtcccttatgacgcgaacttcataaaattgtctggcgacatgttttcttctgtccctgccctaaactctaaacccaaaggttattcgtaacaagtgttttaagattatttttgtttatgtttgggttcgagtactgctgtgtgcatgattattttttgtttggttatcgataatccagtttctcattcgtgcttatttgttgtgagctggtagtggagcatgtgttaaatgtatgtgatgctctgccgtgtttaagattagtctcagcattttactggtgccgcaccatcctcctctcgcttcttccacgccagctcttaact

SEQ ID NO: 2668 - DNA, 979 bp, Zea Mays
aaaaaaaaataaaaacttggtggggacagagtagttggagtcggagaattttggggtaacaggtgggttggcttcctggctgttaaaaggaaggacgcctttgtgctgttctcctaatccaaaagtcgcgtgctgtgctctgctctgctctcgcctcgcacggactcgtggtaaaggatggagaccatgtcggctctcgcgaggacggcgccgccccttgctgggaccattcgccggccctcatgcgcgctgaggccgacggcgtccctctccttcgccgccgcttcaacgacgccccgcggccggctcgggctggggctgagcacggcgccggcggggagcgggagggcggccagggctcgcgccgtcccgcggcgcatcgtcgcctcctcggagcattacaaggatttgaaggataaacctttctttcctaagctgatcgattacataacttctggccctgttgtctgcatggcctgggagggtgatggtgttgttgcatcagctcggaaattaataggagctactaacccccttcaagctgaaccagggactataaggggtgatcttgcagttcaaactggaaggaacgttgtccatggaagtgatagtcctgataatggcaagcgtgaaattgaactgtggttcaaagaaggcgaggtctgccaatgggaatcagttcaagcaccgtggcttatagaataactattgctaatcatttccagagttgtattcaatgtttttttttgtgttcgtcttgattcaaggagccatgcaagagtgtatgagtttagttcggctaagtaattagctcatgagggcttgaattatcggttctttttgaggattgaggatttgtgcaactgaaacctttgatcagttgctcatgttgagaagctaatttcttgtcatatttacatgtaataaagtccctctactacagtaataaattagtatttcctctggtccaattaattaa

SEQ ID NO: 2669 - DNA, 1066 bp, Zea Mays
aaaaaaaaataaaaacttggtggggacagagtagttggagtcggagaattttggggtaacaggtgggttggcttcctggctgttaaaaggaaggacgcctttgtgctgttctcctaatccaaaagtcgcgtgctgtgctctgctctgctctcgcctcgcacggactcgtggtaaaggatggagaccatgtcggctctcgcgaggacggcgccgccccttgctgggaccattcgccggccctcatgcgcgctgaggccgacggcgtccctctccttcgccgccgcttcaacgacgccccgcggccggctcgggctggggctgagcacggcgccggcggggagcgggagggcggccagggctcgcgccgtcccgcggcgcatcgtcgcctcctcggttggagagattatttctcgctttgagaagaaagggtttttgttgaaaggcttaaaacttttccagtgccccaaggacttggcgcaggagcattacaaggatttgaaggataaacctttctttcctaagctgatcgattacataacttctggccctgttgtctgcatggcctgggagggtgatggtgttgttgcatcagctcggaaattaataggagctactaacccccttcaagctgaaccagggactataaggggtgatcttgcagttcaaactggaaggaacgttgtccatggaagtgatagtcctgataatggcaagcgtgaaattgaactgtggttcaaagaaggcgaggtctgccaatgggaatcagttcaagcaccgtggcttatagaataactattgctaatcatttccagagttgtattcaatgtttttttttgtgttcgtcttgattcaaggagccatgcaagagtgtatgagtttagttcggctaagtaattagctcatgagggcttgaattatcggttctttttgaggattgaggatttgtgcaactgaaacctttgatcagttgctcatgttgagaagctaatttcttgtcatatttacatgtaataaagtccctctactacagtaataaattagtatttcctctggtccaattaattaa

SEQ ID NO: 2670 - DNA, 3070 bp, Zea Mays
ttccctgccgcacttcagttctctatcccattatatttttaggaatgaaatgatgaagtcctgattctcttacgccacctcgggataacacgttcattcaaagccagagtagttgaaagttcattcaaataaaaaaatttggacggctgaatatcgaccatcaacaaagttcacactgccgacagccttagccggtatggagcttggcctcgagtgtaggcccccaggaatgtcaggctaacaccaagccaagctgggttcgtcttctacatagtctcgtttgccaatatgcgatggatgcagaatgtcctcttaaaattggttcatgcttcaaagtagagcatgccaaactatgcattgtggaacctttagattgtctgctgtcatgtatctcaagaattctgcaaattaagcaacatagtaaatgtgaacgaccacgtgatgcatattggaagtgctttggttttgctgcttcacaagataatgaggttggacgagcatcatcaagtgatttattcgtgaaagctttatcaagcatccaaaagtatttgaggatatccctcacaggtttgtgatatatcatagataaagcaagccaatcagagcaaaataatgctattcaagactcaagaggtttgtgcttataatttctgcatgttgacagagcagagaggacaaagccaagaagctggatctctttcttcaccatcagagatggctcattgtcataactttgctatgcttggaatcattgaggtttttattgatttttctgcttcaaaactggagaaagcctctggcaaatcgaaggaaatgatagaaaaagaaatcgtggagcttgttgatgcgcacagtggctttgagaaaaaaattagcagtggtagggaaaggatagcacggagaagagcaaatgctggtgatgctacagataagcacaccaacgaacccagggagaattctaatgcttcattgcagaaacatcatggaaacaggggtaaatttgctgattcgagtttgtatgaactttcggtaatgtgtgtcaagcagtgccatgctgataactacaacaatgttagtcaacattctagccaaactaaattgaaccagagctccaatttgacatcctttgtactgaaagcctttcttgaattgttgaaatcacttgcatcaaagcacagtagggacttcacaataaagctgcatggagattttaaaaagttaagccagccaataatgcagctagtatggtgttttctgttagacccaattcaagaaaatggtggaagcaagaagaacatgacccaaggaaagaaaaacactgagtgcaaaaaggatcagttatatttggctctgacatgcctaaaaaaattccttgagccaagtgtttcaggagaacactctagtgatatcattgattttctaatatctttggctccacctaatatagaggatacaatgggtactggggatcttgacaataatgataccactatggttgaagatagaagcacaagaaatgtccatgtgattttgaacatactgaagacgttatatgccagacttcttacccaatcagttttacgtgaatctgaggctgtaattgaattgattctgggtatttcaagaaaactgcaacttgaacgaaggcatcttgttggaaaatgggctacagatctatgtagaaagaaaaccatgcaaagtcctagaatggcacgagagatgttaaaactagctatacatcttacaccagctccagatgacatgattcttgtttatgaggtgtctactgagttgatgaatttaatgacctctggagatgatggagattcttctgatacatttcatatcattaactgtaaaacaaagagctcactcgctgctctctctcttcaaatggttgagtcatctcttactgaattggattggggctttggaaagcttaaagcaatgcttacattaggttatgattgtgctaacattgatgaagatcaaccagcagatgaaataatgctaaggttggctttggagaaagcactctactcgagatcaacattagtagttcaagtgctctcttcctttgcacatatgagccctatggatactcaagcagaacattttctgaaattgactgtcaagttctacaagcttttaactcgcatgtcaaagtcccagattgtacctaaaggctacagacaatccattccaagcctcaagtttcagaaactggcagaagtaacttgcaaaatgctcaccgctcccctttatgattttgtgtttcaacagaatcagcaaatacccataaagggaaacctcgccaaaattagaagagaaaccaaatgtatccctgatcttatttttcagattgaggattatgagaagtatttaatacagctaagcaaactaactaaggtaaaccttttgaggcatgccaaacgcagtgtagcaagagacttccagataaaagataaatctgggggacaacaggaagatgatcacattccagacaatgctgcagcatctgataacgaggctgataaggacgcaatgggtccaaacgcaccagttgaatcatgtgctgacgatgctcaaaaatcatatgctgacgaaaatgcatcatgtgaaagtgggcatgatgaggatgcaggaggtccaaacactccagcagaagcagatgctgatgaaatcattaggtctagcattccatatggtagtccagtccaggagtctgaatctgatagagaagaggaagaattattagcacggacgaagagagctaagacaaaacaagttgtgcaggattctgatgaggatgcagatgagtaggtttttaaacattatcaatagttcaattttcgaagcgtctattgtgggcaacatcatgccaaggtgtatatacataagtttttatgggttatcttgctgattatagacgatgaacacaagagatgtaaaatatatggttttgcaaaaattcttgtgggccatcatgttgattatagaccatgcacagaacatatgtaaaatactttattgtaaattataagttattctaattttctttaagtgaaaa

SEQ ID NO: 2671 - DNA, 4200 bp, Zea Mays
acagtgacctaggtctgcatctgtactttccacgacatgttcaatctccttctacggccatgtctagactttccacatcggactcatcaagtttcacactgccgacagccttagccggtatggagcttggcctcgagtgtaggcccccaggaatgtcaggctaacaccaagccaagctgggttcgtcttctacatagtctcgtttgccaatatgcgatggaccccgcgctggcgagggaggtcctggccgccatcaaggctgacgccgcgggcgctctcagtggatttgcggtggcagtgatgctgttcgtggccagggtgccgaggttcaacgagggtgccgtgagtgtgctccgggatgcggtcgtggtgtcccgccgggattaccgaatgtcaaggtgacggattgctcgttactctacctattgtgattgctagtgtttgctttagaaatttgttctgatcagatggcggatgtctctcaggcggtgcaagtggttgccggattgtatggaaggggaatatgcacgggccactcaatgtgtcgagaagggaatactaaaatctgtcgacgagagcattgttggcagggagcatgttgtgccaagcattgttcaggtggcttttcgcctgttagaagtctcagaaggtgatcaaggtgaggaagctggcttaggtgaaggagtaatgagcaccgaagaaataggcattaatatgctcaaatcattgtttgaggtccatgaaatggcacggactgagataattgaacagtgcaagttccggattctctcggcaaagcctcagcaaagtgtgccagttctcaggttgattggatgcttgattttgagtcatccatttccaatgctggaattcattgcacatttaaaggagttgttggattatttttcttttatgaatgacaagatatcaactgctttgatcagttgcatcttgccactcacaaagttcagccgtgatctgaaggattacgtaatactggttgtaagaaaggcgatgttcaagagggaggacatggttcgaattgctgctacaaatgctataattgagctgattattgcagaaaacaagaaaaatgaagccaatccttttgaagattcaacaagtcagccaagctctagccaacagcctgaaacacatctagagtttggtaggtgtctctttcaggaactaagtgggttgcttcggagatgtctctcacatcaggtttcactggtttcattatgatgtactaccatacaactgcttcatctctagtaagacatacggtttccagcatagttagtttgctcttgcaggccagtgtcaaagaggtcttgtacgagggtcttatacgtactgctatctctgatccagctgtttctgacaatatccttgattttctctggcctcacttccaaaactattactcagagaatgtcctcttaaaattggttcatgcttcaaagtagagcatgccaaactatgcattgtggaacctttagattgtctgctgtcatgtatctcaagaattctgcaaattaagcaacatagtaaatgtgaacgaccacgtgatgcatattggaagtgctttggttttgctgcttcacaagataatgaggttggacgagcatcatcaagtgatttattcgtgaaagctttatcaagcatccaaaagtatttgaggatatccctcacaggtttgtgatatatcatagataaagcaagccaatcagagcaaaataatgctattcaagactcaagaggtttgtgcttataatttctgcatgttgacagagcagagaggacaaagccaagaagctggatctctttcttcaccatcagagatggctcattgtcataactttgctatgcttggaatcattgaggtttttattgatttttctgcttcaaaactggagaaagcctctggcaaatcgaaggaaatgatagaaaaagaaatcgtggagcttgttgatgcgcacagtggctttgagaaaaaaattagcagtggtagggaaaggatagcacggagaagagcaaatgctggtgatgctacagataagcacaccaacgaacccagggagaattctaatgcttcattgcagaaacatcatggaaacaggggtaaatttgctgattcgagtttgtatgaactttcggtaatgtgtgtcaagcagtgccatgctgataactacaacaatgttagtcaacattctagccaaactaaattgaaccagagctccaatttgacatcctttgtactgaaagcctttcttgaattgttgaaatcacttgcatcaaagcacagtagggacttcacaataaagctgcatggagattttaaaaagttaagccagccaataatgcagctagtatggtgttttctgttagacccaattcaagaaaatggtggaagcaagaagaacatgacccaaggaaagaaaaacactgagtgcaaaaaggatcagttatatttggctctgacatgcctaaaaaaattccttgagccaagtgtttcaggagaacactctagtgatatcattgattttctaatatctttggctccacctaatatagaggatacaatgggtactggggatcttgacaataatgataccactatggttgaagatagaagcacaagaaatgtccatgtgattttgaacatactgaagacgttatatgccagacttcttacccaatcagttttacgtgaatctgaggctgtaattgaattgattctgggtatttcaagaaaactgcaacttgaacgaaggcatcttgttggaaaatgggctacagatctatgtagaaagaaaaccatgcaaagtcctagaatggcacgagagatgttaaaactagctatacatcttacaccagctccagatgacatgattcttgtttatgaggtgtctactgagttgatgaatttaatgacctctggagatgatggagattcttctgatacatttcatatcattaactgtaaaacaaagagctcactcgctgctctctctcttcaaatggttgagtcatctcttactgaattggattggggctttggaaagcttaaagcaatgcttacattaggttatgattgtgctaacattgatgaagatcaaccagcagatgaaataatgctaaggttggctttggagaaagcactctactcgagatcaacattagtagttcaagtgctctcttcctttgcacatatgagccctatggatactcaagcagaacattttctgaaattgactgtcaagttctacaagcttttaactcgcatgtcaaagtcccagattgtacctaaaggctacagacaatccattccaagcctcaagtttcagaaactggcagaagtaacttgcaaaatgctcaccgctcccctttatgattttgtgtttcaacagaatcagcaaatacccataaagggaaacctcgccaaaattagaagagaaaccaaatgtatccctgatcttatttttcagattgaggattatgagaagtatttaatacagctaagcaaactaactaaggtaaaccttttgaggcatgccaaacgcagtgtagcaagagacttccagataaaagataaatctgggggacaacaggaagatgatcacattccagacaatgctgcagcatctgataacgaggctgataaggacgcaatgggtccaaacgcaccagttgaatcatgtgctgacgatgctcaaaaatcatatgctgacgaaaatgcatcatgtgaaagtgggcatgatgaggatgcaggaggtccaaacactccagcagaagcagatgctgatgaaatcattaggtctagcattccatatggtagtccagtccaggagtctgaatctgatagagaagaggaagaattattagcacggacgaagagagctaagacaaaacaagttgtgcaggattctgatgaggatgcagatgagtaggtttttaaacattatcaatagttcaattttcgaagcgtctattgtgggcaacatcatgccaaggtgtatatacataagtttttatgggttatcttgctgattatagacgatgaacacaagagatgtaaaatatatggttttgcaaaaattcttgtgggccatcatgttgattatagaccatgcacagaacatatgtaaaatactttattgtaaattataagttattctaattttctttaagtgaaaa

SEQ ID NO: 2672 - DNA, 4231 bp, Zea Mays
gaactgcccgccgccgacttccgctccggcgatgtcggcgaccatggcctctgccagtcagccctcctcgcagcaacctccacctccaccgctcactgccgaaatcgttctccgcctcgcctcgcgcgacccctccaccgcggtgcccctcctcccggagctcccgcccgacgatctcgccgatatcgttgcctcgctcaccgccacctcccccgcgggccacctctcccttctccccgcgatcctcgctctcttaccctccccatcctctgcctcctccgcgttcgccgctctcctctccgcgcccagctggccctcctccacgctcctcgccgtcgccacactactccgcgacctcccgccggcctaccgcacccgcatccccgccttcctcgggaagatcatctctctccttccaagtgcggatgcccaggacctccctgctctctcctaccagctcctcctgctcgcgtccaagccgctctacccgcgcgtcgtcctcgcgggactcctgcgcttcttcggcggccgccgcggcgcccgcgttcgcgcgccgccgtctatcgcgcggcaggtcgagagcaccgcgctgatgaacgtctcgttcgcggtcaagcaggaccccgcgctggcgagggaggtcctggccgccatcaaggctgacgccgcgggcgctctcagtggatttgcggtggcagtgatgctgttcgtggccagggtgccgaggttcaacgagggtgccgtgagtgtgctccgggatgcggtcgtggtgtcccgccgggattaccgaatgtcaaggcggtgcaagtggttgccggattgtatggaaggggaatatgcacgggccactcaatgtgtcgagaagggaatactaaaatctgtcgacgagagcattgttggcagggagcatgttgtgccaagcattgttcaggtggcttttcgcctgttagaagtctcagaaggtgatcaaggtgaggaagctggcttaggtgaaggagtaatgagcaccgaagaaataggcattaatatgctcaaatcattgtttgaggtccatgaaatggcacggactgagataattgaacagtgcaagttccggattctctcggcaaagcctcagcaaagtgtgccagttctcaggttgattggatgcttgattttgagtcatccatttccaatgctggaattcattgcacatttaaaggagttgttggattatttttcttttatgaatgacaagatatcaactgctttgatcagttgcatcttgccactcacaaagttcagccgtgatctgaaggattacgtaatactggttgtaagaaaggcgatgttcaagagggaggacatggttcgaattgctgctacaaatgctataattgagctgattattgcagaaaacaagaaaaatgaagccaatccttttgaagattcaacaagtcagccaagctctagccaacagcctgaaacacatctagagtttggtaggtgtctctttcaggaactaagtgggttgcttcggagatgtctctcacatcaggccagtgtcaaagaggtcttgtacgagggtcttatacgtactgctatctctgatccagctgtttctgacaatatccttgattttctctggcctcacttccaaaactattactcagaggatgcagaatgtcctcttaaaattggttcatgcttcaaagtagagcatgccaaactatgcattgtggaacctttagattgtctgctgtcatgtatctcaagaattctgcaaattaagcaacatagtaaatgtgaacgaccacgtgatgcatattggaagtgctttggttttgctgcttcacaagataatgaggttggacgagcatcatcaagtgatttattcgtgaaagctttatcaagcatccaaaagtatttgaggatatccctcacagagcagagaggacaaagccaagaagctggatctctttcttcaccatcagagatggctcattgtcataactttgctatgcttggaatcattgaggtttttattgatttttctgcttcaaaactggagaaagcctctggcaaatcgaaggaaatgatagaaaaagaaatcgtggagcttgttgatgcgcacagtggctttgagaaaaaaattagcagtggtagggaaaggatagcacggagaagagcaaatgctggtgatgctacagataagcacaccaacgaacccagggagaattctaatgcttcattgcagaaacatcatggaaacaggggtaaatttgctgattcgagtttgtatgaactttcggtaatgtgtgtcaagcagtgccatgctgataactacaacaatgttagtcaacattctagccaaactaaattgaaccagagctccaatttgacatcctttgtactgaaagcctttcttgaattgttgaaatcacttgcatcaaagcacagtagggacttcacaataaagctgcatggagattttaaaaagttaagccagccaataatgcagctagtatggtgttttctgttagacccaattcaagaaaatggtggaagcaagaagaacatgacccaaggaaagaaaaacactgagtgcaaaaaggatcagttatatttggctctgacatgcctaaaaaaattccttgagccaagtgtttcaggagaacactctagtgatatcattgattttctaatatctttggctccacctaatatagaggatacaatgggtactggggatcttgacaataatgataccactatggttgaagatagaagcacaagaaatgtccatgtgattttgaacatactgaagacgttatatgccagacttcttacccaatcagttttacgtgaatctgaggctgtaattgaattgattctgggtatttcaagaaaactgcaacttgaacgaaggcatcttgttggaaaatgggctacagatctatgtagaaagaaaaccatgcaaagtcctagaatggcacgagagatgttaaaactagctatacatcttacaccagctccagatgacatgattcttgtttatgaggtgtctactgagttgatgaatttaatgacctctggagatgatggagattcttctgatacatttcatatcattaactgtaaaacaaagagctcactcgctgctctctctcttcaaatgcagatgaaataatgctaaggttggctttggagaaagcactctactcgagatcaacattagtagttcaagtgctctcttcctttgcacatatgagccctatggatactcaagcagaacattttctgaaattgactgtcaagttctacaagcttttaactcgcatgtcaaagtcccagattgtacctaaaggctacagacaatccattccaagcctcaagtttcagaaactggcagaagtaacttgcaaaatgctcaccgctcccctttatgattttgtgtttcaacagaatcagcaaatacccataaagggaaacctcgccaaaattagaagagaaaccaaatgtatccctgatcttatttttcagattgaggattatgagaagtatttaatacagctaagcaaactaactaaggtaaaccttttgaggcatgccaaacgcagtgtagcaagagacttccagataaaagataaatctgggggacaacaggaagatgatcacattccagacaatgctgcagcatctgataacgaggctgataaggacgcaatgggtccaaacgcaccagttgaatcatgtgctgacgatgctcaaaaatcatatgctgacgaaaatgcatcatgtgaaagtgggcatgatgaggatgcaggaggtccaaacactccagcagaagcagatgctgatgaaatcattaggtctagcattccatatggtagtccagtccaggagtctgaatctgatagagaagaggaagaattattagcacggacgaagagagctaagacaaaacaagttgtgcaggattctgatgaggatgcagatgagtaggtttttaaacattatcaatagttcaattttcgaagcgtctattgtgggcaacatcatgccaaggtgtatatacataagtttttatgggttatcttgctgattatagacgatgaacacaagagatgtaaaatatatggttttgcaaaaattcttgtgggccatcatgttgattatagaccatgcacagaacatatgtaaaatactttattgtaaattataagttattctaattttctttaagtgaaaa

SEQ ID NO: 2673 - DNA, 1128 bp, Zea Mays
ggtggcggcggcttgtgtgtccaaagtccatctacggcacggcgtctcacagcctcaccccaactcgtcgccttcctcgtcattcccttcgtcgcggagaggaggtcacgcggctgattcccgccgcttgcgatcgggttcgtagggagcaggatcagctgacgcgatgttccccaggatttcccggctcggggcgcggctcctgcgcgagtctagagccgagacaagagctggaaacttgctaaacagtcaacgcattttctttcaagatcatgttaaccggcattcgatcccagtggtgactcctgctgtattatcgatgcggaatgcccttttgtcaactgcaacaagtggtgatcaggatgaaagtagtcaggcaaaagataaaatctcggtaacatttgtcaacaaggatggctcagaaaagacaatatgtgttccagttggaatgtccatgttagaagctgctcatgaaaacgacatagagcttgaagctgtagttcatgataaccttccctgctattgtggctactgcaggagcatgtgagggctcacttgcgtgttctacttgtcatgtaatagtaatggatgtaaaatattataacaagttagaagatccagcagatgaagaaaacgatatgcttgaccttgcatttgggctcacagaaacatcacgccttggctgccaagtgatcgcgaagcctgagcttgatggcatgcggctggcgctacctgtagccacaagaaacttcgcagtagatggctatgtaccgaaaccacactgaagagacggtcatctaccacactgaagagacggtcatctaccacactgaagagacggtcatatcggggaacacggattcttacagcagtcaattttgtagtttataacctgtaacttaactacagctttgttacttgtagtccggtccgggtggcttcggactaccttgttgagggtttgttcatttgatgaatcccttggttacttgcagagaagagagaacagtgcttcatctgggcgaataaacatccgttctgtgtgcaatgtgtactcacaaacatttgtcgtagcgttcccaatatctggtcctttgcaacctatgctgctgttcatttcgaggccag

SEQ ID NO: 2674 - DNA, 2401 bp, Zea Mays
accttagacaacacaaaagacatggctatatatgctatgtgtatacactcttcaatcagtgtaggtattagtatgtggtaaggattaaagatagccacaaggactgaaaaggaaggggacacacacacgctcccagcagcatctttaattatttacacagggaaaagaaaaaaggttgtcaatctagctagctactccagttagctacaaaagctaaccatagcagtgtgtgcagtggtctctctcttgctcgccggccagtataattgatccgtggtgcggccggccggcgtcgtacgtcgtccatggccatccaccacccgcacctcctcgacttctcgccgcctccgaacacggtggccatggaggaggcgccgcccccaccccacttcgaccacggcctcctcgggctccatgtcgatggcatgcctcatcgcgtcctcgccgacgacgcgccggtggcggcatgggcgccgcaggccgtggtctcccactccctgtacggatacgataacacagcagcgggggcgtcgtcgctgtttggccaccatgaggcatcagaggcccagttctccgtgcttccgccggcagcgtcgtcgtttgcactactacctaaccaccaccaccagcagcagctgccgacgacgacggcggcgtcgagcatgcagcagccgttccagctgaggagctccaagtacctgggtcctgcgcaggagctgctcgccgagttctgcagcctggaaggggacctgctgcacgccacgaacaagcagggagcttccggagcagcagcaggtaacagcaggtgggacgacgtggagacgtcgtcgtcttcttctgctggcctctgggggcacctgtccctgagctccatggatctcctggagctcgagaggaggaaggccaggctcttgtccatggttgaagaggtggaccggcggtaccggcgataccgcgagcagatgaggtcagtggaggtgtcgttcgaggcggtggccggagccggcgcgtcgcaggtgtacacgcggctggcgctgcgggccatgtcgcggcacttccggtgcctgcgggatgcgctggtggcgcaggtgcgcgctctgcggaaggccatgggggagagggacggcggcccagctggtgcggcggcgggcgccaccaagggcgacacgcccaggctcaaggtgttggaccagtgcctgcggcagcagcgggcgttccagcacccgggcaccatcgacaactacccgtggcggccccagcgcggcctgccggagcgcgccgtcgccgtcctccgagcctggctcttcgaacacttcctccacccgtatccgaacgatgtggacaagcacattctagcgcgccagacaggactgtcaagaagccaggtaaatcattcagttcatccacagttatatgtatctgctaattcagtcatcatcatgcatgtgcttaattcacccaaccaccacccgtatctgtccctattatgttatgaagaacgtgtggactagatctcgctttatttgtttcctcttccacatctcctcaattaatacttgatggaaccacttatatatacacatatgtcgtcgaaatcactttggttgcgtaggcaacaataatggtcggtcgtctacatctgatttatttatttttatttcccctttttttggcaaaagaaaggacgacgacgacgtcaacgtcaatgtcgtaaataattcattccatttctcttgattgaatgacactaggtttccaattggttcatcaacgccagggtgaggctgtggaagccgatgatagaggagatgtacacggaagaagtgaacccgaaaccggccgacgacacaagccaaaaccctagcgccggtggcggcgtcggcgtcggcgtcgccatcaaacctgagcagcaggtgagcacagctgcggcgggagccaccatcggaggcggcggcggcgaccatctgttcggtcctagttatcccagcatgtacgggagccacggcggcgccgtgtcgcttaccctagggctccagcagcagccgtttgcgtcgacgatgatgcaccagcgacgaccactgatgacgtttcaaggtgacgagcaagagccggcgctgccgtacagagaccttatgggctctcagttgctgcatcatttcgctgggtagcttgttacctacacatgcttgctagctagctaggagggtgggtatacggtggctaaatttttatatatattaaagacaaggtaaattttgtttaaatttcttgtcgactaaacgatcgatatatataccaaattaagcacacagattgtttaaatgctggtgtagccatgttttattcatacctggcctccaaaacaacaaagttcaaaagcaggggcaaatcacaattacaa

SEQ ID NO: 2675 - DNA, 765 bp, Zea Mays
caggctgaaattttggtgtccttgctcagccatgggtagtaggagatatgacattgatacgaggagatgtgggatccactcaagaccaaccaaatcaatgtatctggatgctcaacaaatcgtcagctgccaaactagagtgggagaccacgatgttggttcctgtgctgtgaagcatcacttcccgtctccaatcgtatcttggatagaagatctttccagctttggcaatgcttcttttaatcctgtctctgaatatgtggatgagcaagccagagcttcagtgggacagtcttcagcatcaagtaatttgcatgacatgcaaatatcagtgagattgacagccgaattcatggagcttgcaaaggagaatacaagcaataatctagagacttgtggaattcttggtgcttcatttagggatggaacttattttgtcacgatgttgattataccaaagcaagaaggaactgctcactcatgtcaggctgttagtgaggaggagatacatgccgtgttatcagagcagtcactttatcctgcagggtggattcatgtatatattctagcatttccctacttcatgaaatttctcttaaatgcacgtacaagttacatgcttcgtataatctgaaaagataaataagctgatacatgtgcaagatgatttccttgttgcagcatgtactgtgttagatgttttccttgttgcagcatgtaatctcattcatcatttacacttagttttctttcttttttattgca

SEQ ID NO: 2676 - DNA, 2018 bp, Zea Mays
gtctcaaccacccacgcctcatctagagttgacacgcgccatgtactggacgattggccgctggagacgacgcacgctcggccatggcgctcgctctcctatccccctccacgccatcccatcgtatactgcttcgtcctattccatttccatctctgccagtcgcgcgcgccactagtgccggtagcttcggcctcgcgttcttctgccccctctctcgcggttcctcctcgctgcagaggaccggcgcggcaggcggcgttattgatagtgccggagagggctcatcggaagaaccggtcgctggatggctcagcgcagacctgctcaggcggatatcaggcgcggcggacgcggaccgggtcctggacattgttgccgagtcagttgaaggcgcgggtgccgctctgggcgcgcccgagtgcaacgcgatcgtctccgccgcttttgaccgtggcaacatcgcgctcgctctctcggtcttcgaagccatgcggtccggtttcgcgggagttggaggctggaggtgggcaaggcctgatgtgaggacttatgcgttgcttgtacagcggttggcggccgccccgcgtgttgctgatgcaatcatgataattgattatgtgtctcgcgcaggtgcttcttctatggatgaggttcctttcggaatcattgttcgctgtccaacctgcatgatagcagttgctgttgtgcagcctcaggatggaactcaggttgtttcctgttcaaagtgtcgatatcaatatgaattattttctggagacattacgagtattgaatccgaagaagttaggatctcctcctgccgaacgcagcatggatatttcagccctggagaaagccttgagatttattaatatgaggaaagatggtattccagctgctgtccactctattgtgatccgctcaccttcaggaacagcacgtacttacagatttgctacccagaatgtaactcttcctgctcaagaaggagaaagggttaccatttccttggcggccccagttaacgtttaccgtgacatgggacccctcaaggttgctgcgcgctcacaaggatttaaacctggagaacctatgtgtctcactaatcacatcaatgggcaagtctcgaagttgctaagagctccatcaaagaacaagggaacatttttccttagcccatatttattgcaactgccattgcatcagctgccataggaacaacactaaatggagtggtcctgccaaaaattcaaaagcttccagaaaaagcagtggatatagttgctgtacagcaaaagcttttgtctcagtatgatattcttcagagtcgtcttaaggaactgaaacagtttgctcaaaaagaggtgtggatgcttgcgcggatgtgtcagttggataacaagatagtagcagttggtgaaccatcttatcgctgtgctcaatgatcgaaattgaagttgagatggactctgatgttatagctgctgaagcggcaagcagtgcagagagaatatctgagcagatacaacaattaatggagatcgatagtcttgaagagcaatggcgtatacaagctgaggctaatgatgaagcagaaaggcttcttagttcagattcctcagaaacatatcctgctggacgtgtaatgtaatataactctgttagtgcgcaggcattattctttattttctatttagttgtttatctctcttcaatttaaatgttctccctaccaaagtacaaacaaaacctctagttagacttgtcaaggaaaataatgccagaaaattagaaaaatagtggaacaacatgataatagatagatcatatcattactacacaaaatagagtgtcacattcgttaataatggcaggctaccactagagacaagtgcccgccgagataagtggttgtccgcgttaatggttaacagaggaggtcaagttaattaagaaaattgtcttatttttctgcacataaagaaataagtgaaattgttggaaatactaaggtc

SEQ ID NO: 2677 - DNA, 2609 bp, Zea Mays
gtctcaaccacccacgcctcatctagagttgacacgcgccatgtactggacgattggccgctggagacgacgcacgctcggccatggcgctcgctctcctatccccctccacgccatcccatcgtatactgcttcgtcctattccatttccatctctgccagtcgcgcgcgccactagtgccggtagcttcggcctcgcgttcttctgccccctctctcgcggttcctcctcgctgcagaggaccggcgcggcaggcggcgttattgatagtgccggagagggctcatcggaagaaccggtcgctggatggctcagcgcagacctgctcaggcggatatcaggcgcggcggacgcggaccgggtcctggacattgttgccgagtcagttgaaggcgcgggtgccgctctgggcgcgcccgagtgcaacgcgatcgtctccgccgcttttgaccgtggcaacatcgcgctcgctctctcggtcttcgaagccatgcggtccggtttcgcgggagttggaggctggaggtgggcaaggcctgatgtgaggacttatgcgttgcttgtacagcggttggcggccgccccgcgtgttgctgatgcaatcatgataattgattatgtgtctcgcgcaggtgcttcttctatggatgaggttcctttcggaatcattgttcgctgtccaacctgcatgatagcagttgctgttgtgcagcctcaggatggaactcaggttgtttcctgttcaaagtgtcgatatcaatatgaattattttctggagacattacgagtattgaatccgaagaagttagcatggatatttcagccctggagaaagccttgagatttattaatatgaggaaagatggtattccagctgctgtccactctattgtgatccgctcaccttcaggaacagcacgtacttacagatttgctacccagaatgtaactcttcctgctcaagaaggagaaagggttaccatttccttggcggccccagttaacgtttaccgtgacatgggacccctcaaggttgctgcgcgctcacaaggatttaaacctggagaacctatgtgtctcactaatcacatcaatgggcaagtctcgaagttgctaagagctccatcaaagaacaagggaacatttttccttagcccatatttattggtcggtgctcttgccttccttgcatctacagatgctgcttccgcattcattgacccaagtcttcctagacttgttacagcaactgccattgcatcagctgccataggaacaacactaaatggagtggtcctgccaaaaattcaaaagcttccagaaaaagcagtggatatagttgctgtacagcaaaagcttttgtctcagtatgatattcttcagagtcgtcttaaggaactgaaacagtttgctcaaaaagaggtgtggatgcttgcgcggatgtgtcagttggataacaagatagtagcagttggtgaaccatcttatcgtactagacgagatagagtaaagagggttcgggaaagcttggaaagcacactcctggcaaggattgagctaatggaaagttatgcaaaactgtgctcaatgatcgaaattgaagttgagatggactctgatgttatagctgctgaagcggcaagcagtgcagagagaatatctgagcagatacaacaattaatggagatcgatagtcttgaagagcaatggcgtatacaagctgaggctaatgatgaagcagaaaggcttcttagttcagattcctcagaaacatatcctgctggacgtgtaatttgaattgagaggcatcccagttcatccctggtacatggcgactctggaaactctccttgtcgaatggtgtgttcaaggaagttgcctggtgctccagcccaaaatccattccaaagaggcttgatctcaagattttggaaccattgatgatattgctgcggagggtctgcgtctgcgctgttcattatccaatccaataatagtaacgtcagtaaatatcttcgatcggccaggagatcaaccgttccccccttcaacactccgtagaaggacgacggtgaccgaagtaaacagcgaagatgtcggcgatccagaagaacgacccttgctggcgtcccatttgaaggctgtgcggctgggcccgtgtcagcggaccacctcggttgcagcgggcgggtcgaccgggttgccggttcatgcgcagttaactaacagaggggcggattacttgtggggcatggacatcccgggtcatcaaggcatatgcttgcttaatgggtcgtctagaaggccccctgatcatttgattggtgagccaactggaatggagcggttccattccagtttctaagaattaagtcatttcattctgtgtttggtaagcagaatggaactgttccattttttgtttggttgaagaatagaatagagcagagccgctccgtttattgtttggttggagagccatatgactgttaagtagaggagaggaatgagagcgctcgtgtccgcgagagcgctcgcgtccgatcgttttggtggagtgagagcatcccaaatatttactatttatagactgcaggagccgctccg

SEQ ID NO: 2678 - DNA, 2139 bp, Zea Mays
ctcacgcctcgcgcctcgttgcttcttatcctttatttttttccccaacccgtcgtcggctgccggctgcggcactctgggaggaaggccccaagcccttgccgccggagacgaaccgaaacgatggtgggcgccaatgaagtgggcgggctggagtgcgagcggaagccgctggcggaggtggtcggcgactgcgtccagcgctggttccaggacgcgtacaaggaggcgcgcaaaggcgacgtcgccaaccaagtgcttgtagcgcagatgttcttctcgggttatggaacccccaagaacgagtataagggaaaacaatggatggatagggcgtcaaggttcaggtcttcagctttgaaggatacaatgcaagtgactcggactccgatgatgcaaatgatgatgccaaccaatgacagtcagttacaaattgagttattattagttaggagattcacaggtcacggctgcaggtagcagaagacgctggaggcaggaaggccttgaatgccgcagtgcatgtgaacgaagagctttcctttgcaagttacgtttggctgctgacgggtgtgtgtccggaggtcgcggctgacaccacacgcacgtctgctggtcagctgcagctacatctatgggtccatagacgatcccgcaagtggttgaaaagaagatactaaacgacttgagggcgaccatgcctcttctcgacggcgttccaactacatccctagcaccctcattgcaagggatcacggtgctggagagcggctaatccttaggcacttcttcaggcccaaccttgtctatccatccaacattttccgacgaaggtttaggatacgttgtcacatgttcttgcagattatgcaatcaattcaactggtagatgactacttcacctagcgagttgatgctactggtttagccaatctcggtcctttccaaaaaaatgtgccacattgtgaatccttgcttatggtctaccatcatatgtagtggacgagtacatccagataggcaggttcactgctagagaatgcctcattcgatttatcgtgcactcataatagcctttagtgcatggtaccttaggatctcaaatgctaacgatattgctcgtatacttcatcaaagtgaggcacgtggattcctaggcatgctaggatcaattaattgcatgcactgggaatggaggaattgcctgatagtttggcgggggcagttttgttgtaggaacttgagtcctagtatgatcctagaggctatagccttttacgatctgtggatccgacatgctttctttaagatgtatggtaccaacaacgatattaacattctccaaatatcctcggtcttcaatcctttatggaggggcattatgccactggtggagtacaccttaaacgacacctcttataacatgggttatgatcttgttgatggtatctatccagattggctaatattcgttaaggcaattaggcacccatgggaagagaagaaagtctatttcacttaaatgcaagagagttgcaggaaagatgtggagcgagcttttggggttttacatgcacgttgtgttgttcttcgggatcctgcttttggttgggctcagaatcatcttggagaaagaatgacagcttgtatcataacacacaacatatttgtcgaggacaaggtcccacgtgcaagtaatgttgagtttgccgcaattggagtgcacgtggatctctcatcacaatccctgaagttcgtacagagtggctatgctcccaccacaacatcactagtctcaaatgatacaaccaacttcaacatgatctcatcgagcacttatggacttggcgtggagcaattggcgtaaaacccatgtgaagttatgtcgttttctatgatgttgtcctctatttgttctgtgttccattatgtttggttccctcaacctatgtattttatttcattatgtccaagtcatcattatgcttgttctaatgtttctttgtaatgaaccaattagttagctatgtgaacgaactatgcactctttttctattaatgtcactactggaaacaacttatttgccgagtgtctgaagcactcgacaaaggctttgccgagtgtgacactcgacaaag

SEQ ID NO: 2679 - DNA, 3460 bp, Zea Mays
atccgcccagtttattccgcccggtgtccacgtccactccctcgtcttcaacattccgcccagtttattccgcatcgatccggagattagggtttccgctcgccgccgatgaaaggcggccgcctgcaccgaccggagccgccgcagacccacctcgccatggcggcggcggccgcggcgcctcccatccccgcccctaaccccaccgatgactgggtggacggctcgtggacggtggactgttcctgcggcgtcacgttcgacgacggcgaggagatggtcagctgcgacgagtgcagcgtgtgggtgcacacgcggtgcgcacgctatgtccgcggcgttcacacatccttctcgtgccacaaatgccggaggtccaagcgcgtgccttcctccgctgacgaggccgaggttgctgagctcctcgccgagctgccaacccaccgcccgcctccgctgtaccgccgctgggccgaggtcccgctcccagcccgcgtccacgtccacgggcttcctggcgggggcgacggcgctcttttccgcggcgccccggccttttccgccgccctgtggcgctgcaccggctacgtccccaagagatttggcttccgctactgcgagttcccctcctgggccgacgataatgatggggctgatgctctttttgcgctggccagagagaagcccagggagatgacggatgatgttttgataagtactgaaccgaagaaggagaagcattatgtccgaagcctgagttgtcgtggcaagaagattgacagcaatcaacaagcaatgactcctctaaccaaggctaagaagagagagcctgatagttggaagaatgagtgtcagcagagtgagggctgtgggatacaagattccatttgcgatgatggtcacgctgaaactaatatggtcagttctgatttgctaactgctaaaaccaagaagaagatggaggaatccttggagccaagtggggagaataataactgtgagcaagttgagatttcgagtaaggatggcaaaaaggtgcccatgaagttggaggtctcatctggagttcaaactacatcatccattgtggaacaagaagtgcactcagggtttgttggggtagaggttacaatgtataagcaacagccagaagaggatcacattgtgtgctcaaggcctgacataacaagttcaggtcccatcaaagtgcaagacatacagggccttccaaagcaaccaaatcaagcttcaaatctgcaggttgttgctggtgtaccagatttacttattggtcagccaaaaccacagactattaaaactgagcctagttctcaggaaaacaaggcagctcactgtgtcgatttagtgagtgatgaccatgaaagcaataagcaaggcctaggggatgctgcagttctttcaatcgtccaaaaagattcatccaatttaaaatatggttcagtatcccatgaacatctgaaatcggaagcacaaaatccgaggcacacagttgctgagaatcctaactcaactttgggttctgcaaaagtttgtacatcgttttctggttctgtctctacaccacctgagttatcacactctctggcatctaaagaaccatcatcagggaatagtgattgttcaaagaaagaggagttgctctcaccaactgtcagcaaacatgatcccgtgaaattttctgaagatagttcccaggaagtgacaagatactctgagaaagttcaactaaaagactcacaaccttctgcaccaaaatcatctcaagctagtagaatacatctgtctacagtcaaacatagattaccggtgtcaaaggagcaatcacagaagatagccctcactggaggcacctcagcaagatcattccatggagaggtgccatcacttcagtctcgtaataaggcagcagcttgtagttcttcccagaaaaaggacaagatctaccagcgcatcattaatgtcacgcaagatagttccaataattcagcaccaaccgagctgcgtgcatctgattcggctgccccattgagtgatgagcagctcccccagagtaccgagggtgccacgttgccatcaagcagctggtgcacagatgcttcattcaactggatcatctgttttttctaagcggtattcatcacatggaggaagggatcatgcagcggttataaaaaagagaaacagagaagattcattaaaagatagcgaggacactaagaggacagaaaaaaggcatagagtttctagcacggagcatgctcctgtgaaaaactcgtgcagatcagctgaaaatatagcatcagaacagaaaattcgtggcatatgtccaactggagccaatgctggtttatcaaaggatgatttgatggatactattgtttcacacaatttacctggattgattgatgaaattgtcagtaaagacaggaatataacatatgtggaactctgtgatgctatccatcagcattttagggactcaaggaaatcgaatgggggagattctttgtatcgcagttatgcggatgccatcaaaggttgccttaggaagaggagggagtgggctcacctttttgaccaagcttcaaaaatgaattcaaataaaaggcgaacaggggaaagcaactcattgttacctgacgtaccggacgcagagaacataagaactggacctgatagggattcagaggggagtgctgatttgcatcaggataatctacctaggggcaaacgtaagtgtcggaaacgcaggcgacttgagctcaaaggtaggagagtcagggatacaaggaagagatccagcattgattcttcctcagaagatgctgctgcccccttgtctgattccagtagtgacagaaatagtaatcccagggacgacgagagcaaagaagataattctgttgcccaagaaattggcggttacatagacgctaagggtgcagcttcaagtacataatattcaactggtggtatatgcatatgactagaactgaatcttgtggtgaattttcaagttggtcagtgttcgatggatttctttatccatctacaaatctaggaccaaaaagaaaaatgggtactgcagtccgcatcaccaccagtcctttgaaagagcaggaaatggaggagtttgtctaacaaatctgttatgttcaacaatggtgtatatattattagtcagaatttagccttgcgctattatgatagaattagttgcctggtaaacagtggtaacaatgttgttttgtttatttaatgtatcgatggaccatcttatgtatgagtgaattaagtagacattttcgtgtcgagtatgataaattgttagattgctaggttaaataaatctgttcttgtttttgaccacttgtctattcgataaggcatgtaacctgtaatatgcaatccactagtattcaattgctgtggctcgttt

SEQ ID NO: 2680 - DNA, 1993 bp, Zea Mays
ctcctcattggatgtgtctttgcaagggaattatggttcaaattgtttggacaaattaatctacactaccttgctccgcaaccaggaactgcccaatgcaaggtcatgtttgaaatattttgagaatggtggggacactatcctgggttatagagcggttcaggttaattggaaagatctggactattgcaatgtttgtgatatggatgaggagtatgaagacaacttattcttgcaatgtgacaagtgtcgtatgatggttcatgctagatgttatggtgaacttaaacaattggatggaggactttggctttgcaacttgtgtcgaccaggtgcacctcgtgtgtctccaaaatgctgtctatgtccagtcacaggtggtgcaatgaaacctacaacagatggccgttgggctcatctcgcatgtgctatatggatccctgaaacatgcttaaaggatgtaaagagaatggaacctattgatggactgagcagaatcaacaaggaccgttggaaacttgtatgcagcatttgcggagtttcatatggagtttgtatacagtgttctcatcctacctgtcgtgttgcgtatcaccctctttgtgcacgtgctgctgacctttgcattgagcttgaaaatgatgacaaaatccatcacatgtatcttgatgaagacgaggatccttgtattcgtttactctcgtactgcaaaaagcatagacagccttctgctgctgaacgtccatctttagaaagtgatcctcctgaacccattcaggtagttcagacagatatggcttcatcatctggttgtgcaaggaccgaaccctataatttacacaggagaaggggccaaaagcagccacaagttgtcgctactgcttctctgaaacgtttatatgtggagaatagacctcatattgtcagtggctactgccaaaacagagtaggcaatacatgcggagaatcaattcaaccgtttggtttgtcagatgctgtgcagcaagaagctattggcaatgtgtcttctatggttgaaaaatatacaatcgtgaaggctacatttaggaagagactaacttttggaaaatcaaaaattcatggatatggtgtctttgccaaggttgcacacaaggccggagatatgatggttgaatacataggggagattgttagaccaccgatatcagacactagagagcggcgaatttacaactcactagtgggtgctgggacatatatgttcaggatagatgatgaacgtgttatagatgccactcgggttggaagtatagcccgtctgatcaatcactcatgcgagcctaattgctattcacgtgccataactattcttggagatgaacacatcatcatttttgcgaaacgggacatagatccatgggaagagctgacatatgattataggtttttttcaagtgatcaacgacttccatgtttttgtggattccccaaatgccgtggagtagttaatgatgttgaggcagaggaacagtcggctaaaatcagagttaagagaagtgaattatttgaaaaaagtgaaaagtaaaggtacatcatattggttgggatatgacatgcttgtgtgatatgcttgccagtgcctaaaggcaaattctaaaaaatggatcggcaatccaatttggggacataagttgaatcaattgtcgtgtaccattgaaatgttagttgttacacatatttcggccatttgagatggcctgccatgtgtaatgtaatcgaagtacatggttgcacttttcggtgttgcccatatattatccataacaatatgtagtttcagctgttctgcatttacgaaaatgcattggaagagaaacgtccacttcaactgaatgtattctacgaaatctttatttatgggtatccgtctgttgtgcattctaacctttgtgaatatagagcgtgtatcttatactccttaagtttcaatttacaatttgtttgacttgac

SEQ ID NO: 2681 - DNA, 1408 bp, Zea Mays
ccccgacagttgttgtgtgtaagaaaaatagggtttcagtggcggcagcctccactcacgccgccgtcgcctccgagccccactgcccgatccagacaaccaccccgcccagatccagatccacctgtactggatctcacagcctccgcttctgctttcctttatgtcgtcgaccgcgatgtcttgggacgggtacggcgggcagatctaccctggaggcggtgttccagcagcctgagacgaccccccttgcaggcgccgacgggggagatggagctgccgagcaacgctggcgacggcgaactcctgcccatggaggagcacaaggagcgcgcgctgcggcacctactccgccgatccaagcgcccgctggaggagttcgtggccgccgtggcagacgtcgcggagcagctgggcacacgtcacaccgggtggcaactggcagggcaatgcccgatcaggtctccgtcgtcgattcgtctgaacagctatcctcatcatattttaatgtctcgagcataatacggagtacatatctgtatttacgtcagcgttattgcaacgctctctctccgtggtctcttctacatactataatagtagtacattagtactaacaatgtggttggccatggcatgcttgcttcgagatcaacatgaacaatggaagcacaagtacgggaatccatgtagaaggtgatgaaaatcttgtatctgtaatggtttttgttcagatatcttctgattttgatggtttgcagtggattgttttccagcgtgaagattttccggtgccaattgccacggaataatgccttctactcagctcaacctccaaagcatgatggctctgacaaaccactctgtccaggagctcctgtatgccactggtgtggtacctggaaaggtgataaaatatgtagtagctgcaagaaagcaaggtactgttatgagaaacatcaggcactgcattggcgtactggtcataaaaatgattgcctccagataataagttctgttgcttcaaattcagttctgccagctgtaggaataggcaaattgaacagggatttgtttggcttccaaatggtttgttggtcctaaaatagtcagaatcacatgacatctgtgctatagatatggacctcggtggttttctccacattaggaaagctggaagagccttttgaactcagtttttttgctaacagtggtgttatggtgaaacagagttttgtgtgtatgtaccaacagataaaatgtaaacacgacattatcatagttgagtacaggaataattatctcgtatatcttattgcaaaatctgaaacagttctcctgtagatggttagcttgcattttacgctacattcgttattatgaaacagatggacgatttacgttaaaa

SEQ ID NO: 2682 - DNA, 1922 bp, Zea Mays
ccccgacagttgttgtgtgtaagaaaaatagggtttcagtggcggcagcctccactcacgccgccgtcgcctccgagccccactgcccgatccagacaaccaccccgcccagatccagatccacctgtactggatctcacagcctccgcttctgctttcctttatgtcgtcgaccgcgatgtcttgggacgggtacggcgggcagatctaccctggaggcggtgttccagcagcctgagacgaccccccttgcaggcgccgacgggggagatggagctgccgagcaacgctggcgacggcgaactcctgcccatggaggagcacaaggagcgcgcgctgcggcacctactccgccgatccaagcgcccgctggaggagttcgtggccgccgtggcagacgtcgcggagcagctggtgagcgcgtatctggacctgggcgtcgagtggcgcggcgcagactggcgggagcggttcctggccagtcgtacgatagcgcgagctcgatggccaggcgtaggtacccaactgtcttcttccccttccttttagattccattgagattcgtcagaacttttatgcgagttccttttttagccgataattatgtcagtatcttgagataagatggatgaattggattcaacacatatatatttgttgtggatgtagccacctttcttgcttcgtgaattatttgttgtggatgtaattccaatggaaaatatatattattgaggttagcttcagctgcgttccagttatatcgcagttactcctgcttttgggattgagctggcgttttggttatttagagtgttaatttgactcttttagttgcattatagggatctgacatcatttaaaataatttaggatgatttcattagtgatatgattctgaaaaatggtaaaggatgctttagtttcgtccagcataatttacctaataattttaggacactaaatttggttgagaattccaaaaatgagcttaaatcatgtgatcggtccgctagcatcacatagttgttgtcttcctgtcgtgcccatgtatgtatcttggaacaagtttgtgtgaccaaataatttgcatcagggcacacgtcacaccgggtggcaactggcagggcaatgcccgatcaggtctccgtcgtcgattcgtctgaacagctatcctcatcatattttaatgtctcgagcataatacggagtacatatctgtatttacgtcagcgttattgcaacgctctctctccgtggtctcttctacatactataatagtagtacattagtactaacaatgtggttggccatggcatgcttgcttcgagatcaacatgaacaatggaagcacaagtacgggaatccatgtagaagtggattgttttccagcgtgaagattttccggtgccaattgccacggaataatgccttctactcagctcaacctccaaagcatgatggctctgacaaaccactctgtccaggagctcctgtatgccactggtgtggtacctggaaaggtgataaaatatgtagtagctgcaagaaagcaaggtactgttatgagaaacatcagggatttgtttggcttccaaatggtttgttggtcctaaaatagtcagaatcacatgacatctgtgctatagatatggacctcggtggttttctccacattaggaaagctggaagagccttttgaactcagtttttttgctaacagtggtgttatggtgaaacagagttttgtgtgtatgtaccaacagataaaatgtaaacacgacattatcatagttgagtacaggaataattatctcgtatatcttattgcaaaatctgaaacagttctcctgtagatggttagcttgcattttacgctacattcgttattatgaaacagatggacgatttacgttaaaa

SEQ ID NO: 2683 - DNA, 2558 bp, Zea Mays
ctaaattctaaaccatatagatttcttaatcattcttcccatgtaatcccacggtattctctttataatcagattgtctgaactctgaaaaacttgtcagaaaaaatgaaacaaacaaaccttatgtatcatgggcgctcaagccagccgggaccctacaagcgcacggtaccgtccacgtgctagcgggtaccacttttcgtgatccaacaccagggctcacgggacccgtccacagttccgctcagcgcggtcgcttgacatgcaggcctcacgtgtcattccccaccgctcatatctccctctccgcctcggccgcttcccctccccgctccactcttccccgcgcgcctgtcccgttggccgcgaatggttctcgcgcgagtcctcccgctgcccgccccgtcgtccgcgccccaccgccgcttactcctgccgactcaggcggcgccggccccggcgcgtgtgctcaccgtgcgggccgtcgcctgccgcgcagcgaacgccatggcggccgttgctctggacccgcccgcggtcgctccgagccccgcagaggtcgcagccgtgggcgtcggggaggagctgccggaagggtacgatcagatgatgccgaccgtggagccgtcgcggaggcggcgcgccgggctgctgctgcatcctacttcgttgcggggcccgcacggcatcggcgacctcggggacgaggcgcttgctttcctgcattggctccgcgacgccggctgcacgctctggcaggttctaccacttgttcctccaggtaggacggctggggaggatgggtctccttattctggacaggatgccaactgtggcaatacccttttgctatcccttgaggagcttgtaaaagatggtctactgatgtcagatgaacttcctgatcctgtggatacagagtatgttgaatttgacactgttgcaaatctgaaagaaccacttattgcaaaggcagcagagaggctcctactaagccatggagagctcagaacacaatatgactgcttcaaaaaaaatccaaatatatcaggttggcttgaagatgcagctctttttgctgctattgacaaaagcatcaatgcattctcttggtacgagtggcctgaacctctgaaaaatcgccatcttggagccttggaagatatatatgaaaaacagaaggattttatagagacatttatggctcagcagttcttatttcaaaggcaatggcagcggattcgtaaatatgcacaaaagctgggtatcagcatcatgggtgacatgcctatatatgttggctaccatagcgcagatgtttgggcgaacaggaaatcatttttgctggacaaaaacggtttccccactttcgttagtggcgttccacctgatgcatttagtgaaacgggtcaactatggaacagtccattgtacgactggaaagctatggaagcagattgtttttcatggtggataaagaggattaaacgtgcccttgatttgtatgatgaattccgtattgaccatttccgggggcttgcgggtttttgggcagtcccttctgtgtagatgcaaaagtagcactggttggaagctggagggctggaccaaggaatagcttttttgacacgctcttcaaagctgttggtagaatagatataatagcagaagatctgggggtaattactgaagatgtcgttcagctaaggaaatccattggggcccctgggatggcagttctccagtttgctttcggaggtggttctgacaaccctcatttgccacacaaccatgaaatggatcaagttgtgtacactggaacacatgataacgatacagttcttggctggtggcaaaatttaccagaggaagaaaagaaaattgtgatcaagtatctaccagaagccgagaatattgacataacatggacactgattacggctgccctctcttccgtcgcgaggacttccgtggtaaccatgcaggacattcttggccttgacagttctgctagaatgaatactccagctacccagaaaggaaactggaggtggaggataccgagctctgttggcttcgacagcctcagccctgaagcagcaaagctgaaggagctgcttgcgctgtacaatcgacagtgaagtccgctattgccatcgaagttccttcaataaaataggcaacaaaatgtgagcggtttggttgccaagttctatggtacgcggccccgcacagaggttgtgttctggttggctggaaacttgcgtgcactgcaagttaagacttgaacatgaagcactattgtatgtgtgtgtattctcatttttttattaaccatttttttggtcgggtctatacaagtgttttccccccattgctttgcagcaaagcattaccaatttggatccgtttctttcaggtgacttagatttactagtgtagtgtaatgtaactcgaattcctttaggccgcgttcgttttggccggtttggcctattccgggcttggttccagactgaaagaaatgacccggtttggaatcggaccgtgtcttcgag

SEQ ID NO: 2684 - DNA, 974 bp, Zea Mays
ccccgccccactgctgcccattcctctcatcccagcgaacgaccctccagcacgccatccgcttagccgccccggagcattgccatcgtcgccatcgtcgccgccaccttctatcccggtgtggagcgggagagaacccgtctgcactcagaagctggtttaatccggtgggagcacaagtcgtgtctaaaatattcagattgctaagatgttgggtcatggtctagtaactgatccctcaagaaccttacgatgtccagttaattcaagggtatcaagtgcacccttggggcttgtttcttcgttgaatttcaacaggggatgcaagggaaagaacaaaatattcaatgtggatagacacaccaagtatagtacttctttctgttatgcgccaagaaatgccagaatcacaccactagcaactgcatcatttggggatatggctgattcttcaactcctatctttccccgaatccatgtaaaagatccatatcagcgtctcggaatcagcagggaagcatcagaagaagaaattcgagctgctaggaactatctgataagcaagtatgcaggccacaagccaagtgttgatgcaattgagtctgcccatgacaggattatcatgcagagtttctttgataggaaaaaaccaaaaatgaatctcaagaaaaaatttagggaacttagtcagtcacgtgcagtgaaggctattcaaggcagatttcaaacaccacgtagcaaagtcatttggcagacagctattgcttttgtcttgcttggagtgcttacccttgctttccctaccgaagaagggccaaccctccaggtggccatctcttgtgcagcaaatatctatttcatttatcagagggtcaaaagtggatggcgagcattcttttatggtggtcaatggtagagcttggacttaacaactaagcactttagtttggaaataaagcttattgtaaacatat

SEQ ID NO: 2685 - DNA, 995 bp, Zea Mays
ctttcctgtgcgcgaggatgcgccagcccgtccccgccccactgctgcccattcctctcatcccagcgaacgaccctccagcacgccatccgcttagccgccccggagcattgccatcgtcgccatcgtcgccgccaccttctatcccggtgtggagcgggagagaacccgtctgcactcagaagctggtttaatccggtgggagcacaagtcgtgtctaaaatattcagattgctaagatgttgggtcatggtctagtaactgatccctcaagaaccttacgatgtccagttaattcaagggtatcaagtgcacccttggggcttgtttcttcgttgaatttcaacaggggatgcaagggaaagaacaaaatattcaatgtggatagacacaccaagtatagtacttctttctgttatgcgccaagaaatgccagaatcacaccactagcaactgcatcatttggggatatggctgattcttcaactcctatctttccccgaatccatgtaaaagatccatatcagcgtctcggaatcagcagggaagcatcagaagaagaaattcgagctgctaggaactatctgataagcaagtatgcaggccacaagccaagtgttgatgcaattgagtctgcccatgacaggattatcatgcagagtttctttgataggaaaaaaccaaaaatgaatctcaagaaaaaatttagggaacttagtcagtcacgtgcagtgaaggctattcaaggcagatttcaaacaccacgtagcaaagtcatttggcagacagctattgcttttgtcttgcttggagtgcttacccttgctttccctaccgaagaagggccaaccctccaggtggccatctcttgtgcagcaaatatctatttcatttatcagagggtcaaaagtggatggcgagcattcttttatggagtgcagatgtagctacatggttggcagaccgtgtaggcaagtcatgcaggcgaagccacg

SEQ ID NO: 2686 - DNA, 1712 bp, Zea Mays
gcccattcctctcatcccagcgaacgaccctccagcacgccatccgcttagccgccccggagcattgccatcgtcgccatcgtcgccgccaccttctatcccggtgtggagcgggagagaacccgtctgcactcagaagctggtttaatccggtgttaattcaagggtatcaagtgcacccttggggcttgtttcttcgttgaatttcaacaggggatgcaagggaaagaacaaaatattcaatgtggatagacacaccaagtatagtacttctttctgttatgcgccaagaaatgccagaatcacaccactagcaactgcatcatttggggatatggctgattcttcaactcctatctttccccgaatccatgtaaaagatccatatcagcgtctcggaatcagcagggaagcatcagaagaagaaattcgagctgctaggaactatctgataagcaagtatgcaggccacaagccaagtgttgatgcaattgagtctgcccatgacaggattatcatgcagagtttctttgataggaaaaaaccaaaaatgaatctcaagaaaaaatttagggaacttagtcagtcacgtgcagtgaaggctattcaaggcagatttcaaacaccacgtagcaaagtcatttggcagacagctattgcttttgtcttgcttggagtgcttacccttgctttccctaccgaagaagggccaaccctccaggtggccatctcttgtgcagcaaatatctatttcatttatcagagggtcaaaagtggatggcgagcattcttttatgggtttggttctttctttgcttcctggttccttggcaccttcttgatggtatctgtaattccccctatactccccggtccaagaaacttggaagtgagcaccgcgtgtgttacttatgtgctccttttcatatcgtcgaccttcttgaagtaagagatctttgtgtttccatgttagcgcaaagtcttgcaggagttataaacatggtatcatgcttcaaatagcttgtacaatccatcggctttttctttgcttgtttcacgtttatggagctggaaatgctagttctttagtgagttgatagtagttttcaggttgcaatgtgagatgtagaacgtttttttgcctaggcccgtgatatcttgagcagggtctaacacctcttgtgggtattttcagttgatgtattaaatacagttgtgttcgaatagatcatatgagataatatctcatcagtcttcttttggatggacatcacgtcaccttggaacattacagtccgttctccctaatgctgatcgcgtttgcaagataggaactggagaagaataccttacttaggttgctacgcctgatctgtgatattggtatctctcgagttgttgcgtcagcattgtcgtctcataatgtgcagcctattagtgcactgttgattggcgaatcgtcgtctgcttcggctatccatttccattatctaaggactaaggagaaactggcctcggctgtggaaggccgtgacccagagccagtagtgtctggaacaattagtgcgactttactactaaatggggctttggtcattcgtcatttcctaattggattattaatcgcctgatcccttattgtactcattggaatatagtacatcacttgatttggtgtgagcgataatattaaggtgctgtttggttcacat

SEQ ID NO: 2687 - DNA, 816 bp, Zea Mays
gagcccattacacgtcccggttccaaaacgttccagtccctctcacaatccaccaacagcaaccacgtgtcgtgaatgcttttcccattcacgcacatccacccgccgccacgcatcgcacaaacgcgctcccggtccgaaaggcaaaccagccaccagtcccaccaccaccaccctctgtcttcgcctccgccttcttcgtcttcatgtctgaattcaggcaggagtatcaggcgctgcaccctggcaacaagagcgttgcgaccgtgagcaaggcagcaggggaaaagtggcgtgctatgtcagatcaagagaagcaaccatatgtggaccaagctggacagaagaagcaggactatgagaagactaaggcaaactttgataagaaggagagcacaagctcaaagaaggctaagactgaggatgaggatggctcgaagtcagaggttgatgacgaggatggcagcagtgacgaggaaaacgatgacgatgagtaaacagtctccaaggtcacgaggtgtttatgaaggggatctattagtttcgcgatgtcgttagtttagtgcattagcaaagaaaaagccgaatgctgctagctgttctgttgcttttcttttgctaaccacttgtgtcacaactttctgtacctgcttcattgattaatctagtgactagtcagttattggttcaatatttggtcttggttttatatatttctgtgttgcattctgtttgccctacggaagttgaggtgattcgttccttatgaatggtcaatagctgcttctgactcttcggtgaatttgtgactcggtt

SEQ ID NO: 2688 - DNA, 1364 bp, Zea Mays
ccggagggtggaccgtggaccctattcacccaattgaaaggaagaagcgctccctacccaccgcggttgccccctttcggcctttccccttctcgatcgaactcgggtccttcggcgacgtgcggatttttcgtccctcccgatgctcccggggtgcgtggattgactaccggtgttgatttggcgaggcaatcggcggggagggagggggttcattgtgaagctgaggtgagtatataggcataaagagagcatgaacactgttagtggtacaaagcgtgcaccaaggagacagtcgcaagatgggtctggtgataaactagtggtgatcgtggaagcaagctcccggggggtggggagccgtcgtggaccacatgcccctattcctggcgccctaaactcacccattgatgtggaggccatcgaagatgaagttcaggcagtatctccttcgcgagtgcccctgccaaggaggaacaggagaaccaggagggaacctataacagtggttgacttggaggttgaagctagccgggaagggagcaaacgccagagggttgaaccagtaggacgtcacctctatccagattggggagcaaggtctagcttgcagtcaaatgccgcacaaaccagcaaagagcctgccaaggaggtccccgaggaaccatcttttacctgcccaatatgttggaataagatggaggagccttccacgacgacttgtggccatgtcttctgcgacacgtgcatcaagcaggccatcaaggttcagaagaaatgccctacttgcaggaaggggctgaaaatgaatagtgttcatcgtatttaccttccgaacggttctagttaagctgagcagctttacatatctgatggcttgtaactttgggggcaattagcttaacctctgttatccgatacatgccgactggctttgtcaaagaaacttctggtaacgtaaggctgtgcaatgtactgtgaggatcagaaattcttagcctgaacaacagatagatgtttcatcccagtctgtattatttatcggcatcaccaggagttcatcatgagaacttcctgactagggaagtcgatatcagcctcagttttactctgcatccatggttcccagaatgttttgttaggatgtgaccataagatgatgcatataaccgtgcaaaacattattttgcaccctattatgtattatttatatcctattatgtattatttatatagtagagttgtaaaatataaatgatgagtaaagctgctgaagatagccttatatatattgggttattgtcttgggggattattgtaactgggatttgcttcgttctaaaacgataatagcgagttgaaat

SEQ ID NO: 2689 - DNA, 1382 bp, Zea Mays
ctgaagtgggcttgcttgctcggctgccccacttggcagggacgctgataatcacataagtcaccggagggtggaccgtggaccctattcacccaattgaaaggaagaagcgctccctacccaccgcggttgccccctttcggcctttccccttctcgatcgaactcgggtccttcggcgacgtgcggatttttcgtccctcccgatgctcccggggttcattgtgaagctgaggtgagtatataggcataaagagagcatgaacactgttagtggtacaaagcgtgcaccaaggagacagtcgcaagatgggtctggtgataaactagtggtgatcgtggaagcaagctcccggggggtggggagccgtcgtggaccacatgcccctattcctggcgccctaaactcacccattgatgtggaggccatcgaagatgaagttcaggcagtatctccttcgcgagtgcccctgccatgtattctgcagaggaggaacaggagaaccaggagggaacctataacagtggttgacttggaggttgaagctagccgggaagggagcaaacgccagagggttgaaccagtaggacgtcacctctatccagattggggagcaaggtctagcttgcagtcaaatgccgcacaaaccagcaaagagcctgccaaggaggtccccgaggaaccatcttttacctgcccaatatgttggaataagatggaggagccttccacgacgacttgtggccatgtcttctgcgacacgtgcatcaagcaggccatcaaggttcagaagaaatgccctacttgcaggaaggggctgaaaatgaatagtgttcatcgtatttaccttccgaacggttctagttaagctgagcagctttacatatctgatggcttgtaactttgggggcaattagcttaacctctgttatccgatacatgccgactggctttgtcaaagaaacttctggtaacgtaaggctgtgcaatgtactgtgaggatcagaaattcttagcctgaacaacagatagatgtttcatcccagtctgtattatttatcggcatcaccaggagttcatcatgagaacttcctgactagggaagtcgatatcagcctcagttttactctgcatccatggttcccagaatgttttgttaggatgtgaccataagatgatgcatataaccgtgcaaaacattattttgcaccctattatgtattatttatatcctattatgtattatttatatagtagagttgtaaaatataaatgatgagtaaagctgctgaagatagccttatatatattgggttattgtcttgggggattattgtaactgggatttgcttcgttctaaaacgataatagcgagttgaaat

SEQ ID NO: 2690 - DNA, 1887 bp, Zea Mays
ctttcctggacattgcattagcgcagtaaacaatgagaactgaataactcattgcctggtcactttcagggcaattcctacgatatagtttctgctttccagtgctatggagaatatgttagtggttcaatcactgatgagcaaagaaagaatgtgctccgcaattcatgtccaggggcaggtgcctgtggtggtatgtacacagcaaacactatggcatctgctattgagacattgggcatgagccttccatacagttcttcgacacctgctgaagacccgctaaagctagaagagtgccgtcttgctgggaagtatcttctagagttgctaaagatggatttgaagcccaaggacattataactgagaagtcattgcgaaatgcaatggttatcgttatggcacttggtggttcgactaatgctgttctgcatttgattgccattgctcgacctcaagcccagtggcaaatatgtcatggaagatctacataagattggtgggacaccggcagtcattcattatcttctggagcaaggtcttcttgatggtgattgcatgactgttactgcaaaaactctagctgagaatgccaaaattttccctcctttgtctgaagggcagcaaataattcgaccacttgacaatcctatcaaaccaactggccatattcaaatactttatggcaatcttgcaccagaaggttctgtagcaaaaataactggcaaagagggactatacttctcaggtcctgcattagtttttgagggtgaagagtccatgattacagctatctcagaaaacccagcaaatttcaagggaaaggtagtagtgatccgaggagaaggaccaaaaggcgggccagggatgcccgaaatgttgactccaacaagcgcaataatgggtgctggtcttggaaaggagtgcgccctgctgacagatggtagattttctggagggtcacatggatttgttgtcggtcacatatgccctgaagcacaggaaggtggtccaattggccttgtccagagtggtgatataatcaccatcgatgtaagtaagagggtaatcgatgttgaccttaccgaacagcagctcgaagaaaggcggaggaaatggaccccaccgccatacaagtcgaccagtggagctctttggaagtacatcaagcttgtggctccagcgtccagaggatgcgtcactgatgagtaggctgtgttacattctgttaggttgtgcacatgatgtgttttcaatcaaaggctgtttgccaggaacaaccatcctgttagagtgattcatgatagtgcggtttgcgtatggcaggtataataataaaatgccggtttctattagcttagcaatgctacagaagctgctgaataatcgagcgtaatatgtctgtttaagcttgtgagcaatcacatccttttcagtctctcacttgttttgtttgtcccattgtttctactaccttgttcacagagatgatcaattggattcttcttagtccaccatcggcgatcacttgagcatctggtctgcttaaatctttgctgagattctaaaaaacacgcatatcctgcccatgggagcagctaacaagttactgtttaactggagtagaagtgcaatgaaggtagtttaccagtgctacaaatctacaacagaacactcttgtagcttgtaacgtcggcgttgccacctgcattacttcatgaaaatgttcttcgaagttctcaatcaatcgttcaaataccaaatttaccgataatggatgaatataaaaacatattaaagggactagactagatgatttgtcccgcgagcaagacctatatctatattatataaacaccaactagtcggttgcccgtgtgttacga

SEQ ID NO: 2691 - DNA, 2538 bp, Zea Mays
ccgacttggattgtctcgttcgtcttcgtcatcgtcactcaacaactcgtctcatcgcgccgcatcgtttacctcaaggttgttttgttgcttccttgtcccgctctcaccagcaatcccgtcgatcacccagacctccacggcactgctccgtctcctccgttccgttccgaaccgcaagctcccaacccttccgcgatggacctcacctcgccgtcgcccgcggcgcgccgcgccgccgccatcgcgcgccacctcgccgcggccgccgcccccatcccggcgagcagccccctggaaccttcctgctgcctcagctacgtcccgccggagtccacggagcggccggcggcgtttgcgccggccgacctcaggcttctgctggacgggcacgacctgcccacgcgggactggctcttccgcgccatggaggagagcccccttttccgcagccggagttcgcggacgggatccagggtgttcgtggcgccggacttcaacgacggcaaggaagggcagcgggaggccaccatgcggcggatcgcgtacctgaatcggcgcggcgtgttccgcgggtggctcaccgaggacggcgctgccgccgagctccgcaaactagcgctcctcgactgcatcgccatctatgaccactctctcgccatcaagattggcgtccacttcttcctctggggcagtgccatcaagtttcttggaacaaagcgccaccatgacaagtggttggttgccacggaaaattatgatatcaagggttgttttgcaatgacagaactaggccatggaagcaatgtgcgaggaatagaaacaatagcaacttatgattcagaaacaagagagttcatcataaatactccatgtgaatcagctcagaagtactggattggtggagctgccaatcatgcaacacatacaatagtcttttgtcaacttcatataaatgggagaaatgaaggagttcatgcttttgtagctcaaattagggatgaagatggaactgtgttgcctaatatccatatagctgactgtggccataagattggactgaatggcgttgataatgggcggatttggtttcagaatatacgtgttcctcgtgagaacttgcttaatttggttgctgatgttttgccagatgggcgatatgttagcatgatagataatccagatcagaggtttgcagctttcctatctccgcttacacttggtcgagtaaacattgcagttaactcagtctacatttcaaaggtcagcctagcaattgctgtgagatacagtttgtcaaggagagccttttcaattgcaccagatgcccctgaaatgttgttgcttgactatcccagtcaccagcgacgccttctaccacttctagcaaaagtatgtctgatgagcagtgctggcaattttatgaaaaatatgtatgtaaagagaactcctgaaatgagcaaagacatacacatttactctagtgctctgaaggcgacactaacttggcagaatatgattacgattcaggagtgtcgcgaggcctgtggaggtcaaggtctaaagactgagaaccgcataggaattttcaaatctgaatttgatgtccagtccacatttgagggtgataacaatgtgctaatgcagcaggtaagcaaagcgctttatgctgaatttttgggtgcacaaaagaagcagcagccattcaagggattgggtttggaacacttaaatggctcgagccctgttattcctgataagctgacaagtagcatattaaggagctccaagttccagggagagagatttactgaagcagtttgtagaggaggtttctctccatcttgcacaaggcgaaagcagagaaaaggctttgatgctgagttatcaagttgctgaagacttggctagagcgtttactgagcgtacgatcctccaaatatttttggaggatgagatgaatgttccttctggttccctaaaggaggtactgggcttgctgagatctctatatgtcatggtgaacatagatgaatccacatcttttctaagatacgggcatttatcacgtgacaatgtagcccttgtgcggaaagaagtcctgaaactgtgcagtgaactcaggccccatgcgcttgctgttgttagttctttcggaatccctgatgccttccttagtccacttgcttttgactggattgaggcaaatgcactgtcaaccgggagccactgatctcaggtttccacatacgagccaggttatcctgtgaaagtactgaatattgatggcggggcatagataccgtataactacaggagcacttgttgtctcggaacaaattgttgtgaatcctgttttgtataatagttttcttgaatataagcgaacgtagcctaacaggccaaagtccatgtaatggggtttacaacagtaataacttgcagagtgatgtaagcgagttgttgagcagtaaataaaatactcttgtcccaaaatatagttctttttaacccattttttcctgtccatattataga

SEQ ID NO: 2692 - DNA, 2594 bp, Zea Mays
atactctgtatcattggcgcgatttctcggtttcttctgacacccgacttggattgtctcgttcgtcttcgtcatcgtcactcaacaactcgtctcatcgcgccgcatcgtttacctcaaggttgttttgttgcttccttgtcccgctctcaccagcaatcccgtcgatcacccagacctccacggcactgctccgtctcctccgttccgttccgaaccgcaagctcccaacccttccgcgatggacctcacctcgccgtcgcccgcggcgcgccgcgccgccgccatcgcgcgccacctcgccgcggccgccgcccccatcccggcgagcagccccctggaaccttcctgctgcctcagctacgtcccgccggagtccacggagcggccggcggcgtttgcgccggccgacctcaggcttctgctggacgggcacgacctgcccacgcgggactggctcttccgcgccatggaggagagcccccttttccgcagccggagttcgcggacgggatccagggtgttcgtggcgccggacttcaacgacggcaaggaagggcagcgggaggccaccatgcggcggatcgcgtacctgaatcggcgcggcgtgttccgcgggtggctcaccgaggacggcgctgccgccgagctccgcaaactagcgctcctcgactgcatcgccatctatgaccactctctcgccatcaagattggcgtccacttcttcctctggggcagtgccatcaagtttcttggaacaaagcgccaccatgacaagtggttggttgccacggaaaattatgatatcaagggttgttttgcaatgacagaactaggccatggaagcaatgtgcgaggaatagaaacaatagcaacttatgattcagaaacaagagagttcatcataaatactccatgtgaatcagctcagaagtactggattggtggagctgccaatcatgcaacacatacaatagtcttttgtcaacttcatataaatgggagaaatgaaggagttcatgcttttgtagctcaaattagggatgaagatggaactgtgttgcctaatatccatatagctgactgtggccataagattggactgaatggcgttgataatgggcggatttgaatatacgtgttcctcgtgagaacttgcttaatttggttgctgatgttttgccagatgggcgatatgttagcatgatagataatccagatcagaggtttgcagctttcctatctccgcttacacttggtcgagtaaacattgcagttaactcagtctacatttcaaaggtcagcctagcaattgctgtgagatacagtttgtcaaggagagccttttcaattgcaccagatgcccctgaaatgttgttgcttgactatcccagtcaccagcgacgccttctaccacttctagcaaaagtatgtctgatgagcagtgctggcaattttatgaaaaatatgtatgtaaagagaactcctgaaatgagcaaagacatacacatttactctagtgctctgaaggcgacactaacttggcagaatatgattacgattcaggagtgtcgcgaggcctgtggaggtcaaggtctaaagactgagaaccgcataggaattttcaaatctgaatttgatgtccagtccacatttgagggtgataacaatgtgctaatgcagcaggtaagcaaagcgctttatgctgaatttttgggtgcacaaaagaagcagcagccattcaagggattgggtttggaacacttaaatggctcgagccctgttattcctgataagctgacaagtagcatattaaggagctccaagttccagatggacctgttctgcttaagggagagagatttactgaagcagtttgtagaggaggtttctctccatcttgcacaaggcgaaagcagagaaaaggctttgatgctgagttatcaagttgctgaagacttggctagagcgtttactgagcgtacgatcctccaaatatttttggaggatgagatgaatgttccttctggttccctaaaggaggtactgggcttgctgagatctctatatgtcatggtgaacatagatgaatccacatcttttctaagatacgggcatttatcacgtgacaatgtagcccttgtgcggaaagaagtcctgaaactgtgcagtgaactcaggccccatgcgcttgctgttgttagttctttcggaatccctgatgccttccttagtccacttgcttttgactggattgaggcaaatgcactgtcaaccgggagccactgatctcaggtttccacatacgagccaggttatcctgtgaaagtactgaatattgatggcggggcatagataccgtataactacaggagcacttgttgtctcggaacaaattgttgtgaatcctgttttgtataatagttttcttgaatataagcgaacgtagcctaacaggccaaagtccatgtaatggggtttacaacagtaataacttgcagagtgatgtaagcgagttgttgagcagtaaataaaatactcttgtcccaaaatatagttctttttaacccattttttcctgtccatattataga

SEQ ID NO: 2693 - DNA, 2661 bp, Zea Mays
gagaaaacccatgaacgaccaaaggcttcaactgacaagctttgtcaaaccgttcttccataaaaaaaaactgttctcccctatcctcaaagaaacgtgtgccgagatgcaacctcacgctgactcggcgcatatactctgtatcattggcgcgatttctcggtttcttctgacacccgacttggattgtctcgttcgtcttcgtcatcgtcactcaacaactcgtctcatcgcgccgcatcgtttacctcaaggttgttttgttgcttccttgtcccgctctcaccagcaatcccgtcgatcacccagacctccacggcactgctccgtctcctccgttccgttccgaaccgcaagctcccaacccttccgcgatggacctcacctcgccgtcgcccgcggcgcgccgcgccgccgccatcgcgcgccacctcgccgcggccgccgcccccatcccggcgagcagccccctggaaccttcctgctgcctcagctacgtcccgccggagtccacggagcggccggcggcgtttgcgccggccgacctcaggcttctgctggacgggcacgacctgcccacgcgggactggctcttccgcgccatggaggagagcccccttttccgcagccggagttcgcggacgggatccagggtgttcgtggcgccggacttcaacgacggcaaggaagggcagcgggaggccaccatgcggcggatcgcgtacctgaatcggcgcggcgtgttccgcgggtggctcaccgaggacggcgctgccgccgagctccgcaaactagcgctcctcgactgcatcgccatctatgaccactctctcgccatcaagattggcgtccacttcttcctctggggcagtgccatcaagtttcttggaacaaagcgccaccatgacaagtggttggttgccacggaaaattatgatatcaagggttgttttgcaatgacagaactaggccatggaagcaatgtgcgaggaatagaaacaatagcaacttatgattcagaaacaagagagttcatcataaatactccatgtgaatcagctcagaagtactggattggtggagctgccaatctcaaattagggatgaagatggaactgtgttgcctaatatccatatagctgactgtggccataagattggactgaatggcgttgataatgggcggatttggtttcagaatatacgtgttcctcgtgagaacttgcttaatttggttgctgatgttttgccagatgggcgatatgttagcatgatagataatccagatcagaggtttgcagctttcctatctccgcttacacttggtcgagtaaacattgcagttaactcagtctacatttcaaaggtcagcctagcaattgctgtgagatacagtttgtcaaggagagccttttcaattgcaccagatgcccctgaaatgttgttgcttgactatcccagtcaccagcgacgccttctaccacttctagcaaaagtatgtctgatgagcagtgctggcaattttatgaaaaatatgtatgtaaagagaactcctgaaatgagcaaagacatacacatttactctagtgctctgaaggcgacactaacttggcagaatatgattacgattcaggagtgtcgcgaggcctgtggaggtcaaggtctaaagactgagaaccgcataggaattttcaaatctgaatttgatgtccagtccacatttgagggtgataacaatgtgctaatgcagcaggtaagcaaagcgctttatgctgaatttttgggtgcacaaaagaagcagcagccattcaagggattgggtttggaacacttaaatggctcgagccctgttattcctgataagctgacaagtagcatattaaggagctccaagttccagatggacctgttctgcttaagggagagagatttactgaagcagtttgtagaggaggtttctctccatcttgcacaaggcgaaagcagagaaaaggctttgatgctgagttatcaagttgctgaagacttggctagagcgtttactgagcgtacgatcctccaaatatttttggaggatgagatgaatgttccttctggttccctaaaggaggtactgggcttgctgagatctctatatgtcatggtgaacatagatgaatccacatcttttctaagatacgggcatttatcacgtgacaatgtagcccttgtgcggaaagaagtcctgaaactgtgcagtgaactcaggccccatgcgcttgctgttgttagttctttcggaatccctgatgccttccttagtccacttgcttttgactggattgaggcaaatgcactgtcaaccgggagccactgatctcaggtttccacatacgagccaggttatcctgtgaaagtactgaatattgatggcggggcatagataccgtataactacaggagcacttgttgtctcggaacaaattgttgtgaatcctgttttgtataatagttttcttgaatataagcgaacgtagcctaacaggccaaagtccatgtaatggggtttacaacagtaataacttgcagagtgatgtaagcgagttgttgagcagtaaataaaatactcttgtcccaaaatatagttctttttaacccattttttcctgtccatattataga

SEQ ID NO: 2694 - DNA, 2349 bp, Zea Mays
tcccctctcttgcctgcctccctccctccctccctccttctccatctccgctttccctcctcgcctaggcctagccgcccccgcacgccacgccacgccacgccacattcgcatctctggatccccctcccctcgccctctcccattacccgccgccgccgccgcctcgcgcccgcgacccacccggcctcccacttcgatcccgccccgattccctgcccccgccccgattccgattcgtcactgtatcgcgcgcgcgggtgggaagacagcgatggctcgtggcgggggcctctcgccccgccgcgggtgatctctcctctagcggggagccttcccgcgttcccaagcggaggatcccgtcgcagctggtgcctcacctatccctctccttcgcatctccgccgtgctctctcgcgcaccccctcgaccctaggtggtcggaacatttgccgatgtctcctatcgaaggctgccccactgtatttcaggctatttgcagtctgtctcctgggattcacgagtacaaattctttgtggacggggaatggcggcatgatgagcgtcaacctaccatatctggggagtttggcatagttaacacactttacttgacaagggaatataaccaaataaataccttatcaagtccaagcacacctggaagcaggatgaacatggatgtggataatgaaaattttcaacgtacggttacgttgtcagatggtaccgtttcagaaggtactctgagagtttcagaggctgcaatacaaatatctaggtgtcgtgtttctgaatatctgagtttgcatacatgctatgatttactcccagattctggcaaggttattgccctagacattaatttacctgtgaagcaatcattccatattctccatgaacaggggattcctgtagctcctctctgggactcattcagaggtcaatttgttggtctccttagcccattggatttcatactcatattgcgggagctagaaactcatggctcgaacttgacagaagagcagcttgaaacacacactatatctgcatggaaagaggctaagcggcaaactaatggaagaaatgatggtcagtggcgaccgcaacagcatctagtgcatgccaccccttatgagtccttgagggacattgcagtaaagcttttgcaaaatggcatttctacagtgccagttatttattcatcatcatcagatggatcattcccgcagttattgcatcttgcatcactttctggaattttgaaatgtatttgtagatacttcaaaaactcaactggtaatttgcctattctgaaccaaccagtgtgctccattccgctgggttcctgggttccgaaaattggtgatctgaacagtcgtccattggctatgttgcgacctaatgcatcacttagctctgcccttaacatgttggttcaagctggagtaagctcaataccaattgtggatgacaacgactccctgcttgacacttactctagaagtgacatcacagccctagcaaaagacaaggtctacacacatgttcggctggatgagatgaccattcaccaggctttgcagcttggacaagatgccaatacaccttttggattctttaacggccagagatgccagatgtgcctccggtctgatcctttgctgaaggtgatggagcgactggctaatcctggggtgcggcgggtgttcattgtggaagctgggagcaaacgtgtggagggcatcatatcactaagtgacattttcaagttcttgctgagcttgtgaggagaggagggcatggcggagtttttttaacagtagcaaccctctgggcctttgggtccttgcggataattggctatcgtcagggttcatggtctgtaaagttccttttttttttgtttcgttttttaccatttggcccctcccgcttgtataacctcaattaatataatggcaaccttcatttaatatgaggttacttgagggttacttgaaaaattacaagagatgttctttgcgaatagtctctttatacagagccttatacttgtaatatgcggttttttagctgtcccttgtatttagaaaattaatccgatgtctttggattgtatatgctcttagaacaattttaataatagcccacaacggattttataatgttgccatgtcacatatagttaaataaaagtctactcacataattttatgactaaacaacattttttttttgtcttcggtccgccatttacgttttggtctccatagtacggtaaggcatttttggtcatccgtgagtttttctgatcgattaggcattttaagtcttcggtctgcc

SEQ ID NO: 2695 - DNA, 1688 bp, Zea Mays
atggcgtccgatgccctcagcagattcacgtccgtacgtgcctgtcttgtctccctcgccaaccgcgaatacgactccgcgcccgctgaagccttcttcctatattgtgctactgtaggagctgctgcattcgccaagggaaacgcggccagtttgccagcacagcaccaacacggccctgccggcatcgtctttccggagctgctgcaatcggggagagaaacgcgaccagtttgccggcaccaacacggcctgctgccacatctccggcatcttcttccgttgttctttcaggtgcgccaaataacccctcctcttttctgactgctagtcagggttggggactgaaaactgtcgctgttagttggggttggggactctttcaggctgcagcaagcaactggacgatgatggcttccaggcagtcagagaacaatgcacaagaagaaacatcaccattgacgactcctaacgccaacatagccaggatcatcccttcgctgcccctcgagaccaggtggccaccgttccctctccgacggtacgccaatttttggctgcctgaggtaacattgaaggaaggcgtccccggcgttcattcctgcttcgagccgagacccaccgacgtgttcctcgcaagcttccccaagtctggcaccacctggctcaaggccctcgccttcgcgacgctgaagcgttccacgcatccgccgttcgacgacgaccatccgctgcgccattgcaaccctcatgactgtgtcaggttcctcgaacttggtttcaaccagcagaaggatgagctcgaggcgctcccgtccccgcgtgtgctggccacgcacctcccctactccctgctgcccggcagcatcaccggggacggagagcactcggggtgccgcatcgtgtacgtctgccgggaacccaaggacacgctggtctcctactggctgttcacgaggaaggcagcgcccgcttgtggggttgacgcccggtcgttcacgatccaggaggccttggagctgttctgtgatggccgctgtcccggcggcccacagtggaaccacgtcctccagtactggaaggagagcgtgaggaggcctgacagggtgttgttccttcgttacgaggaggtgctgattgagcccgaggcgcacgtcagaaagctggccaatttcatgggctgtggattctccgaggaggaggaggagcgcggggtggtgagcaccatcgtggagctgtgtagcctgggcaagctgagggacatggaggtcaacagaaatggaagcactaggcttgggaccaagaacgaaagcttcttcaggaagggagttgctggggactggagcaaccatatgacgccggagatggcgcatagcctagacaaggtcgttgaggatgcattgcaagagactggattcaccttttcgagcacaacatgatgagccactgcgctcatatagtagttgtgaactgcagaatgtcaagatcaattcgttttatcggtattgctggttggagatcatgggatcccggagatcataccagccatggtgagcattcttctttggtgatgaaggggaaattgatttgtgactattcatttgtataacatttttacaaaccatagtctttggcaccttggcatgccaaaatcatacgcattactatgtaaggttcgttttaaagcc

SEQ ID NO: 2696 - DNA, 3300 bp, Zea Mays
atggcgtccgatgccctcagcagattcacgtccgtacgtgcctgtcttgtctccctcgccaaccgcgaatacgactccgcgcccgctgaagccttcttcctatattgtgctactgtaggagctgctgcattcgccaagggaaacgcggccagtttgccagcacagcaccaacacggccctgccggcatcgtctttccgccgaatggacaggtgctctgctgcttcatcaagtaatatttacaggaggctaaagcaatatttacaggaggttaacaattagggttttggttgtggcaactgacaagtaagcaacaaaaattgcagccgggctctattcatcttacttgaaaatggattcagattagtagctcgcatgtaagacttttatgccttatgccaaactgctcggacagattaagaaatctagctcagaataacctgtgccataacttctcgctactattttcagttgagttggttagccgccttgaagagttggtaagtggagttggccaccttccggagcatcgcccgagatgctatcgggcgagtcggaattgcgctgcttgtccgaggttggcctcgggcgagccgtgaccgcgtctcccgcccgaggatggcctcgggcgagtggtgattgcgtgttccccccggggttggcctcaggcgagtcgtgactgcgtctcctgcccgagattggcctcgggcgattcgtgaatgcatctcctgccccgagcgttggccttggtcgagtcgtgacttaggtctctcgtgccttggtaaggttggtcccactcgagggctcgacccccttggggcatctcattgagtccttccttattcgatcctttattggccctttggttggtctcgccgaccaaagaggggcccgtggccaccccgtctgcccggttaccgcaggagaatgtgaggtacgacctttaacatgggcacgagcaaatgacctatatgccggtcacctagcttgcggctcaccggaagcctgctcggtccacccctcgctctacgtgagaagttggaggtgagttttgtttttttacctggtcgatatgaggtagttactgtggcggcgcggtaaaagatgtgaccgtcatgacatcgttcgacgtgggtggctttatgggacgcgagatatgaggtagttactgtgacggcgcggtaaaagatgtgaccatcatgacatccttcgacgtgggtggctttatgggacgcgaaacgactcgttcaccataccgtgcgcaggtggcgtgatggggtcggtgcagcgaccacctacttctcttcttcgagacgcgcaacagcgacgacaagtcactctggctcgggccacaaacgggaggaagcgaggagttagaggagggaacacggtggagaatggaagtcgacgagaaggggaagggatgccacctgggcagtaggggcacgcgcctccctcggcgtgacgacggatgccacaatggatagtgtcgctcgacgatggggatggcgtcggcgtcactagggccggggcaggcgtagacgacccgctgtgtctgcaggggtgagggggaggggctcttcgtgacaggcattatgggggtgcgtggcggatgagggcgggcagcatggagatctaagaggtaggagagtgggagagacgatcatacgaacgtggggtggacgagacgatcatacggtcatggtaacgtggggtggacgagacgatcatacggtcatggtagcgtgggggcgtagtcatgtatcaccagacaacctctaggccacagcagaggccatctacccgacaacctcaccagatccacgcggtcttattacctgacctgcctgtctcgccgatcgcgagtacacgacgccgcgcccgcggaatccatcttctccatctccaactgtgctactgtaggagctgctgcaatcggggagagaaacgcgaccagtttgccggcaccaacacggcctgctgccacatctccggcatcttcttccgggttggggactgaaaactgtcgctgttagttggggttggggactctttcaggtgcgccaaataacatctccggcaaggatcggctgcagcaagcaactggacgatgatggcttccaggcagtcagagaacaatgcacaagaagaaacatcaccattgacgactcctaacgccaacatagccaggatcatcccttcgctgcccctcgagaccaggtggccaccgttccctctccgacggtacgccaatttttggctgcctgaggtaacattgaaggaaggcgtccccggcgttcattcctgcttcgagccgagacccaccgacgtgttcctcgcaagcttccccaagtctggcaccacctggctcaaggccctcgccttcgcgacgctgaagcgttccacgcatccgccgttcgacgacgaccatccgctgcgccattgcaaccctcatgactgtgtcaggttcctcgaacttggtttcaaccagcagaaggatgagctcgaggcgctcccgtccccgcgtgtgctggccacgcacctcccctactccctgctgcccggcagcatcaccggggacggagagcactcggggtgccgcatcgtgtacgtctgccgggaacccaaggacacgctggtctcctactggctgttcacgaggaaggcagcgcccgcttgtggggttgacgcccggtcgttcacgatccaggaggccttggagctgttctgtgatggccgctgtcccggcggcccacagtggaaccacgtcctccagtactggaaggagagcgtgaggaggcctgacagggtgttgttccttcgttacgaggaggtgctgattgagcccgaggcgcacgtcagaaagctggccaatttcatgggctgtggattctccgaggaggaggaggagcgcggggtggtgagcaccatcgtggagctgtgtagcctgggcaagctgagggacatggaggtcaacagaaatggaagcactaggcttgggaccaagaacgaaagcttcttcaggaagggagttgctggggactggagcaaccatatgacgccggagatggcgcatagcctagacaaggtcgttgaggatgcattgcaagagactggattcaccttttcgagcacaacatgatgagccactgcgctcatatagtagttgtgaactgcagaatgtcaagatcaattcgttttatcggtattgctggttggagatcatgggatcccggagatcataccagccatggctagagatgtcaatggaagaccagtcggtcacgccgacaggcacacgc

SEQ ID NO: 2697 - DNA, 1479 bp, Zea Mays
tgaagtgacctataatttggaaaggagagggaccggactgcttgcatatggaaactccctaatctagtgttctctgttgcccttaaggggcacaaaagaggaatctggtcagttgagttttctcctgttgaacaatgtgtcatgacatcctcgggtgatagaacaatcaaaatatggtccgttgctgatggctcttgtttgaagacatttgagggtcatacatcaagtgttctgcgagcgtctttcctttcacgtggaactcaagttgtttcttgtggaagtgatggtctagtgaagctatggacaattaagacaaatgaatgcattgctacttatgataagcatgatgggaaggtctgggcattggctgttggcaggaaaactgaaatggttgctactggtggaaccgatgctgtcctcaatctgtggcatgattgcaccatggaagataagcaggaagatttccgtaagaagggatctatacacgcctatgtcactgtcaggcatctgcaacactctaaaactcatcagtgttgcaggagcaagaagttttaagaggccaggaattggaaaatgctgtgtcagattctgactatgcaaaggcaatacaacttgcatttgagcttagaagaccacacaagcttctagatttattctcacagcttgccaggcgagctgacgcagaggatccaatagaaaaggctcttcttggtcttccaaaggatggccttcgtgtgcttctagagtacgcccgtgaatggaatacgaagcccaagttctgtcatgttgcgcagtttgtgctttttcgggtattgaggagtttctctcccactgatatcctggagataaagggcatcagtgagctcctcgagggccttattccgtattcgcagaggcatttcagcagagtggacagactagtccgaagcacgtttctgttggactatacgctgacgcgaatgtccgtggtagacccagatgtggatgcggggtcaatcaaagacgaaatgaatggttcgtctgtggagaacggtgaacttgcagagcctcggcctgcttcacctgtgccagagaagtcaagcaagaagagaaaatctggcaaatcaagtaaaaagggaaaggagaaggtgatgaagcttgcctcgagtggacttggcaagggtgtttctgttgaagcctgaaaatctagctgagaatctggttttgcttatgcatgcatgcatccaattttgtagcagctgttgaaactgacgttgcccaacgcacgaatcacatttgatgtaaatgcagttttttgctgcgtttattagaaggccgcagcgcatttaatgcattggagtgtatgatttgctatcaaaatttggcacgccaaaggttttgataagccaaagttgctaaaagttgggcaaaatatgttatatagatatagcaagccaaatgtggcaagtttttgtgcgaaccaaatagctagcaaaaagc

SEQ ID NO: 2698 - DNA, 3129 bp, Zea Mays
aaaaaaaaaaaagttgttttgctgctggcgggacacgcttcgggcgcgacagtcgtcaccccgctttcccctactggatccagccacttgacttcgcttaaaccctgatcctcttcctccctctcctccggtcctcccgcgccgccacccccatctcccaccgcaaaaccttaggtccgacgagcccccgccgttgccgtgggcgccagaagcagccatggcttcgagttcgacgtgtgttcttaagaagaactaccgctgcgaccgctccctgcagcagttttacactggtgggccctttgcggtcgggcttgcccccggcggcgatggcgagggcggcgccgaggctgaggccttcctcgcatgcgcctgcggtggagaggtgcgcgtggtgtcctccgcggacgcctctgccataggggagcccgtcgacggcgactcggaggccatcaccgcgctggcgctgtcccccgactcacggctcctctttgccgcggggcacagcaggcttattagggcctgggacctcgcgtcccgagcttgcatacgcagctggaagggacatgatggtcctatcatggccatggcatgccatgtttctggtggtttgcttgcaactgccggagcagacaagaaggtctgcgtatgggatgtggatggtggattttgcacccatttccttagaggccatacaggggttgtgacatccgttatgttccacaaagatccaaagcgccttctgttgttttcaggaagtgaagatggcaccgtgcgagtgtggaaccttgaaactaaaaaatgtgttgctgtgcttaaagagcatttttcagcagttacttcattggcattgtctgatgatggacaaacattgctgagcgctgggagggataagattgttaccgcgtgggatattcgtaaatacagctcaaagaagacaataccgacatatgaaatgatagaagctgtttccttcattggaccaggaagtgagtttttggcttgtttgggcatagaactggcaaacaaaaaggagaaagatactgcttatttccttacagttggtgaacgtggggtcgtgcgcatctggtgcttggagagagaacaaggaaacaaggaggggctttacatctgctgttatgttgccaaatgaacaaggattgctatgtgttactgctgatcagcagtttttgttctattgtcccaaaaggactgatgatgggacctttgaactgtccctatatagacgactaataggttataatgatgagattcttgacttaaagtttattggggaggaggaacaatatcttgctgtagctaccaacttggagcaggtccgtgtttatgatgttgcgtcaatgtcatgttcttatgtgcttgctggccacaccgaaataattgtttgcattgacacatgtgtctctgcttccgggaagacacttgttgtaactgggagcaaggataacactgtgaggttatgggatgctgaaagaaaaagctgtattggcattggcaaaggccatctgggagctgttggttctgttgccttctcgaagaaaacaaaggacttttttgttagtggcagcagcgatcgaaccatcaaggtatggacctgggacaacacacttggtgatgctgaggatgaagtccctcttaaagcaaaggctgttgtagctgcacatgataaagatattaattatctgacagtttcacctaatgatggtcttgtttgcagtggttctgaggaccggactgcttgcatatggaaactccctaatctagtgttctctgttgcccttaaggggcacaaaagaggaatctggtcagttgagttttctcctgttgaacaatgtgtcatgacatcctcgggtgatagaacaatcaaaatatggtccgttgctgatggctcttgtttgaagacatttgagggtcatacatcaagtgttctgcgagcgtctttcctttcacgtggaactcaagttgtttcttgtggaagtgatggtctagtgaagctatggacaattaagacaaatgaatgcattgctacttatgataagcatgatgggaaggtctgggcattggctgttggcaggaaaactgaaatggttgctactggtggaaccgatgctgtcctcaatctgtggcatgattgcaccatggaagataagcaggaagatttccgtaagaaggagcaagaagttttaagaggccaggaattggaaaatgctgtgtcagattctgactatgcaaaggcaatacaacttgcatttgagcttagaagaccacacaagcttctagatttattctcacagcttgccaggcgagctgacgcagaggatccaatagaaaaggctcttcttggtcttccaaaggatggccttcgtgtgcttctagagtacgcccgtgaatggaatacgaagcccaagttctgtcatgttgcgcagtttgtgctttttcgggtattgaggagtttctctcccactgatatcctggagataaagggcatcagtgagctcctcgagggccttattccgtattcgcagaggcatttcagcagagtggacagactagtccgaagcacgtttctgttggactatacgctgacgcgaatgtccgtggtagacccagatgtggatgcggggtcaatcaaagacgaaatgaatggttcgtctgtggagaacggtgaacttgcagagcctcggcctgcttcacctgtgccagagaagtcaagcaagaagagaaaatctggcaaatcaagtaaaaagggaaaggagaaggtgatgaagcttgcctcgagtggacttggcaagggtgtttctgttgaagcctgaaaatctagctgagaatctggttttgcttatgcatgcatgcatccaattttgtagcagctgttgaaactgacgttgcccaacgcacgaatcacatttgatgtaaatgcagttttttgctgcgtttattagaaggccgcagcgcatttaatgcattggagtgtatgatttgctatcaaaatttggcacgccaaaggttttgataagccaaagttgctaaaagttgggcaaaatatgttatatagatatagcaagccaaatgtggcaagtttttgtgcgaaccaaatagctagcaaaaagc

SEQ ID NO: 2699 - DNA, 3195 bp, Zea Mays
aaaaaaaaaaaagttgttttgctgctggcgggacacgcttcgggcgcgacagtcgtcaccccgctttcccctactggatccagccacttgacttcgcttaaaccctgatcctcttcctccctctcctccggtcctcccgcgccgccacccccatctcccaccgcaaaaccttaggtccgacgagcccccgccgttgccgtgggcgccagaagcagccatggcttcgagttcgacgtgtgttcttaagaagaactaccgctgcgaccgctccctgcagcagttttacactggtgggccctttgcggtcgggcttgcccccggcggcgatggcgagggcggcgccgaggctgaggccttcctcgcatgcgcctgcggtggagaggtgcgcgtggtgtcctccgcggacgcctctgccataggggagcccgtcgacggcgactcggaggccatcaccgcgctggcgctgtcccccgactcacggctcctctttgccgcggggcacagcaggcttattagggcctgggacctcgcgtcccgagcttgcatacgcagctggaagggacatgatggtcctatcatggccatggcatgccatgtttctggtggtttgcttgcaactgccggagcagacaagaaggtctgcgtatgggatgtggatggtggattttgcacccatttccttagaggccatacaggggttgtgacatccgttatgttccacaaagatccaaagcgccttctgttgttttcaggaagtgaagatggcaccgtgcgagtgtggaaccttgaaactaaaaaatgtgttgctgtgcttaaagagcatttttcagcagttacttcattggcattgtctgatgatggacaaacattgctgagcgctgggagggataagattgttaccgcgtgggatattcgtaaatacagctcaaagaagacaataccgacatatgaaatgatagaagctgtttccttcattggaccaggaagtgagtttttggcttgtttgggcatagaactggcaaacaaaaaggagaaagatactgcttatttccttacagttggtgaacgtggggtcgtgcgcatctggtgcttggagagttgtctttgcgtatttgagcagcaaacatctgatgtaactgttaactcagagaacaaggaaacaaggaggggctttacatctgctgttatgttgccaaatgaacaaggattgctatgtgttactgctgatcagcagtttttgttctattgtcccaaaaggactgatgatgggacctttgaactgtccctatatagacgactaataggttataatgatgagattcttgacttaaagtttattggggaggaggaacaatatcttgctgtagctaccaacttggagcaggtccgtgtttatgatgttgcgtcaatgtcatgttcttatgtgcttgctggccacaccgaaataattgtttgcattgacacatgtgtctctgcttccgggaagacacttgttgtaactgggagcaaggataacactgtgaggttatgggatgctgaaagaaaaagctgtattggcattggcaaaggccatctgggagctgttggttctgttgccttctcgaagaaaacaaaggacttttttgttagtggcagcagcgatcgaaccatcaaggtatggacctgggacaacacacttggtgatgctgaggatgaagtccctcttaaagcaaaggctgttgtagctgcacatgataaagatattaattatctgacagtttcacctaatgatggtcttgtttgcagtggttctgaggtaagattttagcaaggaccggactgcttgcatatggaaactccctaatctagtgttctctgttgcccttaaggggcacaaaagaggaatctggtcagttgagttttctcctgttgaacaatgtgtcatgacatcctcgggtgatagaacaatcaaaatatggtccgttgctgatggctcttgtttgaagacatttgagggtcatacatcaagtgttctgcgagcgtctttcctttcacgtggaactcaagttgtttcttgtggaagtgatggtctagtgaagctatggacaattaagacaaatgaatgcattgctacttatgataagcatgatgggaaggtctgggcattggctgttggcaggaaaactgaaatggttgctactggtggaaccgatgctgtcctcaatctgtggcatgattgcaccatggaagataagcaggaagatttccgtaagaaggagcaagaagttttaagaggccaggaattggaaaatgctgtgtcagattctgactatgcaaaggcaatacaacttgcatttgagcttagaagaccacacaagcttctagatttattctcacagcttgccaggcgagctgacgcagaggatccaatagaaaaggctcttcttggtcttccaaaggatggccttcgtgtgcttctagagtacgcccgtgaatggaatacgaagcccaagttctgtcatgttgcgcagtttgtgctttttcgggtattgaggagtttctctcccactgatatcctggagataaagggcatcagtgagctcctcgagggccttattccgtattcgcagaggcatttcagcagagtggacagactagtccgaagcacgtttctgttggactatacgctgacgcgaatgtccgtggtagacccagatgtggatgcggggtcaatcaaagacgaaatgaatggttcgtctgtggagaacggtgaacttgcagagcctcggcctgcttcacctgtgccagagaagtcaagcaagaagagaaaatctggcaaatcaagtaaaaagggaaaggagaaggtgatgaagcttgcctcgagtggacttggcaagggtgtttctgttgaagcctgaaaatctagctgagaatctggttttgcttatgcatgcatgcatccaattttgtagcagctgttgaaactgacgttgcccaacgcacgaatcacatttgatgtaaatgcagttttttgctgcgtttattagaaggccgcagcgcatttaatgcattggagtgtatgatttgctatcaaaatttggcacgccaaaggttttgataagccaaagttgctaaaagttgggcaaaatatgttatatagatatagcaagccaaatgtggcaagtttttgtgcgaaccaaatagctagcaaaaagc

SEQ ID NO: 2700 - DNA, 4475 bp, Zea Mays
cgcgcgcatgcatgcgcattgcgattgcgatggatcatcgtcaagacgccggcgatggcgaggaggagcgccagcagcagctgggtgatctggagaccgacaaggaaccggtgcagaagcaagggcagctatcgccgtcgtcctcgtggcgggctgcggcggcggccagcatcagggagagcctatcccgctcgctctcctctctcagccaccagcaggaggagaaggacgacgacgaggtggagctgaggtgggcggccgtcgggaggctgcccaccatggacaggctccacacgtcgctgcagctccacgcgggccagcggcaggtggtggacgtgcgcaggctgggcgcggcggagcggcgcatggtggtggacgccctcgtcgccaacatccaccgggacaacctccgcctgctccgcaagcagcgccagaggatggaccgcgtcggcgtccgccctcccacggtggaggtgcgctggcgcgacgtccgcgtcgaggccgagtgccaggtggtgcatgggaagccgctccccaccatctggaacgccgtcgtctccggcctctcttcggtgagcaccatggtgggcctgaaccgccagcgagaggccagggtgcgcatcctccacggcgtcagcggcgtcgccaagccttccaggctgacgcttctcctgggcccccctggctgcggcaagaccacactcctcaaggcgctcgcggggaagctcagagccaccggtctcaaggtgacaggagagatagagtacaacggcgtggagctcaacaatggcttcgtcccggagaagacggcggcttacatcgaccagtacgatcttcatgtccctgagatgactgtcagagagaccatcgacttctctgcaagattccaaggcgttggcaacagagctgagatcatgaaggaggtgattagaagggagaaggaggccgggattacccctgaccctgatgtcgacacttacatgaaggcgatatctgtggaaggtttagaaaggagcatgcaaacagactacattatgaagattatgggacttgacatatgtgctgacataatggtgggtgatgcaatgagaagaggcatttcaggcggtgagaagaagagacttaccacaggagaaatgatagtaggaccctcaaaagcactcttcatggatgaaatatcaactggattggatagttccaccacatttcaaattgtttcttgccttcaacaattggctcatatctcagagtctactatactagtctcacttcttcaaccaacaccagagacatatgagctttttgatgatattattttgatggatgaaggcaaaattgtataccatggacctaagagttgcattatgggtttctttgaatcatgtggattcaagtgccctgatagaaaaggcgccgctgactttcttcaagaggtattatccaaaaaggaccaacaacaatattggagccatagtgaagaaacctacaattttgttaccattgaccagttatgtgacaagttcagagtgtctcaaattggtcagaaccttgctaaggagatttcaaagccttgtgataaatcagaagggcttaaaaacgccttgtcttgtagtatctattcattgtccaagtgggaacttctcaaagcatgttccgcaagagagcttctcctcatgaaacggaatgccttcatctacataggaaaatctgttcagcttgcacttgttgccgcaattacagggacggtatttttgcgcacacatatgggcgttgatatagttcttgctaactattacatgggttcactcttctatgcactcctcctactgatggtgaatggattccctgagctttccatggcagttatcagacttccggtcttttacaaacaaagagactactacttctatcctgcatgggcttatgcagtgccagcttttatcctaaaggttccaatctctttagttgagtcaatagtttggacatcattatcttactttctcattggctatactcccgaggcatccagattttttcgtcaccttcttatcctcttcttgattcacactggagcattatcgatgtttagatgtgtcgcctcttactgccaaacaatggtggctagcatagtgggtggtacaatggcacttctactcatccttctattcgggggtttcatcattcctcgttcatccatgcctaattggctggaatggggattttggctttctccattatcgtacgctgagatagggttagctgaaactgagttcttagcaccaagatggctaaagttgacagcatctggtgtgacacttggaaggagagtattactggatagagggttgaatttctcagtcaacttctactggatttcaatcggagcattgattgggtttatttttttatgtaatataggttttgctattggcttgacaattaaaaagcctccaggaacttcaagagcaattatttcttatgataagcttagcagacttaatagaagagaccagtgtgtgcttgtggatactaaagatgggataaataagcaacaagaaaattcatctgctcgtagcgggactggaagggtggtattaccttttgtgccccttgcagtatcatttaaagatgtgaactactatgtagatacacctgcggaaatgagggagaaaggatacatggagaaaaaacttcaactactccacaacatcacaggagccttccagccaggagtcctttcagcactcatgggggttacaggggcagggaaaacaaccttgcttgatgttcttgctgggaggaaaactggtggtgttattgaaggagatataagagtaggaggttatcctaaagttcaggaaacttttgctaggatctcaggttactgtgaacaaactgatattcactccccgcaaatcacagtgggagagtcagttgcatattcagcctggctgcgccttccaacagaaattgactccaaaacacgagatgaatttgtcaatcaagttcttgaaacaattgagttgactgaaataagagatgctttggttggaatgccaggaataaatggactctcaacagagcaacgaaagcggctcacaattgcagttgagcttgtatccaacccttcagtcatattcatggatgagccaacatccggcttggatgcaagagccgctgctattgtcatgcgtgcggtgaagaatgttgcaaatacaggcagaacagttgtgtgcacaattcaccaaccaagtattgaaatatttgaggcatttgatgagctaatgttgatgaaaaggggtggacagttgatctatgctgggccgctgggataccgttcatctatactcatcaaatatttccaggcaatacctggggtaccaaagatcaaggacaactacaacccatcaacatggatgctagaagttacttcaacatctttggaagctcaactaggactcgattttgcacaagtttacatggactcatcaatgtacaaacatgaacagcaaagtctattcaatatattgggatgcatgtatggcaccactatattttctggcatcaacaactgtcaatcagtgatgccattcgtttcgattgagcgatctgtcgtgtacagagaaaggtttgcaggaatgtactctccttgggcttactccttggcacaggtcactatggagattccttatgtgcttgtgcaaatagtgttgttcatgttgatagcttacccaatgatagggtatgcatgggaagcagcaaagttcttctggttattgtataccatgttctgtacactgctctacttcctctatcttggaatgttgatggtgtcggtcactccaaacatccaagtggcatccatattaacatctttgttctacaccatacaaaacctcatgtctggattcattgtgcctggtccacaaataccaaaatggtggctctggttgtactatacatctcccatgtcatggacactcaatgtattcttcaccacccagtttgggtatgaagatcaaaagaagattgacgtatttggggagaccaaatctgttgcagcattccttaaagactactttggtttcaaacgtgaattgctaccactgtcagctatagttctagcagccttcccaatattctttgccgctctattcggttacagcatttcaaaactaaactttcaaaggagataaattagtaaacaatcaaaagcaaaatagtgcttgcatagtgcaacatataaatttatgcacatgtatttacaaaaagtaaattttgttttgccctctgatacaaaaggtcaatattatgtacattagatatgtgctacactgctaattattagcttgtgtttggaataagtggttgagtaacaaacaatgcatatagaatggaatgtattatgtggcatgtataaaatacaaattgtattcatcatatgtaattgcttgaaatatatttctcttcatttc

SEQ ID NO: 2701 - DNA, 934 bp, Zea Mays
ttcaagggtcacagcttatgaataaaacgaacatcataggaatcaaggggtaaaccgccctcaagggttgaattggaagcagtggaaaataatttcagaggcattcctctgaagtatgctcatgtggataatggacgggtcagctttctctcctttgatgaagttacactccccagcttgccctgatgggtagcagcagaacatgtgaagtgataaatagtgtgtttggtttgaggaatgaagtgatccatcttcttctcactcctcacttttttatttggtttgtggaatagaatgggttgatctatcatcactccatttctcataagctaataattagtatatacatgatgagtgggttgattccaccaaaattgatggaatgaacttatgatgcatcatctcatgaaacatagagtgactccataaaccaaacgcaccaaaagggtctgagcttcagaacaatcttgtcagaaatgataaagggtctcagcttcagaacagtgtcttgagatgcattcgccgcaagcgcagggggggcaaagtatttcagtactaacttttgaacatactaaagtatggaattccctggagtctcacaatccagcgatctgttgtacactccagattgtatgttggaaggagaaatcatgtctagtcttcttgttcgtctctgatgattttgtttctgaggctgcacctgtgactttcggatttccaactgcaacaaatgctactctcttcctagttcctagcctcaggcttcaggtgctcgcgagtactgagggtgtcaggcactgaacaaacaccgctttcactttctagttgcctccccgtctgagaatctccggcatcattgcagtagatcattttatctggttgctccgctagagcaacgtctggttggcgagttcgctccttttagacttttcat

SEQ ID NO: 2702 - DNA, 1482 bp, Zea Mays
gaaaggactgccctaacctcgtgcagtcgtgcccgcttgtttcacttgctcgccttcacccctcgccgccgccgtcgccgccgtcgcaagcgacgatgctcgacatcaacttgttccgcactgacaagggcggcaacccggaccttattcacgagtcccagtgcagtcggttcgcctccgtcgagctcgtcgacgaggtcatcgccctcgacaaggcatggcgcgaaaggcagttcgagctggataagatccggcaggagctcaacgctaccagcaagaagatcgacaagctcaaagctagcaagcaagaagaggaagcaaagaagctcatggaaatttagttggcaaacaataaaattgtacgggcatttggagagaagagagtagaggataatttgaagaaccacgtggacctttgcaggatgcttgatattgtcgcattggaaaaggccattgtctcagatagataaccttctgcagacatcttatgatcaaggggacaaatgagatcatgccaactctactccatgtactgctggtgtcacaggattaatatacaatgaagatgttgattcttggagttgcacgaaataaccttgtgattgtgattagttacttcaaagcgttttttggtcttaatgcatgatctataccatgttatgatgtacatgttctttagcccaacaaatgatttttgtgagaactagttttttgtgagatctataccatgttagtccagaagacagtgcatgtctatattccttgttggtaagttctcttctgtgaagcagactgatctatcatgcctaaccactcgccttctctaacaccagcttattctacttctacttgctttagtgtttgtgccttggatgtagtaatactacattgttaaattatttttctttacaaacaaatatataaccttatgaatactagaaattgacgttgctaataatagagcaaagagacctacacatatctaaaacatagaaccccacagttctaaagtcgtatgacctatattctctatttcatacataattacttactaattccttggttattttcaataggatgggagagtgtcggatgcttcttcatatactatttcttggtccatcaaatctgcttgactcaaatgcaagttttgctcaaatgtggcaaaaataattgtctcaccaattgtcagcgcgcctgtttccagcaaagtttcagagaaggaaaagatggaatgtaactcaaattttggtggccgcacaagtgtggagacttgaattcatatatacttagttaggctcaatattagtgcaaacagttgataaccaagtttttcaattagtatttagttttggctttagagtacacttatgtatgagttatttgacaatatttatttatgagatattgaatggtacttatctatattatattagttacaatgttattaaatatatgtgtatgtatatttctctttcaaat

SEQ ID NO: 2703 - DNA, 1804 bp, Zea Mays
ctgtagtagtcggcccaaatagcctgccaagcccacctgcgacgtcaaacgaaaggactgccctaacctcgtgcagtcgtgcccgcttgtttcacttgctcgccttcacccctcgccgccgccgtcgccgccgtcgcaagcgacgatgctcgacatcaacttgttccgcactgacaagggcggcaacccggaccttattcacgagtcccagtgcagtcggttcgcctccgtcgagctcgtcgacgaggtcatcgccctcgacaaggcatggcgcgaaaggcagttcgagctggataagatccggcaggagctcaacgctaccagcaagaagatcgacaagctcaaagctagcaagcaagaagaggaagcaaagaagctcatggaaatttagttggtgtttgttctggctatttgctttccactgaagtaaccgttagactgtagtgtgacatcctaaatattagctccactgtcaactccaaccctgattctcacactcacaatttgattgttggaattctaattgtgctttagggttctatgtgaagatacaaaaaaatattgcattcctattctggtcccgtattgaaattgccagtggtccctctgaattttgatccaattgttataaatttcagatgaactgaataaaactactacttgtaggcaaacaataaaattgtacgggcatttggagagaagagagtagaggataatttgaagaaccacgtggacctttgcaggatgcttgatattgtcgcattggaaaaggccattgtctcagatagataaccttctgcagacatcttatgatcaaggggacaaatgagatcatgccaactctactccatgtactgctggtgtcacaggattaatatacaatgaagatgttgattcttggagttgcacgaaataaccttgtgattgtgattagttacttcaaagcgttttttggtcttaatgcatgatctataccatgttatgatgtacatgttctttagcccaacaaatgatttttgtgagaactagttttttgtgagatctataccatgttagtccagaagacagtgcatgtctatattccttgttggtaagttctcttctgtgaagcagactgatctatcatgcctaaccactcgccttctctaacaccagcttattctacttctacttgctttagtgtttgtgccttggatgtagtaatactacattgttaaattatttttctttacaaacaaatatataaccttatgaatactagaaattgacgttgctaataatagagcaaagagacctacacatatctaaaacatagaaccccacagttctaaagtcgtatgacctatattctctatttcatacataattacttactaattccttggttattttcaataggatgggagagtgtcggatgcttcttcatatactatttcttggtccatcaaatctgcttgactcaaatgcaagttttgctcaaatgtggcaaaaataattgtctcaccaattgtcagcgcgcctgtttccagcaaagtttcagagaaggaaaagatggaatgtaactcaaattttggtggccgcacaagtgtggagacttgaattcatatatacttagttaggctcaatattagtgcaaacagttgataaccaagtttttcaattagtatttagttttggctttagagtacacttatgtatgagttatttgacaatatttatttatgagatattgaatggtacttatctatattatattagttacaatgttattaaatatatgtgtatgtatatttctctttcaaat

SEQ ID NO: 2704 - DNA, 2068 bp, Zea Mays
ccgccgcccagcagtgcgaacgatagtccacctccaccagtactaccaccaaccaaaacctccactcttcctcccaccaaggcaccaacccgacgcaaagccgccggctttccccgatggcgacggcgatgtcagtttcggcggtgtccccgcccgccgcggcggtcacgcggccgcggacgatggtctgcgtgccggcgacggcgcgggcgccgcgggagatggcggcggagctggccgccgccgccgcgctcggcgctgacgtggcggagcttcgcctcgactgcctcgccgggttcgcgccgcgcagggacctgcccgtcatcctcgccaagccccgcccgctccccgccctcgtcacctacaggcccaagtgggaaggaggcgaatacgaaggcgatgacgaatcacggtttgaggctctgctattggcaatggagctgggagctgaatatgtggatgtcgagcttaaggtggctgacaaatttatgaaacttatttctgggaggaaacctgataactgtaaacttatagtttcatcccacaactatgagaccactccatcgtccgaggaacttgcaaatttggtggctcagattcaagcaacgggggctgatatcgtgaaaatagctacaaccgctactgaaattgttgatgtggcaaaaatgtttcaaatacttgttcactgccaggtgccaatcattgggctggtgatgaacgacagaggttttatttctcgggttctttgcccaaaatatggtggattccttacttttgggtcactcaagaaaggaaaagagtctgcacctgcacagccaactgctgcagacttgataaatctgtacaatattaggcagatagggccagacactaaggtctttggtataattggtaaaccagttggccatagcaaaagcccaattttgcataatgaagctttcagatctgtgggtttcaacgctgtgtatgtgccatttttggtggatgacttggctaaatttcttgatacatactcttcaccagactttgctggcttcagttgcacaattccacacaaagaagctgctgttaggtgctgtgacgaggtcgatcccgttgccagggacattggagctgttaacacaattgttagaagacctgatggaaagcttgttggctataatactgactatgttggtgctatatctgctattgaggatggaataaaagaatcagaaccaacagatccagacaaatcaccactggctggaaggctttttgttgttataggggctggtggtgcgggaaaagcactagcatatggggcaaaagagaaaggagcaagagttgtaattgcaaaccgtacctttgcacgagcacaagaacttgccaacttaattggtgggcctgcattgactcttgcggatttggaaaactaccatccagaggaagggatgattcttgcaaatacaacagccattggaatgcatccaaatgtgaatgaaactcctctatctaagcaagcactcagatcttatgctgttgtgtttgatgcggtctacacaccaaaagagaccagacttctccgagaagctgcagaatgtggagccacagttgttagtggtctggagatgtttatacgccaagctatgggccagtttgagcatttcacgggcatgccagtggacgattacaaattccgagcaattgcaagttcattggacaatcctaacaccatgaagcctcgtctgtgagagattcatccatgcccacaaacttccttgtttttcctttttagattcggattcagtgatcagtttgcctctcagccattgtaaattaatttgatgttccgagctgaaacattttggtgtgccttatttgtatcagcatgaacagcagtcatcgtgggtttgaatcagtctcttagcatttgcgttccaagacttgtctcgatttgtcccttttctaggtatcactaaggacttatttagttgtgtctggatcaaaacgatcaaaacgcggattgaatttccttctatttaattttgatttagaccccgttcggcaagctaagattcaagtcaga

SEQ ID NO: 2705 - DNA, 2287 bp, Zea Mays
cccaaaccagtcaagacgggccacgtcgtattccgccgcccagcagtgcgaacgatagtccacctccaccagtactaccaccaaccaaaacctccactcttcctcccaccaaggcaccaacccgacgcaaagccgccggctttccccgatggcgacggcgatgtcagtttcggcggtgtccccgcccgccgcggcggtcacgcggccgcggacgatggtctgcgtgccggcgacggcgcgggcgccgcgggagatggcggcggagctggccgccgccgccgcgctcggcgctgacgtggcggagcttcgcctcgactgcctcgccgggttcgcgccgcgcagggacctgcccgtcatcctcgccaagccccgcccgctccccgccctcgtcacctacaggcccaagtgggaaggaggcgaatacgaaggcgatgacgaatcacggtttgaggctctgctattggcaatggagctgggagctgaatatgtggatgtcgagcttaaggtggctgacaaatttatgaaacttatttctgggaggaaacctgataactgtaaacttatagtttcatcccacaactatgagaccactccatcgtccgaggaacttgcaaatttggtggctcagattcaagcaacgggggctgatatcgtgaaaatagctacaaccgctactgaaattgttgatgtggcaaaaatgtttcaaatacttgttcactgccaggaaaagcaggtgccaatcattgggctggtgatgaacgacagaggttttatttctcgggttctttgcccaaaatatggtggattccttacttttgggtcactcaagaaaggaaaagagtctgcacctgcacagccaactgctgcagacttgataaatctgtacaatattaggcagatagggccagacactaaggtctttggtataattggtaaaccagttggccatagcaaaagcccaattttgcataatgaagctttcagatctgtgggtttcaacgctgtgtatgtgccatttttggtggatgacttggctaaatttcttgatacatactcttcaccagactttgctggcttcagttgcacaattccacacaaagaagctgctgttaggtgctgtgacgaggtcgatcccgttgccagggacattggagctgttaacacaattgttagaagacctgatggaaagcttgttggctataatactgactatgttggtgctatatctgctattgaggatggaataaaagcatcagaatcagaaccaacagatccagacaaatcaccactggctggaaggctttttgttgttataggggctggtggtgcgggaaaagcactagcatatggggcaaaagagaaaggagcaagagttgtaattgcaaaccgtacctttgcacgagcacaagaacttgccaacttaattggtgggcctgcattgactcttgcggatttggaaaactaccatccagaggaagggatgattcttgcaaatacaacagccattggaatgcatccaaatgtgaatgaaactcctctatctaagcaagcactcagatcttatgctgttgtgtttgatgcggtctacacaccaaaagagaccagacttctccgagaagctgcagaatgtggagccacagttgttagtggtctggagatgtttatacgccaagctatgggccagtttgagcatttcacgggcatgccagctccagatagcttgatgcgtgatattgttctgacaaagacatagtgaggtttgtccaaagagcaagcttcccttccatcgtaatttctgcgcaattgattccagttgtgtcccctcctcgtccttcccgcatcttcctcaacctgtagaatccacatttttttttatctcagtggacgattacaaattccgagcaattgcaagttcattggacaatcctaacaccatgaagcctcgtctgtgagagattcatccatgcccacaaacttccttgtttttcctttttagattcggattcagtgatcagtttgcctctcagccattgtaaattaatttgatgttccgagctgaaacattttggtgtgccttatttgtatcagcatgaacagcagtcatcgtgggtttgaatcagtctcttagcatttgcgttccaagacttgtctcgatttgtcccttttctaggtatcactaaggacttatttagttgtgtctggatcaaaacgatcaaaacgcggattgaatttccttctatttaattttgatttagaccccgttcggcaagctaagattcaagtcaga

SEQ ID NO: 2706 - DNA, 2420 bp, Zea Mays
tgcacctacaacccaaaccagtcaagacgggccacgtcgtattccgccgcccagcagtgcgaacgatagtccacctccaccagtactaccaccaaccaaaacctccactcttcctcccaccaaggcaccaacccgacgcaaagccgccggctttccccgatggcgacggcgatgtcagtttcggcggtgtccccgcccgccgcggcggtcacgcggccgcggacgatggtctgcgtgccggcgacggcgcgggcgccgcgggagatggcggcggagctggccgccgccgccgcgctcggcgctgacgtggcggagcttcgcctcgactgcctcgccgggttcgcgccgcgcagggacctgcccgtcatcctcgccaagccccgcccgctccccgccctcgtcacctacaggcccaagtgggaaggaggcgaatacgaaggcgatgacgaatcacggtttgaggctctgctattggcaatggagctgggagctgaatatgtggatgtcgagcttaaggtggctgacaaatttatgaaacttatttctgggaggaaacctgataactgtaaacttatagtttcatcccacaactatgagaccactccatcgtccgaggaacttgcaaatttggtggctcagattcaagcaacgggggctgatatcgtgaaaatagctacaaccgctactgaaattgttgatgtggcaaaaatgtttcaaatacttgttcactgccaggaaaagcaggtgccaatcattgggctggtgatgaacgacagaggttttatttctcgggttctttgcccaaaatatggtggattccttacttttgggtcactcaagaaaggaaaagagtctgcacctgcacagccaactgctgcagacttgataaatctgtacaatattaggcagatagggccagacactaaggtctttggtataattggtaaaccagttggccatagcaaaagcccaattttgcataatgaagctttcagatctgtgggtttcaacgctgtgtatgtgccatttttggtggatgacttggctaaatttcttgatacatactcttcaccagactttgctggcttcagttgcacaattccacacaaagaagctgctgttaggtgctgtgacgaggtcgatcccgttgccagggacattggagctgttaacacaattgttagaagacctgatggaaagcttgttggctataatactgactatgttggtgctatatctgctattgaggatggaataaaagcatcagaatcagaaccaacagatccagacaaatcaccactggctggaaggctttttgttgttataggggctggtggtgcgggaaaagcactagcatatggggcaaaagagaaaggagcaagagttgtaattgcaaaccgtacctttgcacgagcacaagaacttgccaacttaattggtgggcctgcattgactcttgcggatttggaaaactaccatccagaggaagggatgattcttgcaaatacaacagccattggaatgcatccaaatgtgaatgaaactcctctatctaagcaagcactcagatcttatgctgttgtgtttgatgcggtctacacaccaaaagagaccagacttctccgagaagctgcagaatgtggagccacagttgttagtggtctggagatgtttatacgccaagctatgggccagtttgagcatttcacgggcatgccagctccagatagcttgatgcgtgatattgttctgacaaagacatagtgaggtttgtccaaagagcaagcttcccttccatcgtaatttctgcgcaattgattccagttgtgtcccctcctcgtccttcccgcatcttcctcaacctgtagaatccacatttttttttatctcagcaaacaatacaccatttcaacaatgtttaagagttcttactcctctcatcaaggctgcaaggattgttagatctttgatttgtgcaaacagtgtgtgacgcagtcagttttacgtggccaaatggacgattacaaattccgagcaattgcaagttcattggacaatcctaacaccatgaagcctcgtctgtgagagattcatccatgcccacaaacttccttgtttttcctttttagattcggattcagtgatcagtttgcctctcagccattgtaaattaatttgatgttccgagctgaaacattttggtgtgccttatttgtatcagcatgaacagcagtcatcgtgggtttgaatcagtctcttagcatttgcgttccaagacttgtctcgatttgtcccttttctaggtatcactaaggacttatttagttgtgtctggatcaaaacgatcaaaacgcggattgaatttccttctatttaattttgatttagaccccgttcggcaagctaagattcaagtcaga

SEQ ID NO: 2707 - DNA, 1002 bp, Zea Mays
ctctttccggcccaaccacgaaccactcctcctacagaaatcacctgccggcctggcctttccgtagctacaaccgaagccaccaccagcagtccagcacgactagcggaataatatccaccggcgacgggaacgggaggcggcccggcaccgcgtcttcgatttcttcaagcaggcatgccgctctatccccaccgtcatggagatctacaacctcgacgacgttgtcacgccctctcagctccgctcgaccatcgctaaggagatccgtaaaaaccagaacgtcaccaaccccaaggtgattgatatgcttctgttcaacgcgacggaggagctgaacaacatagtcgaacatgcaaagcagcgccatcatgtgattgggcagtatgtgatcggccaagagggcctggtgcacgagctggggtcgaaggatctagggaactctgactttctgaagaaattctacacaagcaattacttctgatctgtgttgcagatttacaacatctggtatactccgggtggtgctctgaataagacgacactgaggacctatcaggaccgattgtttcgcactggaggttttgatctatttggctcttgaatcctctgttcaatgtgatactgctgtcagctgtttgtcttgtttactgttgtacttatcaaattgatgttgatgttttagtcgattcgagtaatcgagtctacaagattgaactttgttgctacagcgagtaccgagcagtgccccccccccccccctttttttttttagaaacagccctcagcttttagtagagaaagggactaaacatgtcttccaacataaaaactaagggcctatttgttttagcttttttgttttttgttaagcatgttcgcttggttttaatttataatgggttctactccttctacagtgttttttttttggtattgtgtccgcaggatttcaagctatgattcttgttccaacataatacttgccatgcaatggctgaa

SEQ ID NO: 2708 - DNA, 2252 bp, Zea Mays
cccgcctagttcatgtgctcatgcacccgcacatcattataaataccagttttgctgtttacccgttccaacttcgcctggcccgagaggccgagatcaatactagacctcgactcgagtctcgagtcacgtttccgccgttatctgcatcaacggggtcaggcgactgaacagtacaggcccttggccgccgccgccgccgccgccgtactccaggtgcccaggtcttcgtccgaccctttgccagcgacgagcacccaccacaccaggatttcatcatggttgattctgttcatgacaatattgtgctgaacaagtgtatcaaggacatccttgcactaatcaaaccagtagaggatgatagaagcaagcggttatccacaattcaggagctggaaaattgtatccattctcttgcatctctgtcaggtgctgctgtcaaaccgtttgggtcttttgtatcagatctttactcaaaatcaggtgacttagatttgtcagttcagtttgggaatggttcaaaccacccaataaacaagaaaaagaagcagaatgccttgagagatgttaggaaagctttactaagtcgaggtgttactggatacatgcagatgcagttcatcccacatgcaagagttccagtccttcaatatgtgagcaagcaatttggcatctcctgtgatatatcaattggcaactttgctggtcgaattaagtccaaaatcttctactgggtcaatactgtagatgagcggtttggtgatatggttttgctgatcaaggaatgggcaaaagcacaaaacattaacgatccaaagagcgggaccctcaactcttattcgctttgcctacttgtcctctatcattttcagacatctgagccaccaattctaccacctctgaatgagatttatgaagggaatattgcaggagatgttacagaagcagcactttttgatgagcaacatcttgatgaggtttgtgctgcaaatatagaaagatttagactccagaacaagggccgaagaaatgaaacttcaacttgtcgtctacttgggactttttttcagaaggttgaagatcctgtagagagacctgataatgccgctagagcagttagtatgaaaggccttgacctcattgctattgcattcaatgatgcttgtcacaagtttaagtctctggaacatatcgatcggaatgaattattggcactgttgtgtacccctgttgttcgcttgaaacttggtgtgagagtcagagagaactcttacccaaaatctccaaggaataatgtgcatagcaggattagaggacagatgtggcgtgatcgaggccaagcacccagcgcgagagggtttactggaaccagatcagtccatgaaaatccactagcgaacactacagcacatgaaacagcagtgcaataccacaaccatgtgcagccgacaacagttcggcaaacagccatccgcaatcaagtaacaaatactgcagtgcatcagaccgcgccttaccagaaccatactgctcgacaggtgtatcctacttggtcccagacagctgaaccctaccagaatcataatcagcaggtatacgctactgggtttcaaacagggccataccaaagccataatcaagtccatgcttatagagcagggttgccacctggaggaatatatgagatccacaatcaacaggtgtataatgcagggttccaaaccgacggtccgcaccagaatcagcagcggcgaaagggatacccatcaaaccatcagaataacaggctttctgcgacggcagcgaggtacgagcccgttcgtggacagtttaacaacggatcgacatgggactcaaggtcccaagcaccgggcagtgcagctctgcgaaggtagccgtcagcatctcaggaggatagtagtaacaggcaaatcggctggattttgactgctgggcagctcttccttgtgtaaaaaattctagcacttctttactggtggacaactcttccttatgtaaaaattgctgttagcagtcggttcgtagtatgtgtcaattaattttttttaaggtgtgattgggtttatttatcgtgtctcagaaattcatcgcccttctccgtatgctcacgtatcatgtaaataaagtacaatagctggtccatgacacgcagaaatattcatcatgtaaaaagctgcctcacgccatatatgagcttttaagattttttaggaatcaattgttttttctct

SEQ ID NO: 2709 - DNA, 1863 bp, Zea Mays
aactcccactcccacgctttcctcgcccgcctcgccgccctcttttaatcgcagagaggacgacgcacgcgggggccggggctggggctagacggctagtgcgtttgcccgcttggcaactaccaaaccaactcggccgtcagtctgctcctagtcctcgcgcgccgccgccgcgccgcgggagagcaccacgtacgtacgggtcaaagcgcggttgccccaagctcacagtctgctagggttccagaatggcggcggcggcgaacggcggagacggggaggagctcctcctgctctcggccgtggaggctggccgcggcggcggcgtacccaccgaggtggaggattcgtggcggctcaacttcgaggggttccgcccgccggaggcgcaccaggagaggccgccgaacggtccgcttcaccactgcctcggcgtgctagctcaaggtcctgaggatgttgttgctgaatactatcaacagcaagtggagatgcttgagggttttagtgagatggacacacttacagatcgtggtttccttcctggaatgtccaaggaagaacgagaaaaggttgccaggagtgaaacattagccatacggttgtctaactttgcaaatatggttctctttgctgcaaaagtgtatgcttcagtaaggagtggctcacttgctatcatcgcatcaactttggattctcttctagacttgttgtcaggatttatcttgtggtttactgccttttcaatgcaaacaccaaatccatacagatacccaattgggaaaaagcggatgcagccactgggagatgaattcagcttaacaagtgatcaagaaaagtggcttgtggacatcatgctctccgtgacattggtaaaacttgccctggttatatattgccgctccttcaccaacgaaattgtcaaagcatatgcacaagatcactttttcgatgtcatcacaaatgtaattggcctggttgctgcactacttgccaattacattgagggctggatcgatccgcttggtgcaatcgttctggcgatctacacgatcaggacatggtcgatgacggtgctggagaacgtgcactccctggtggggcagtcggcctcgccggagtacctccagaaactgacttacctgtgctggaaccaccacaaggccgtgcggcacatcgacacagtccgcgcctacacgttcggttcccactacttcgtggaggtggacatcgtgctgccgtcgaacatgcccctgcgggaggctcacgacatcggcgaggccctgcaggagaagctggagcgcctgccagagatcgagcgcgcgtttgtccacctcgactacgaattcacccaccgccccgagcacgccttgtcccacgagaaatagcatgctaggaccgaactgatgcagcaggcggaaggacacggcttcgtaatcgtaactgaaacaattttacttgtagccgcagaaagcttcttctgagacctgatgctcatctcgtcagtcgtcgcagcaaaccagttgggtacatgcgatgagactgaacgtaaaggagtgcttgctctctgcgatggtgtccttgtagcatcatggactacagaatctgattcctcctccaccaccaccacgacgacgacctattttatactggtcttcagctcattagtctaggtttgtttcgttatctttttgcatggagagaccgatgattgaggtatgtatttctgtaagataaattcatatcttgcttcaaaaagtcaaaactttttaaaatttgccagtacgtcgaaaatagttttgatatttatgtctttgaattgttcttttatatatattttgtcacttttttttaaaaaaaggc

SEQ ID NO: 2710 - DNA, 1707 bp, Zea Mays
gtaaccctcctccacgccacgggtggcgcctccgttccaacccacaaaccgagcggcggccgccgcctcccttttcgtctctgactttttctacaagctcattcttcctcccccgatctcgggagcagccgaagcatgtcctggcggtggactctcgcgcgccgcgtcgccacgctggccgcgatcggtggcggcggtgcccaggcgcagaggctcctgtccacctcgtcagccggcggtggcactggcctcctgggtcggcactacatacccctcgcctcccagattcggagcaaggtagttggttgcagaggagctgctcttgtgagctccagatggttgcatgaggcccaataccaggttcgccaggacggggcttccagggctcagcaagatccatttgaattagtcgccgatgagctatcacttcttgcaaataggttacgatccatggtggctgctgaggtccccaaactggcatcagcagctgagtactttttcaaggtgggagcagagggaaaaagattccgacctacggttttgttgctcatggcatcagctctgaaatttcctttgtcagagtcaacagaaggaagagttctcagtatattggcagataaactccgcacaaggcaacagaacattgctgagataactgaaatgattcatgtcgcaagccttctgcatgatgatgttcttgatgatgctgatactaggcgtggtgtcagttcattgaatctcatcatggggaacaagctttctgtgctggctggtgatttccttctgtctagagcatgtgtggcccttgcagcacttgggaacacagaggtggtttctctaatggcaactgctgtagaacatctagttactggtgaaactatgcagatctcaacaagcagagagcaacggcgaagcatggagtactacctgcagaagacatactacaaaacggcatcattgatatcaaatagttgcaaggctgttgctattcttgcagggcacacaactgaggtctcggtgcttgcatatgaatatggtcgaaacctgggtctagccttccagttaattgatgatgttcttgatttcaccggcacctctgcatcccttgggaagggttcattgtctgatattcgccacggaattattactgccccgatgctatatgcgatggaggaattcccacaactgcaagaagttgttgaccggggttttgataatcctgcaaatgttgaaattgcccttgactatctccagaagagccgtgggattgaaaagacaaaagagcttgcacgagaacatgctgatcgtgcagtcaaggctatagaatctctacctgatagcgacgacgaggatgttctgacttcaaggcgtgctcttattgatatcacagaaagagtcatcacacggacaaaataggaaggtgttcggcgtccataagccaaaaccccaagttttgtgtatcattgctgaaatttaggattaagaaatggccctgcatttctgggaagcttctagaggttttggctgcatgtggcaacaaaatatatgtcaccgattgcaatggcaccagatatcgtgtagccatataagtgtgggagcattgtacccaatatacactcccgtaaagactaagatagtactaccataaaatatctgttaaccgttcctcttcaaattttgactcttcaaattgatggttgtttctcg

SEQ ID NO: 2711 - DNA, 1285 bp, Zea Mays
caactttcaccgttaccttcccagttccgttccctcccaaaccctaactcccgaatcccctcgctctcctctaatggccgccgatgccgacgcagccgaggtggagcggctttacgagctcggcgagcgcctctcttccgccaaggacaagtccgagcttgcggcggactacgaggcgattattgcagcagtgaaggggcagagtgtcaaggcgaagcagctcgcagcgcagctcatcccgaggttcttccggagcttccctgcactcgccacccgcgccatgtcggccatgttcgacctcgttgatatggaggagctcgcgatcagaatacaagctattcggggttttccacttcttggtaaagatactgaatttgtgtcaaaaattgcagatgttttgggacaactccttacaagcgaggaaaatgtggaacgtgatgctgttcataaagcactcatgtcccttatacgagaagatgttaaaaattctttacaacctttatttaagcatgtggagcaaggatcagagattcgtgagaagattatttgttttcttcgagacaaggtttttcctcttaaagcagagctactgaaacctcaagcagaaatggagagatttataacggatttggtaaagaaaagtgtgcaagatgtaactggttcagaatttgaactattcatggggtttctgcgaagcttgagcatatttggggattctgctcctagagagtcctttcaagaactaattgaaattattcaagcacaggctgatctcaactcacaattcaatgtttcggacattgaccacattgaaaggtggatttcatgcatgtatatggctcttcctatcttcatgagaggagcatcagcaagcaagttcctcaattacttcgttaagcaaattgttccagcattcgagaagattcctgaagaaaagaaactggatttgctcaagactattgcttcaagttcaccgtacgcgacagctcaagattcacgtcagctgcttccatctgttgttcagttactcaacaaatatatgcctgggaagaaggtggacgatatcaaccataattatgttgaatgcttgctgtacacttatcatcatttggctcataagactccaaacacaacgaacagtctatgtggttacaagattgttactgggcaaccatcggatagacttggagaggacttcacagagcattacaaagattttacagagagaaacaacaaaactcgacagtttcttcacctacaacaacatgggttcgaaaagcctgag

SEQ ID NO: 2712 - DNA, 1464 bp, Zea Mays
cagttccgttccctcccaaaccctaactcccgaatcccctcgctctcctctaatggccgccgatgccgacgcagccgaggtggagcggctttacgagctcggcgagcgcctctcttccgccaaggacaagtccgagcttgcggcggactacgaggcgattattgcagcagtgaaggggcagagtgtcaaggcgaagcagctcgcagcgcagctcatcccgaggttcttccggagcttccctgcactcgccacccgcgccatgtcggccatgttcgacctcgttgatatggaggagctcgcgatcagaatacaagctattcggggttttccacttcttggtaaagatactgaatttgtgtcaaaaattgcagatgttttgggacaactccttacaagcgaggaaaatgtggaacgtgatgctgttcataaagcactcatgtcccttatacgagaagatgttaaaaattctttacaacctttatttaagcatgtggagcaaggatcagagattcgtgagaagattatttgttttcttcgagacaaggtttttcctcttaaagcagagctactgaaacctcaagcagaaatggagagatttataacggatttggtaaagaaaagtgtgcaagatgtaactggttcagaatttgaactattcatggggtttctgcgaagcttgagcatatttggggattctgctcctagagagtcctttcaagaactaattgaaattattcaagcacaggctgatctcaactcacaattcaatgtttcggacattgaccacattgaaaggtggatttcatgcatgtatatggctcttcctatcttcatgagaggagcatcagcaagcaagttcctcaattacttcgttaagcaaattgttccagcattcgagaagattcctgaagaaaagaaactggatttgctcaagactattgcttcaagttcaccgtacgcgacagctcaagattcacgtcagctgcttccatctgttgttcagttactcaacaaatatatgcctgggaagaaggtggacgatatcaaccataattatgttgaatgcttgctgtacacttatcatcatttggctcataagactccaaacacaacgaacagtctatgtggttacaagattgttactgggcaaccatcggatagacttggagaggacttcacagagcattacaaagattttacagagaggttaactggaacagaagagacggtaagagcagcctcaaagcgactaactcagggaatggcagatttcagcaaggcaatatcttcagcaaaaaccgaagaggaaaaaactaaaattaaaggcgatcaacaaacttcaacaaggacaatgaggtcatataacaatatattggcaatggcacagaagggcagcactggtacagtggtgagagcagctgtttctttgagtcaccagatcccgggtttgaagcggcctccccg

SEQ ID NO: 2713 - DNA, 2196 bp, Zea Mays
caactttcaccgttaccttcccagttccgttccctcccaaaccctaactcccgaatcccctcgctctcctctaatggccgccgatgccgacgcagccgaggtggagcggctttacgagctcggcgagcgcctctcttccgccaaggacaagtccgagcttgcggcggactacgaggcgattattgcagcagtgaaggggcagagtgtcaaggcgaagcagctcgcagcgcagctcatcccgaggttcttccggagcttccctgcactcgccacccgcgccatgtcggccatgttcgacctcgttgatatggaggagctcgcgatcagaatacaagctattcggggttttccacttcttggtaaagatactgaatttgtgtcaaaaattgcagatgttttgggacaactccttacaagcgaggaaaatgtggaacgtgatgctgttcataaagcactcatgtcccttatacgagaagatgttaaaaattctttacaacctttatttaagcatgtggagcaaggatcagagattcgtgagaagattatttgttttcttcgagacaaggtttttcctcttaaagcagagctactgaaacctcaagcagaaatggagagatttataacggatttgagtgtgcaagatgtaactggttcagaatttgaactattcatggggtttctgcgaagcttgagcatatttggggattctgctcctagagagtcctttcaagaactaattgaaattattcaagcacaggctgatctcaactcacaattcaatgtttcggacattgaccacattgaaaggtggatttcatgcatgtatatggctcttcctatcttcatgagaggagcatcagcaagcaagttcctcaattacttcgttaagcaaattgttccagcattcgagaagattcctgaagaaaagaaactggatttgctcaagactattgcttcaagttcaccgtacgcgacagctcaagattcacgtcagctgcttccatctgttgttcagttactcaacaaatatatgcctgggaagaaggtggacgatatcaaccataattatgttgaatgcttgctgtacacttatcatcatttggctcataagactccaaacacaacgaacagtctatgtggttacaagattgttactgggcaaccatcggatagacttggagaggacttcacagagcattacaaagattttacagagaggttaactggaacagaagagacggtaagagcagcctcaaagcgactaactcagggaatggcagatttcagcaaggcaatatcttcagcaaaaaccgaagaggaaaaaactaaaattaaaggcgatcaacaaacttcaacaaggacaatgaggtcatataacaatatattggcaatggcacagccattgcattcaaaatcccctttatttatcggtgataagaaaatcgctctatcatggatggagcatcccaagaaaccaacagctacgacagcaggtttgcaaatcattcaagggggaagaggtcacaacctgctactacaaatgggaatggccctgcaaacaagaaagggagaggaggaatgcacaaccagcttgtgaacagagcttttgaaggactgtctcgtggtggtagaggcactggaagggggcgtggcaggggtggccgaggacgaagagggtggggtggctaccgctgagatgacctggaaactctgttcaaacctgacatgggatgagctttctgcttccacttgagagtaaatgcaaaggtcgatatttatttgtgtgcctcagcgcaacaagtttaaattggaaggcacacaacagcagaatgcgtacagaaagagtaaaaaagaatgcttgagaaatgtccgcaagatctgtgcatctttcctattcatttgccatcaagccgtgttctttgccaccctccgtcgcttcacctgagttggctgtttgatgaaatgttggcaagatctgtgcatcatctttcatattcacttaccatctcaccgtgttctttgaaccctaacagtcgtttcacctgtgttggctgttagaactcaacagtaagatatcgttcatttattttatttgattttaccagtgtttgaagaggcgaccgagcttttgtgttggacttcgtttaagttcgttttatgatccgttttaccggcacagaggtatagtgatgttta

SEQ ID NO: 2714 - DNA, 1041 bp, Zea Mays
ttggagatgataaccaaagcagttagcgacggatcgcgtgggaacggcgccatggctgccgagatcaatgggggcatcctcaccgtcggcaggcccaggcagcactgagttgcgctctgctgcggccgctacttccagatggatggatttgatcaaacagtgaatgtgaaggttgtaatggcaactaatagggcagatactctagatcctgctttgctgtggccaggtagacttgacacgaaagttgagttcccttgtcctgattggcggcaaaagaggcttgtgttccaagtctatactgctaagatggatttgagtgacgaggttgatttggaagattatgtttgcagaccggataagatcagtgctgctgatgttgagttggtttcatggcacataccaagatttttatgcatttgttgttttctaactactgtattgctagggtacttatgtcctgtgctggccaaagctctcaaaaccatgaaaaggcaaagaaggtgctccttatagtaaagccacattatggatttggtgagaagggtagaccaacagttggagaggaaggtgttgtgatgagcatcatcttgttctacatcatcactaatgaactggttgaacttttggttgctttgggaatggaggcgacggcatgcagattgccatgtccggatgttatgcgggacctatgtttaatacacttgctggtttgggtacgttgttgctagattgatctgggctcttgttatgctgctgagaggtgacatgcagcctaacaagatacttggagttggcctcatcgctctttactcaaattttctttttattagagtaagcaatgttggtggaatattgctactacctagagttagataattatttgcttgtaaagtttgatttacatcaaagtacttgcccatggcttccatttttataaatgaaatgaagttatatagtgttgctctgttctatacgtctgttcttgtatgtcaagttgtcttcacattttccgggttttaatatttttgggagaaaacaaac

SEQ ID NO: 2715 - DNA, 1900 bp, Zea Mays
tataacctgcgcgcccaccctcccctttgctgcacatgcactcctcctctcttgcccaccagcgactcccgtagctggaactcgctcgtcaaaaggaaaagaaacacttcgcttcagctggttgacagacgactcagagcaaaatgggtatactggtgattacggtggacctagactgctgtcgctgcagagccaagatcaccaaggtcctggactgtctcaaaggtacatatttatcagcatgtacataaagatgggaatacttccatgatgcgattgtacatataatccagcaattcattcgaaaaaaccaaaagcgtattttaccccccaccccaagcacgaacagtccatgttcgaagaaactgatattgtcgaagctgtagcgcaacgtgtcttcgcaaaaagggaaaaattaaagaaagacaaaacattcggggttcccaatttttgcagaggaaagtatgaacaatactgaccaggtttgcaagattcttctgaaaccacgtcgacgagcttgtctggttcagcttatttttaatcacatgcggaagaagatgaatgcggcacgaaggagtcgtttagggtctagaaatgacaaattgctcctaccacaacgactcaacggactatgtgttcatattgattcggacgatttttaccaaaacgattctcatagagtttgggagtttagttgccagaagccgattccccgatggccagaatccaattttaagccgaaacaaacaccccgtcatcggcctgaatcggaaaacattttaaccaacatcatctaggcttcctgtgattaattaaataatcatagttagactatgttcagcagttcatagttagactggatgttttgtactgtagactactcgtaggagtttaaatatgggtattgggatgggtaagactgcaactgctagcttataagaggctgaattctaatatattcttgcaacagtaattatctttttctttttcaaaaattgatgcagaggagttctgcatcgagaaagtggagttcgatgacaagaaggagaagaaggtggtggtggtgcgtgggaagttcgacgccgagaagctctgcaagaaggtgtggtccaaggccgggaaaatcgtgaaggggattgtcatcgctgaggtgtggccaataccagccccgcccaaggagtgcaagcctgaggcaccgaaatgttgcgactgtgagaagtgcaagccgaagcctaagccggagccaccgaaatgttgcgactgtgagaagtgcaagcccaagcccaagcctgagccaccgaaatgttgccactgtgagaagtgcaagcccaagcctgagcctcccaaaccagagaaatgctgcagtgcctgttgtcactgcaagcctaagcctgatcccaaaccgctgatatgttgtgtctgttgccactgcaagccggagaagaaggaagagaagaaggaagaaaagaaggacgaaaagaagccggcgccggccaaaacggagtacaagtttgtgccctacccgtacccgctgccgaaccccgcgatgtgcccgagctggccgtggcagtgcccgcctcagcagcagtgccagtgctgccagaagcctccgcctccgccgcccaagtcgccgccgaagccgccgccgtgcacctgttcgagccacgccgcctgtgtctgcggcaagacaccgccggcggtctggccaccgatgccgccgccggtctggccgcccccgtggggcacctgcaacgtcgtcaccgaggagagcccgtgctccgtcatgtgacgctacgcgcttgctttgtcatgtactcgtcgctgttggcctgttgctgtgctgccatcggtactggacctcggtgctacttgggccggtgccattctttttaaaaaaaaa

SEQ ID NO: 2716 - DNA, 1002 bp, Zea Mays
tgcttacgtacttgatgaatcgatcatgaccctgctccggcaactttaccgtgctgaacggcgacaagatacctactaactgttatcggtgagttgaagaggatccttgttcagactactggcttggagcctgagaggcagaggctcttcttccgtgggaaggagaagagtgacagagagttcctgcacacggcaggtgttaaggatggagcaaagctgcttctgctcgagaagcctgcccctgccaacatagagcagaaggttgagcctgtgattatggatgaaagcatgatgaaggcatgtgcggctgttgctcgtgttagagttgaagttgataagctgtctgctaaggtgtgtgacttggagaagaatgtactaggagggagaaaggttgaggataaagaatttgttgtcttgacggagctgcttatgatgcagctgctgaaactcgatggcattgaagctgaaggagaagcaagggcacagaggaaggctgaggtgcgccgagttcagtcccttgtggagaccttggataagctgaaagcaagaaatgcaaaccccttcagcgatcataataaggctgtttcagtaacaacgcagtgggagacgtttgagaacggcatgggcagcttgagtgctccacctccccgtgtttcttcaacgcaagctaacactgactgggagcagttcgactaggctcagatgaagctgttgatgtatcatgaaatctgtgagatcggtatggacattcctttccgaggcagcgaggtgttgtgtatatgcaccacgtttgataacttttggcgtcccaagtgcctgtgattctgtgaatgttaccagatcgtgccactgccatactaccatgtgaattgcatcgctcattgagggtcatatttcaatatgctcctgccagtgccattcgcgtgctatttattggtgattcacaataagtacaccggccatggcgtttttggacgtcttggaaggtaatctgctacaaac

SEQ ID NO: 2717 - DNA, 1339 bp, Zea Mays
ggcggacacggcgagtcagcacagcaacagcgcacagcagcacacggtatccgtcccgggccggagccaactccccaagccagtccagtccttccgtccacccatccatcgtccccgcctgcacctcgcgagcatccaaagctgtacttgcggcaagttctcgcaaaatcctactcccaccgccgactcgtacctccgctcccctcctccccaacccttccacgcttgcttctccgggagggaaggcacacgggagcgcgagctgagccagccagtgggtcggtcgctggaggcggagccataaaggcgtcagcgacggcagcatgatgagcggcagatcgggcgggagggacgccgagggcgagtgggaggttcggcccggcgggatgctggtgcagcgcagggacggtgaggcggccggccccgtcatcaggatcagggtctcccacggcgccaacttccgcgaggtcgtcgtgccggcgcaggctaccttcggtgagttgaagaggatccttgttcagactactggcttggagcctgagaggcagaggctcttcttccgtgggaaggagaagagtgacagagagttcctgcacacggcaggtgttaaggatggagcaaagctgcttctgctcgagaagcctgcccctgccaacatagagcagaaggttgagcctgtgattatggatgaaagcatgatgaaggcatgtgcggctgttgctcgtgttagagttgaagttgataagctgtctgctaaggtgtgtgacttggagaagaatgtactaggagggagaaaggttgaggataaagaatttgttgtcttgacggagctgcttatgatgcagctgctgaaactcgatggcattgaagctgaaggagaagcaagggcacagaggaaggctgaggtgcgccgagttcagtcccttgtggagaccttggataagctgaaagcaagaaatgcaaaccccttcagcgatcataataaggctgtttcagtaacaacgcagtgggagacgtttgagaacggcatgggcagcttgagtgctccacctccccgtgtttcttcaacgcaagctaacactgactgggagcagttcgactaggctcagatgaagctgttgatgtatcatgaaatctgtgagatcggtatggacattcctttccgaggcagcgaggtgttgtgtatatgcaccacgtttgataacttttggcgtcccaagtgcctgtgattctgtgaatgttaccagatcgtgccactgccatactaccatgtgaattgcatcgctcattgagggtcatatttcaatatgctcctgccagtgccattcgcgtgctattt

SEQ ID NO: 2718 - DNA, 1716 bp, Zea Mays
cagcgctgctgctaaaacctcccgactaaaccctagcagcggttcctctccagtctccagcagtccagctcgatcgcgatcggaggccagaaatccatggccgctcccgccgccgcgccgctcgacgagggcaaggcgaagaaagtccttcgccaggtcgagttctacttcagcgacagcaacctcccccgcgataagttcctgcgggagacggtcgagcagagcgatgacggattggtgagcttgcccttgatatgctccttctcgcggatgaagtcccacctggggctggacgcagatgtcaagcccgagactgtgccggaggagaccgtgcttgcggttgctgaggtgctccggccttctcctgccctccgcgtatcggaggatggaaagaagattggtagagctagtgaactcttgaagccagatgagatcatagaacaagtagactctaggactattgctgtatctccgctgccttgcaatgtaaagcaggaagacgtccaatcttttttcacaaattatgcaaaggtaaacagcgtgagacttccacgcaatattgccaacaaaaaacacttctgtgggactgctttggttgagttttctgaagaagaggaagcaaaaagaattatggagactgctttagtatttgcaggggcaaatctggaaataaggccaaagaaggagtttgatgctgagcaaaagtccaaaaaagaagcatatgaaaagacacaccttaaaaaggacaaccagtatgaaggctatcaaaaaggcctaattgtggccttcaaattggagaaggccacagctgatactgtagtgcagcaagataacatagataaagagaatgactctgctacgaaattagatgtttccagttccatggaaaaaccttcaggccaggggccagaggagtctatccttgagagcgatgttattaagcaagggatgtcctcagatgacatgaccaaagagaaagatctaaacactggggaagctacagaatctgagaagtgtattagtgatgtccccatagaaagtgataaacatggtgatagtgaaccattgagcagggaaggcaaaatcatttctggcaatgtgaatgtgaagaaccaaatatcgagggaggatctaaaagaagcattcaaaaaatttggagctgtccggtatgtggacttcagcatcggagataattcaggataccttcgctttgaagattctaaggcagctgaaaaagcccgcatgtctgcagtacttgctgatggtggcttgataattaaggaccacattgttactttggagcctgtgactggtgaagctgagaaggattattgggacacaatccgcagtattcaaggaaagtacaaggatagtagaagctacaagggaagggcttcaaataaccagagaggaggaaagcgtttcaacgcgaagcgagatagaaacccagactcggagaagaattctaacaaggctcggaaggttgaagctatcgcatgaggttaatttaggatctacagcttgatatatctgggagatgcatgcctgattacatattgccaactaccttagctaaggttcctaactgtatgccattgttgagaaaaatatttctgaagggaaattattggctttctgataatggtttggtcacaatcatctcggctgcaccttctttatgttccataaatctgtgtgagtgttctcttctcactt

SEQ ID NO: 2719 - DNA, 4151 bp, Zea Mays
atcgcccccgcacatatcgatctcgtcgtcgtctcccccggtggcatgctccgctcccgctagatccgatctattatctatggatccccgccgtctccccatccttctctccctcctgcttgccttcttctccgccgttgtcgcctctgacgagatccacggatgcggcggcgtcgtcgaggcgagctctggcttggccaagtcgaggaaggcatcggattccaagctcgattactccgacatcacggttgagctctgcactgttgatggtttggttaaagaaagcacacagtgtgctcctaatggatactattttatccccgtctatgataagggttcgttcatggtcagagtgaaggggcccaagggatggtcatggaagcccgaaactgttcctgtcatcattgatcacaatgggtgcaatggaaatgcggatataaatttccagttcactgggtttatgatatccggtaaagtagtgggagctgttggtggtaagagctgctcaaaacggggaggacctgctggtgtgaaaattgaactgatgacagattctgatgagttgattgcatctgctttgacgtcatcatcaggagaatattcatttacaaacataattccagggcgttacatattacgtgcttctcatcctgattatgaaattgagttgagaggctcaccagagattgacctgcgatttggaaatgccgtggcagatgatgtcttctttgtatctggttatgacatttatggcactgtggttgcacagggaaatccaatagtgggagtccacctatatttgtattcaaatgatgtaacgaaggtcccttgcccacaaggtttcagtgatgcacccaaggaaggtgcactttgccatgcaatatctggtgctgatgggaagttcacatttagatcactaccttgtggtagctatgagttgttgccatactacaagggagagaacaccgtatttgatatttcaccatcttcactttctgtttctgttgagcatagtcatttgacgattccccaaaaattccaggtcactggattttctgttggagggcgtgttatcgatggttatggtgctggtgtggagagtgccaatgttatagttgatgggcagttgagagccataacagatagtcttggatactatagactcgatcaggttacatccaagaagtatactataactgccgagaaggatcattataagttcaaccgtttggaggattttatggttactttaacacatggaccagaaaatgtaaagccacagcggaaattagtgggtgaaaatggacatttttgctttgaggttcctgctggtgaataccagttatctgcattacctgtagattccgaacgctcttctagtcttatgttttcaccgggatctattagcgtcaatgtaaatagcccgttgcttgatctggaattctctcagtcacaagtcaatgttcatggtaaagtctcatgcaaacagcaatgcagccagaacattctggtctcacttgttagattggctggcggagttgaacaggaaaagaagacaactacattggaacaagataatgttaattttgtgtttaagaaagtatttcctggaaaatatcgtgtagaggtgaagaattctttacccgagggcttagctaaggatgattggtgctgggaccagagtatcttgaatatagatgttggtactgatgatgtgagagacattgtgtttgtacaaaaaggctattggattgagctagtttcaactcatgatactaatgcttatattcagcagccagattcttctagacttgatttgttgataaagaaaggatcacaaagaatttgtgttgaaacttcagggcaacatgagattcatttaactaatccttgtatttcctttgggacctcgtctgttttgtttgatacagctaatttaatgccgatccatatcaatgcaaagaagtatcttgtaaaaggtgaaatccatgtggacatgagctccattcaggaaaacattgattccaaggacatagtcgtggatatcttgaagagtgatggcagtttcatagaaaagatatccacatcacttgttcttggaaaggacaatcaaaatgacttcactgcctttgagtactctatttgggctgaccttggggaggacttcatctttgtcccccatgattctagcattggaaggaacaaagtcctattttatccagcaagacagcagtattcagtttctatgaatggatgccaagatactgttcctctaatcactgcaagaactggtctatatcttgaaggatcagtgttacctgcaacttctgatgttgacatcaagattctagcagctggaaagagcaactatgcccatctgaacaaaggggatgtagcaacagaggcaaagacagattctgaaggatcattttttgcaggtcctttgtatgatgacatagtatataaagttgaagcttcaaaggatggttaccatctcaaacaaactggcccatacaccttttcttgtcagaagcttggtcagatattagtgcggatttatggtgaaaattcagagcttttaccttcagtattattatcattgagtggcgagaaagggtacagaaataactcaattagtagttctggtggaaccttcacctttgacaacttatttcctggaagtttctatctccgaccacttctaaaggaatataaatttaatccgtcagcagtagctattgatcttaattctggagagtctagggaggctgaatttcgtgcaaccagagtggcttacagtgccatgggttctgtaacactattaactggccaaccaaaggagggtgtttttgttgaagcaagatctgaatccacaggtttttatgaggaagctaccacggattcttttggtagatttcgtcttagaggacttgtgcctggatcgacttactctataagagtggctgcaaaagataatcttcagtttgcagcagttgagcgtgcttcacctgaatatttgtcagttaatgttggtcatgaagacatgactggtattgattttgtggtttttgaacgccccgaagtaacaatcttgagtggccatgtggaaggagatggcattgatacgttacatccgcatctctctgttgaaatcagatcagcaacagactcttctagagtagaagctgtacttcctcttcctctttcatactactttgaagtccgagatttgcccaagggcaagcatcttgttcagcttcgatctggccttccatcacatacacataggtttgaatcggagttagtcgaagtagatctggaaaaggatccccaaatccatgttggtcccctcaaatataaaactgaggagcgtcatcaaaagcaggaactgaccccagcaccagtttttccgcttattgttggagtttctgtggttgcactggtgatcagtatgccaaggtttgctgctatctcacagtgaatctcatggtgcaacctttggtaactatgggttagtaactattttctgtaatgttttgatctgtgcaggttaaatgacttataccagagcgctgtagggatgacttctctgggttcagggatggcaccgaccaaaaaggagccacgcaagaatatattaagaaagagagtgtaaatggcagattagcttagccttaggggtcgagaaatgagacatgacaaattgagcaatttcaagagtggaatagcttctggtttccccctcgggtaattttgccgacgaaaaggaatgccagttttgttgtacgatagcactatgcacagtttttgaagccttagattgtgccgttttgcagttttagactataaagaaagagttgctgcatcatgaatgaactttctcaccagtcagcatgcacgatcgaataggttaatctgagcggtccaggactaagtagaatagacaagtttgttgtggcacgttgtttgcccctctttttgattgtacaacgaccaagtaaagcgtgcgcaatgacttctctatgacttacggatctggttcgccctttagcatatgtggtctagcgtggagcgtttataatataaatttaaatagtttttaaaattatttttaatgtaaataataaataaatatgatttatctaagcgtg

SEQ ID NO: 2720 - DNA, 2741 bp, Zea Mays
cacctcctctccacgctagcagccacttccactatcacggactcatccacccaccaccttccccggtcccccccgcgccgatcacggcacggcgaagcccgcccgctccctccctccctccagatcaggcgccgcctctccgcccccactgcccgcgccgccgctcgccccgttagccggggcgtggattgattcgcacctccttctcctcctctcgatcgggtttggaggttagagtaatgaaataaaatgctactcaaaagcaagtttaagttggccacagccattggcatcgtgctatcgatgctatcgctgctcgtgcacctttttcttgctaattattcagctgggggcattacaaagtacagcatgcacatggacgatgtccttccatttggaccgaggcctcgaccacggagactgtggggtccgttggtcccacttgatcacttgcatccttttgtgaaacctagcaaatcatatgctgttcccagtaagcataatggttttatttatgcaaagatatatggtggttttgagaagatacagtcttcaatctgtgatcttgttgccgttgccaggctattaaatgccactctggttattcctgagatacaagcaacaactcgtacaaaaggcatcagttcaaagttcaaaagcttttcttatctatacgatgaagatcatttcatacattcactgtccagtgatgtggttattgtgcatggcttgccaaaggatctcagagaggctaggaaaaagataaaatttcccacagtatctcctaggaattctgctactccagaatactacatcaaagaacgtgaagttagagcctttccatgcggttttctgcagtcaattctccctgcaagtctggaggaatttcagcagcttagatgcagggtagccttccatgcactgaggttgcgccctcaaattcgggctcttgggagccaagtagtaggaaggttgcgagcatctggccgtccttatgtggcctatcacccaggactgcttagagatactctagcttttcatggttgtgctgaactgttccaggatattcatacagaacttattcagtatagaaggaatcagatgattaaacgaggaacagtaaaggagcagctaacagttgattcagtgtccaggaagatggctgggttgtgtccactcatgccagaagaggctggacttctacttcaagcattaggttacccaccaactacaataatattcttggctggttccgagacttttggtggacaaagaatgctgattcctctacgagctatgtttgctaacctagtcgatcgaacttcattatgtagtcagagggagctgtttgatttagttgggtcagaagatcctctaacctcagatttgccacagcctccacctcccaaaagtgaaaaacaactcattgaagaatggaagagagcagggcctcgtccaagaccgctgcctccacctcctgcaaggccattctatgcacatgagaaggaaggctggtatggttggattggtgagaatgacacagaaccggaggcttcactgattgagttcaggaggcaagcacatcggttgctctgggatgcacttgattattttgtttctgttgaagctgatgccttcttccctgggtttcacaacgacgggagtggttggccagactactcaagtttggtcatgggacaccggttataccaaacaccttccggtataacctacaggcctgacaggaaaattattgctgcactgtttgaagaagttaacgatcataggtatcatccaccacggaattggacaattgctgcacgtgagcacctcaacaggagtgcaagtgtggaaggcatcgtgtcatcggctatgttgtcaaaacctgtatcgtttcttgcccacccattgccagagtgctcttgcagaacaccaaagtcacctgctgttcaaccggtaaaagacagcaatggcagatccctatttggaggtgaggtagagtgtcctgattggatggcacgcagcctggcaatggcatctgctaggaatagcgaacctcaaaatgaggactatgaggatgagttgcgtgaagatggctctagccaagacacgcaggaatctaatacaagtgactcgaataaatcttcggagcaagatgaagagatggatccggatgattagagatatgcggagcacctttttaactgctaccaggtccaggctactcaagcaagaaaagcaggaatcatcttgcatcgcagcagcgcatcaccatctggagtagccccagcatgacaagctggtcatccatcgtgggggcttgcctggatcgtactctggtatacaaccaggctgaatacgaaactaacactttgttctcttcttccttcacgtcttactcatttttttgtttacgcgaaattgtttctgtacaaatgtcttaactgaaaatacattaatttttgagtgggtttgatatgtagccatttgttaggtaatgagattggcttacggtgggcagatgtgcacccgtaaaataccggacagtacaggcattgccattttgtcccacgttaattgttgagttttgttggtggccgaagagcctgcttagaccatccaggtgcatcaaaatagtacccaaaaaattaaaatgttacattatttaaagtgtttaggtactaaaaataaatttagcttaaagtgagccttaaatcatgtattttaggaaaaagaaaaga

SEQ ID NO: 2721 - DNA, 797 bp, Zea Mays
gtattctctcctttgctcatcttattgtggtctaagctgctgcgacttggggattttcttcctaaagaattggaaggcgatacatataatccagttcctggagttatggaaggtgtaccatcatcaaggaactatagtggtggtttcacttccaaattaatggccaaagatttggatttggccatggcttctgcatctggagttggcttcaaatgccccatgggttccaatgcacttgaaatttaccgaaaactatgcgaggatggttgtgaactcaaagacttctcgtgtgcattccgacattactattctggcaagaatgaagagtgatcttggatacgctgcaaaatttcctcctttcgaaatcaataaaacagcaaataaagttaggacctgattatgtcccatgaattgaaacattgaaaccaatatctagaaagtgtgtttccttgtttcattattagattactttctaattggtctaaattcctggaaccgaacaggaccttattggaaagtttacagtataagctgtgtagcattgtaccagagtccagagacatggtggttgtttgttgaccagtggtgatgatctgatcatctggttaaaactgttattggttttgcttctaggcaatcaagtgatactgttctgggacagattcaaccatgagccaagatgttatgtgcattatgatggtggctagatctgagggagtataagggtgccggtggtcttgcccatgaccgagtaaaagggaagttttttttattaattcttacttgattagattgat

SEQ ID NO: 2722 - DNA, 2598 bp, Zea Mays
aattgatccttttgaagattctgatcccagattaattcacgactagagttgtgaactctataggttttcttgtgtaaatttaacactaatttggctgctctttgggtctgggggcacaaatttgaaatattgggagtgctggtgtgatatagaggtctaggaggagatatgaggtactacttgcgtcaggtccagcgtttggttggagatatggaaggaggagctctcttgtttatagacgacctcaactccaagtgacaaagcgaacagctgttgaacgtttcccttctatttctgtttctttttgccggatttggagatggaggtgaattcctctggcgaggaaactgtggtaaaggtaagaaagccgtacacaataacgaagcagcgggagcggtggacagaggctgaacacaaacggttccttgaagccttgaaactttatggcagagcatggcagcgcatagaagagcatgttgggacaaagacagccgtgcagatcagaagtcacgctcaaaagttcttcactaagaattttcaaaggaaggagttgtctgaaaaaggaagtcgctcggaagttcttaatctcttccgtgatgccccatctgcatcattttcttcagttaacaaaagctcttcaaatcatggggcacccaggaggaccgaggcaagtaaaacagaaagccgagatatgtccatcatggaaaataattcttttaaccccaacacccaagaggatgtaaaggtgatcagtgatcaggaaatggaaaggcttaatggtatccagatcagatctaaatgtgaacattctcatgaggggtatttggacatctcaacgcaacaaatgaagctaatgccaaagtctgtggagacaacatatgtggatgaacaaactgcaagagcttcacacaccctagcagagagcgacgggacagctagcattccagtgactgtacctgaaggaactcatcctgatcaaacaagtgatcaagtgggaatcaatggaagcatgaacccatgcatccatccaatggtttctgctgacccaaaatttggtagtagtgccacaccacagactttccctcataattatgcggcctttgctccaatgatgcagtgcaactgtaaccaagatacgtacaggtcattcaccaacatgtcatccaccttctccagcatgcttgtttccacgttgttgtcaaaccctgccatccatgcagccgccaggctcgcagcatcatactggccagcagctgaaggtaacactcctattgatccgaatcaagaaaaccctgcagatggcgtccaaggaaggaacataggctctcctccaagcatggtttctattgtagcagctacagttgctgcagcatctgcatggtgggcaacacaaggtcttctccctttcttcgctccacccgtggcttttccatttgtaccagctcctagtgctgcctttcccacagttgatgttccacgaccttcagagaaagacagagattgcccagctgaaaatgcacagattgaatgccaagaagctcgaaaacaggtacagttcgaaggtttaagaattgctgcttcttcagagtctgatgggagtggaaaaggcgaggtgtctctccatacggagttaaagctatctcctgcccagaatgctgatgccacacctaccacaggagctggcacaaatgatgcattcaggaataagaaaaagcaggatcgctcttcatgcggttctaacacaccttcaagtagtgatgtagatgcgggcaatgttcctgaggaggacaatgctaatgagaaggcgaagcaagcctcctgcagcaactcttcagctggtgacactaaccaccgcagatttagaagcaatggaagcacaagtgattcatggaaggaagtttccgaagagggtcgtctggctttcgatgcgctgttcagtagggaaaagcttccgcaaagcttttctcccccacaagcagtagactcgaaggaggttgccaaggaggaggaagatgaagtgaccacagtggcagttgacctcaacaagaatgccacaagcattgatcatgatgacctcgacacaatggatgagcccagggcttcctttcccaatgaattgtcgcacctgaagctgaaatcgcgccgtacaggcttcaaaccatacaagagatgttctgtggaagcgaaggaaaaccgggtgccggctagcgacatggttggtaccaagaggattcgtcttgatagcgaagcatccacataattgatttcttcaaagttatatttacatctaagctactataggacttcagatcttgcaatgcagtgcttcattaaaactcaatctgttgtgtgctgtattttaatgcttgtcaagcagcccgctagactgctttaaaaccttatctcgtagagtctgatttaagcatcatgcaactatcaaacttttttttttggtcaaaatgtattttccttatgttttatatttttggaaaggaaaataattgaaatattatttattttgaaggctcatgcaaaggtttatttgatcaaggtgtaggataggctgagcgagagggtgaacattatgactaatatagg

SEQ ID NO: 2723 - DNA, 1617 bp, Zea Mays
cgcagatccattcatgtccgattcattagacaagggatgaccagcgatgcacaggagctatgaacaacgatgactaccgacctgcagcacatacgagcccatgacgcaaacgagttggccgaaatagttcagatgattctgctggtgccataggtgtgaagtacttagtggggactggggagtgggcggacaagattttcattatagccatataaaatggagtgttccaattcaactagttcccaagggcatcatgtaggaaagtggaatcaagtgcaaatcattgatccttccattgttgaaatgggaccaagtcaccttccactgagtttcatgagaagatgccgtggagtattgtgtttggtgattatgatattaacagcatttatgatgatggtatacctgtcccctgttactactttccttgtgaggttgttcagtgtgcattacagcagaaagtctacatgcttcctgtttgggatgtggttagccatgtggccttttttgtttgagaagattaacaagaccaggtttgttttctctggtgaaagtgtgccagcaaaagagcgtgttctgttatttgctaaccacaggaccgaggttgactggatgtacttatgggattttgcattgaggaaaggccgcttgcagtgcatcaagtatatccttaagaaaagtttgatgaagttacctgttttcaactgggcatttcacattattgagtttattccggtagagagaaagtgggagattgatgaagcaataatccgaagcaggctttctgaatttaagaacccaaaggatcccctttggctggcagttttcccagaaggcactgattatactgagaagaagtgtatcaaaagtcaagaatatgcagcagagcatggtttgcctgttctgaaaaacgtactccttcccaagacaaagggtttcaattgctgtttgcaagtgctgaggagtaccatagatgctgtgtacgacatcacgatcgcctacaaacaccggccgccgacatttctggacaacgtctacggcgtgggtccttcggaagtccacatccacatcagcagcatccaggtctccgacataccggcgtccgaagacggggtggctggctggctggtggagcggttcaggctcaaggacgagctgctgtccggcttctccgcgctgggccacttccccgacgaagggaccgccgagggggacctgtcgacggccgagtgcctcgcgaacttcgcggccgtggtcgccgtcacgggcctgctcgcgtacctgaccctgttctcgtccgtgtggttcaagctcttcgtggcgttcagctgctcgtctctcacgctcgctacgtgctactctgtacatctgccccagatggtaggttttggctcaggtacccctgcgagcatccacgcgaaggaggcttgagcgtagtagcgttgtgactgtaactgagagctgtatgtatgtcagcagagaatttggtactgctacctggacgcggcttttgtatcaccacgttgctgtgtgtagtatatgtgttggtcaatgtgtttttgctaccgccatcttttatctggttcaagtaattgggcgtattcgttgcctaaggttttg

SEQ ID NO: 2724 - DNA, 1820 bp, Zea Mays
gtttcatgtttgattcgaatcagacagttcctacacatcccctgagaagtgaaaaactagggtattaccaccgggccctcaggatggctttaaggttcttgtgaagcaccggcaacctgttactgctgttgctctatccaaggatagtgataagggattttcagcatcaaaaagatggaattattatgcattgggatgttgaaactgggaaatgtgagaagtatatatggccaagtgaaaatgtgttggtttcacatcacgcaaaaccaccaatatcagctaaaagaagcaagcaagtgctggctttagctgccagttctgatggtcgttacttggcaagcggtggcttggaccgtcatatccatctatgggatgttaggtcacgggagcacatacaggcatttagcggccatcggggaccaatatcttgtcttgcttttgctccggactcttcagagctgttctctggttcttttgatcgatcaataatgcagtggaatgctgaggataggacatacatgaactgtctatatgggcatcagaatgaaatcttgacaatggatgcacttagtaaagacaggattctaactgtagcacgggaccgtacgatgcatctttggaagattccagaagagtcgcagttagtgttccgtgctcctgctgccgcatctttagagtgctgctgcttcattgatgacaaggagtttttgtctggatctgatgatggaagcattgagctttggagcataatgaggaaaaagcctatccttataataaaaaatgctcatccagtattgtgtactaaccttaattcagttgacaatgatgacgagtcacctaaagaaaatggaatgcataaaccggaaaatgtgccatccgcagcccagtcatgggttggtactgttgctgcaagaagaggttctgaccttgttgcatcaggagcaggaaatggtttagttcgtctctgggctatcaaacctgattctaagggagccgagccattattcgatttgaaactgaatctgcttattggggctgttgggtaggatgttaaagctgtatgttgcttcatccattggaatcgggctcgggatggatttgttaattctcttgccatagcaaaatctggacgttttattgttgctggtgttggccaggagcctcgccttggaagatggggacgagttcgatcggctcaaaatggagtcgcaattcacccaatccgactaaaagatgtgaaagaggacttgtagagtagattgatgtcttgcattacagtggaacgtccatccatccagcctgcacttctgcagccacggcacaaaagaaaatttgttgaggctaactgggatacatgcaagcaatacaaatttggagggcactacagatgatttttgagctccggttatgtgtgacacggggaatttgtgaggcaattttgtaacttctacagccttctggagcggacaatgaggatttgaagatccatattttttgttccccatgtctggttaactgcattcttttttctgatagctagttctcgccattcgcttttgtacggggtttctccttgcttcgtgtcttgagcgcacgaatagtttgatttggctgcatgacctttatagggtagttccaacaatgacttacgagctagttgtaagcattttattttattctatattataattgaagagaagtaatttttgatcaatagttagtctcaaaatcatgtggtgaaggaagagaagcaattttatacagtattatgaggtactgctaaaagtttttttaactgctattgcttcacagcattatgc

SEQ ID NO: 2725 - DNA, 1080 bp, Zea Mays
ctttccatccttcgctttttaactgacaggatatcgccacatgattctactggggttaaaattcttatattattatctctgtttcattcagggtctaaatatttttaggtttgcaaacagaataccacttctctttgaacaaggtgctgatgtcatcacaagaactgctgcaaaaaggatctcctacaaaatcaatcaacagcaagataagattggtgtctttgtgagcattgtaagtacaaagatacctttcaaaggaaccggaaaggagtacattggggatgacataactgaaatatcatctgctgttaagtcagccctgaagcagtgctgtcttcaactgaagtctaagattgtgaagaaacttcaggctcgtgagcggcaggacaggaaaaggaacctgaacagatatattcctgatgttgcaagagcggttatggaaactctagtagaaattgcagatcaatctcccccaaaacggccacgttatgataaggaagatgaggaactccttgagaaggtaaattctcaggaggtaacggagatgacatttagagactgcttgactcagcatgttgaacaggtcgactatgaaatggcgctggactacgccatgcagagtggagtaagcgaggagccccgagaagcaatatatttgaactcacttgaaggatcttataagtttgttgacttacagagtccagtcttcgtgttcagatttgttcattgagaagtgaaacttacagttgtacacgtccatcgataccaagttcccatagtacctgggatggaaactgtccatgaattatattgatgttgtacctgaattttatgcttaggctgttgtgactgagctgttcatgtagcataggcattagtacattacaagttgctaagtagcttgagccaaggattcctctgtatgttgcttttagggagaaaataatatttattacatgtaattcaaactgcattgggtccaaaagttcagtactcatgagtcagaacttgagacattagctatataattctgaaggagaaaatataaaagttgatgcggctgcttgccacatgctgtcg

SEQ ID NO: 2726 - DNA, 1197 bp, Zea Mays
cttatcccaaaccccataccactcagctccactgccaccatggtgccgctccactgctcagctagcgtccacctccacttcctatcgccatctctccccctttcgtcatccttctctctcctctgccatcgcgtccgccgccccaccgccatccgcgccgaagctgaagtgcggcctccgctacctgtctccgcggcggagtcagagccccctgacgccggcgctgtggaagccgaaggtcagggacccgtggagctccgcgctccgacgctcttctcgactgatgacaatcccaccccgctccagactgccaccagtctcctcctcaccggcgccatctcggtcttcctcttccgcgccctccgccgccgcgcccgccgcgccaaggagctcagagtgcggtcgagcgggttgaagaagcccaacaatctcaccgaggaggccctggagaggctgagattgatgagcgcctcaccgatcgagaccgagaaggcaacttcgcccatccaggctctgctcggcgggattgcggcgggggtcatcgcactcatcctctacaagttcagcaccacagtcgaggctgcgctcaaccgtcagaccatctccgacagcttctcggttcgtcagattacaatcacaataagaacaattgtcactgggctgtgctacctagcaacttctgtctttggaatcaatgcgggaagattagtgaacaatctaatacactggcatcatctgatagctccacaagtagcagggaatcagacagtagtgacatgcaagtcactgacaaaagtaaaaactcagcagagaagcagagctagacatgtaatccagacagccaaaatctgagatctgagggtacatatctgatgaaatcattttaagcattccttctcattattagctgaaaaatctgatgagagcgatctcaactcgagagtttcaattatgctagtattccgtccaaaatccgtccaaaaaaaagaagagaactcaattctagatttgagctaagttaaattgtcttaagtttgattatgtttttttaaaaatatcattatttatatcattaaatatgtttgttataaaatatattctatgattagtggaagtacctctagttgagttggtatttctcaggactgtcgttggatttatgtgggaatgtcaaaggcttggccggtatttctcagg

SEQ ID NO: 2727 - DNA, 1946 bp, Zea Mays
ctctctaacaatactaatactactgcatcaatgtttgtatgtatagagagagcgcaccttatattataggtatagaataaaaagtggttacgccttatattatgggacagagggagtatctagctagctagttagttattgtgtgtgttgctcacctcagtacttctgcctgttcctttgccgccttgctctgcagggagatacccaaggaggtttacaacaacttggacactggcagccaggatgagaaatggtgggagggagtggacctccaaaagctcattctggctcacaataatcttgaggtgttaagagaagaccttaggaacttgtcttcgcttgttgttctaaatataagtcacaacaagatatcttcccttccagcagctatcggagaggttgacttctcaaacaattgccttactgagcttccacctaacctcgccacatgcccggacttgtccgaactcaaggcatcaaacaacaacatatccagagtaccagatgtacttgctggctgttccaagttaagtaaattggatctagagggtaacaagcttgtggcactttctgaaaacatgtttgtgtcatggacaatgctcacagaattgaatctcgctcgttacagcaaagaatctacttacagccatcccagaaataacttattgtcttcaataccagctgatattggcacgttatcaaagttaggcatacttgatctccattctaatcagctaaaggagtatccagttggagcctgcaacctcaaattatctttccttgatctatcaaataactcattatctggtctaccagctgaactaggtaaaatgactaccctaagaaagcttctgcttactggaaatcctatgaggacacttaggagttcattggtttctggaccaacaacaacattgctgaagtatctgcgcagccggctttcatccgatgaggaagcatcaggatccagaagcaccccaactaaagatgaccaaattgctgcagcaaggcgcttgtccttatcttcaaaggaactggacttgagtggccttggagtgaccagtgtaccagctgccgcgtgggagacaagtgatgtggtgaaactggatctttctaaaaattcaatagaagatctaccaaatgagttgtcattatgctcatcacttcaatccttagttttgtctaataacaagataaaaaggtggcctcacacagtggtttcctcccttccctgtctgtcttccttaaagctggacaataaccccttggtagagatatcatccactgatcttgtgcctctgtccaaacttgaagtacttgatctaagtggcaatgcttcagcacttcctgaaccttctgcagtttctgcattaccacagctgcaagagctttacctaagacgaatgaaactccatgaatttcctaatggtttgctgggcctaaaactgcttaggattcttgacctgagtcagaatcaccttacaactgtgccggagggcatcaagaatttcactgcactcattgagcttgatctgtctgacaacaatataacagcactcccagcggagctgggattgcttgaagctaacctgcaagtgctgaaactggatggaaatccgctaagaagcataagacgaactctgttggagcgaggaacgaaagcagttctcaagtacctcaaagaaaaattgccgtctgaataatatttatagaacaaactattgttggagtaatggaataaaatgtttttttgccactgtatctcagttttctggactgaattttgtgcaaaagtatctggaccttgtgtgagaagagagctttgtgagtgtgttgttggatatactggttatagtccacatgttttattggaacaaaaatattttctctgttcaatctttacatggacacaacctggaaagatgttatccaccgttgtatcgttc

SEQ ID NO: 2728 - DNA, 2757 bp, Zea Mays
ctcctgttccgaagttgcccgagtccgccgctccactcctccgtgattccatccatcggtctgacccgctaggtgctagtgccggcagcccgccactcctccgctcgcccgggtcctgacgctctcatccactgcagtcgccggcaccgcttgcagccgcagccgccggaagcttgttgtagctcgctagctaaacggtcagagccgagctggctccgtacccacgcagccacgcttactccgatcctccaaaatcgcggcgccactaatctaaagccctaaacccatgacgcagccgccgcaccacctccctctccatcgccagtaccccagcctcgcctccgtcgcctatggggcgacagcctaagccgcccgcgtccccatccccaccgccgtgcccgccctcggactcggacccggacccaggcagcggcttcgaccccatcgaggagtggctcgtggacttcgacccggccatgtcgagcgagctagaggcaaagggccccgaactcgctgagcaagcggcggcggttccgcttacgctggagacggcggcgcaaaagagcttcgagctcgagtttggtgtgaaggaccagaaggtcgaggtggtgagcagcgaattggacgggctgcttgccccggatcagcttctggtgtctgggatcggcgatttggccgtgagagaggatattccagaggaagcggttgctatgaagatggctgccacaccgcctgcagctgctgatactgatatgaataccactgtatccgttgaagtggaatcggaaggtggcaaagaagggcaggaggcaccggccgcacctgctgatgctgagatgatgaataccatggtgtccgtggaagtggaagctcaaggtggcaaggaagggcaggagagcagcgatgaagagtcggaatcagagagtagcgaggatgatgacgagctgtcatccagcgaggattcctcaagcagcgaggacgagaaagagcagggggtcaacaaggatgaggaatcaagtgaagcctcaagcagcgaagaggaagggctggaagttaggaggcatggtggtaaggctgataacctgcagagcctcctcgaggaaggcgagttgatgatggggagcgatgtggagaatgaggaacaaaagggaggcaccaagtccaaatatgaagcagaggttcttccaccagtcccaaaaattgaaatacagttggaaccacatcatcagactcttccagtagggactatttcagctataatgggtgaaagagtaattgttgaaggttcagtccaacacaaccccctgaatgagggttcaattctctggataacagaaagtaggatgccgcttggtatagttgatgagttgtttggacctgttaagaacccgtactaccttgtgcggtacaactctgaggaagaggtacctgctgggatcagtgcaggaaccgatgtctgttttgtagcggagtttgcagaccacatcctgaatatgaaggagctctatgcaaaaggctatgatgaatctgattctgtagacaaagatgcagaagatttacctgatttctctgatgatgaaaaggaggctgagtacaaacggtcattacgtcaagcaaaaaggcagactgatagacagcacgagcctatgaagacttcttgttacatgaagggatcacagcctagaggtagcggaatacggaagcccatgccgccaaggaacctggatacatcaacacgaggtcatcagccacaacctcattttcgccgctcagatatggctcctgcagcctcctcttcccaacatgggggtagatggagctgcactcgccgccaacatcatgcagaacctcctcgcaggagccagccaattccagcatcagtttcagaacctgaacttcagtggcgcaggagccaaccagttcccgcagcagtttcagaaccagaacttcagtggcggcacaggagccaaccagttcccgcagcagtttcagaaccagaacttgagtggcccagggaccaaccaattccagcagcagtttccgaaccagaacttcagtggcttcccaaaccaaatgcccatgccctttcttcagaccatgcaccagaccggaatgcctgcaaatccaatgccgttcggtggcagaccaccagcgaaccctccatctggtccagcgtctattgcccctatggggcaaggcaactttggtcagcctccaaatccacaaggatttacgattccggcgccacccggtgaagatgggaaacaaggctcgcctccgcagttcagttccaggcagtttcatcaagggagctcgtcatcctttggccggggaaggacgcagcaccgcggtggccggcattcctatggcagaggtggcagaggcggccggcaccccagataggtatctggagcgttgcccccggtgtagattcagtatgagtgttccagtcataatcgagacactaaagattatgtaataccagaagtatgtttcttgtaatgttgcttgctgagtggattggacatcccgtcgaatgacagcgtgttgtaatacacttcctgcgcccagtatgcgtatctctggctccatgtcaccatgatctagtggaaagaggataatttttcttctcatgcaaaggaaattggagtgcaaagaaactcttctatttataatggtgtgacaggttattgtcgtgctatcgtagtgcgttttttttgtggtggtggcattgcacataattattctgtttttttt

SEQ ID NO: 2729 - DNA, 2228 bp, Zea Mays
aacaatgacgcctcgcgctcccacctactgacccaccccacgccgcctcctctcccagtgggtcctccgcatctcccatctcccgtctcccctcttcctcctcccctgcgatctccaccgcatcacctccctcgaaccctagacccacccacgcgcccattgccttcggtcgccatgtccgccgctcagcttctccgtcactcgcgcaagctgcggagtttgcaaaatcctgtaggttgtgagaattttagttttgttcggcatttctccagcggttctgggtcctttatcgccagggaaaatggtattggaaaaagaaccagaggtaccagattttcccagcataaccagcctgcaaaacagctcgagacattctcagcaggagtaaatggaagctgcacatggagaatagcatccaacagccttaccccaagtgctgctagctggctcagtggttcattctcatgtggacaggtagtctcagcacggccattctcaagtagtgcagacctgcctccacatcaagaaattgggatgccgtctctttcacctacaatgactgagggaaacattgccaagtggcttaagaaggaaggagacaaggtctcccctggtgaggttctctgcgaagtggaaactgacaaagccactgtggagatggagtgcatggaagagggctatcttgctaagattattcatggagatggtgcgaaggagattaaagttggtgaggtcattgctataactgtagaagaagagggtgacatcgagaagttgaaggattataagccgtcatcttcagctgaacctgtagctcctgctgaaccaaaggctgaaccagaaccctcacagccgaaggcggaggaaaaaaagcctacgcaggctcctgaggcgaagaccccgaagattgaagaagcttctcaatctggagatcgtcccactatcaagtgtgaaaggtactggtcctgatggtcgtattttgaaggcagacattgaagattacttggcttctgtagccaagggtgggctgagggagtcttttgcagatccagggttaggttatgttgatattccaaatgcacagataagaaaggttactgcaaatcgcttgctagcatcgaaacagaccattcctcattactacttgacagtagatgcacgtgttgacaaacttgtccagttgcgaggtgaactgaacccactgcaggatgcttctggtggaaagaaaatatcaattaatgatcttgtcatcaaggctgcagctttggcccttcgaaaggtccctcagtgtaacagctcatggatgaatgattttattcggcaataccacaatgtgaacatcaacgtggctgtacagactgaacatggattgtttgttccagtaattagggatgcagacaagaagggactcggtgcaattgctgaggaggtgaagcagttggctcaaaaagcaagagataatagcctaaaaccagcagattacgagggcggcaccttcactgtatcaaatttgggaggtcccttcggaattaaacaattctgcgccatcataaatcctccccagtcagcaattttggccattggttctgctgagaagagggtgatacctggttccgctgatggccagtttgaatttggttcattcatgtcagctacactgagctgtgaccacagggttatagatggcgcaatcggtgcggaatttctgaaagcattcaagggatacatcgagaacccaacttcaatgctgctgtgaagttaggatggatgacctaacacaattttttgtcatgttaaataaccaggccaccaaagagtggcgtctccaaaccaagagcacagagccgtcttctccgttttgatattgccattgctaagtaggatcaacgtatacatgcattattggggtcatttttgggttttgtcctcacggataattgatggaaataaatatgaaagaagccaatcttggaaagtactctgattttgaggtcattgctatgcgtttaaaaaactgcagatccgttgatgctctcctcggtaagcgtgatttgatgttgatgatgatatcttgataggagggaggggtagtcaagaactcggttaatatgttacgatgcatggtcggaagttataatgtaagcagagtggaacgaaggtcgggaacatattttgtgcaatcgtgattgagtggttttgattttgtgcattcgttaaaattcaatagt

SEQ ID NO: 2730 - DNA, 2268 bp, Zea Mays
aacaatgacgcctcgcgctcccacctactgacccaccccacgccgcctcctctcccagtgggtcctccgcatctcccatctcccgtctcccctcttcctcctcccctgcgatctccaccgcatcacctccctcgaaccctagacccacccacgcgcccattgccttcggtcgccatgtccgccgctcagcttctccgtcactcgcgcaagctgcggagtttgcaaaatcctgtaggttgtgagaattttagttttgttcggcatttctccagcggttctgggtcctttatcgccagggaaaatggtattggaaaaagaaccagaggtaccagattttcccagcataaccagcctgcaaaacagctcgagacattctcagcaggagtaaatggaagctgcacatggagaatagcatccaacagccttaccccaagtgctgctagctggctcagtggttcattctcatggtagtctcagcacggccattctcaagtagtgcagacctgcctccacatcaagaaattgggatgccgtctctttcacctacaatgactgagggaaacattgccaagtggcttaagaaggaaggagacaaggtctcccctggtgaggttctctgcgaagtggaaactgacaaagccactgtggagatggagtgcatggaagagggctatcttgctaagattattcatggagatggtgcgaaggagattaaagttggtgaggtcattgctataactgtagaagaagagggtgacatcgagaagttgaaggattataagccgtcatcttcagctgaacctgtagctcctgctgaaccaaaggctgaaccagaaccctcacagccgaaggcggaggaaaaaaagcctacgcaggctcctgaggcgaagaccccgaagattgaagaagcttctcaatctggagatcgtatatttgccagccctcttgcccgtaaattggctgaagataacaatgtcccactatcaagtgtgaaaggtactggtcctgatggtcgtattttgaaggcagacattgaagattacttggcttctgtagccaagggtgggctgagggagtcttttgcagatccagggttaggttatgttgatattccaaatgcacagataagaaaggttactgcaaatcgcttgctagcatcgaaacagaccattcctcattactacttgacagtagatgcacgtgttgacaaacttgtccagttgcgaggtgaactgaacccactgcaggatgcttctggtggaaagaaaatatcaattaatgatcttgtcatcaaggctgcagctttggcccttcgaaaggtccctcagtgtaacagctcatggatgaatgattttattcggcaataccacaatgtgaacatcaacgtggctgtacagactgaacatggattgtttgttccagtaattagggatgcagacaagaagggactcggtgcaattgctgaggaggtgaagcagttggctcaaaaagcaagagataatagcctaaaaccagcagattacgagggcggcaccttcactgtatcaaatttgggaggtcccttcggaattaaacaattctgcgccatcataaatcctccccagtcagcaattttggccattggttctgctgagaagagggtgatacctggttccgctgatggccagtttgaatttggttcattcatgtcagctacactgagctgtgaccacagggttatagatggcgcaatcggtgcggaatttctgaaagcattcaagggatacatcgagaacccaacttcaatgctgctgtgaagttaggatggatgacctaacacaattttttgtcatgttaaataaccaggccaccaaagagtggcgtctccaaaccaagagcacagagccgtcttctccgttttgatattgccattgctaagtaggatcaacgtatacatgcattattggggtcatttttgggttttgtcctcacggataattgatggaaataaatatgaaagaagccaatcttggaaagtactctgattttgaggtcattgctatgcgtttaaaaaactgcagatccgttgatgctctcctcggtaagcgtgatttgatgttgatgatgatatcttgataggagggaggggtagtcaagaactcggttaatatgttacgatgcatggtcggaagttataatgtaagcagagtggaacgaaggtcgggaacatattttgtgcaatcgtgattgagtggttttgattttgtgcattcgttaaaattcaatagt

SEQ ID NO: 2731 - DNA, 1262 bp, Zea Mays
taaacattggacctgacccaagtgttcatatttattcgcataactgaacttttccagtatgttgaacaagcacggggcaactattcaactttgcaaggattagagtggaaaccccttttgtcttgagggaaaaaaaataaagggagaagctctcctgagaagcatatagcaccagcggaacacgggaacggcggaagcaaacaactagaaattccccagcccggttctttgcgtgcggttgatctcgtcggaggcccggccgcggttccccaatccgccatcgaattcgatggcggccaacgccgggaataagatccgcaacgccaagctggttcttcttggagatgtgggcgctggcaaatctagcttggttcttcggtttgttaagggacagtttgttgaattccaggaatcaacaattggagcagccttcttttcccagaccttagcggtcaatgatgagactgttaagttcgaaatctgggatactgccgggcaggagaggtatcatagcttggctcccatgtactataggggtgcagctgctgccattgttgtctatgacatcacaaatccggcctccttcacccgtgccaagaaatgggttcaagaacttcaagctcaaggaaatcagaataccatagtggctcttgctggaaacaaggctgatatgctagatgcgaggcaggtgccagcagaggaagcaaaggcgtatgctcaggagaatgggctcttcttcatggagacatctgctaaaactgcaatcaatgtgaatgacatattttatgagattggtgagatgagtaccatcctaaatctgttagtttgggcagtacatgggctgagaatcagttgtacagcaaagaaattgcttcaagggcaacaagctccaagcccacaggctggaatggttctgaatcagagaccaaatgagaggacggtcagcagttcttcatgctgctcttgagctgtgtttcaacctcgtagtgccgttatcaaatgtatcagaggaggtttatggaaaatatcccatgtcgcttgtgtggctgcctttcaggctgacgtgctcccattctgctcctcatttcctttcacatgttcgtcatgtaaatgccaatactaaagtgtcactgcatgggcagaagtgttaccaaagtgttgattgtgctcttatcatttgattaagcccctgcttaagttctcaattttgcatatatacatggtggagtttcatttgaactttttaaccgatgatataacca

SEQ ID NO: 2732 - DNA, 930 bp, Zea Mays
caggagttctggggaaatttcgccggccgggtgcgagcagagccgccgccgccttcttgcgtgggagatggtgaaggagcgggaggagcaagtggccattgtgcgcatggtgcttggcgagggtacaccggagatggacatcatccgtgctctccacatggccggcgacgaccccaccaaggccattaacatcctcctcgacctcaacaaggctgcgccacctctcccgccgtcgccgtctccctttccctgtccatcgccctccccttcgccggggaaacccgccaaagccctcgtcgactcaaccccaccatgcaaagcccctacccggcccatgcccacggcagagaaacctaagtccactacaagcaacggtggcagcgaggagcactggtggctggtggggagcgccgagatggtggggctgtccacctgcaagggaaggcgaattacctcaggggacgtggtcaccttcagcttccccaatgccacaaccgccgtgggcaagagccgtccgagccgtcccgccctagcttcctgctcctccgagatcatgcgcttctccaccccgagccacggggaggtgggtcgcatccccaatgagtgggcaaggtgcctccttccccttctcaaagagaacaagttaaaagtcaagggctcgtgcaaatcagctcccgaggtgcttaccattatggacactgtcctcttgtcagtgagtatatatatcaacagctcaatgtttcatgatcaaaagcaatcgtcacccaaagcagctcgatttgctccatatgactccacatttcaccccctacctgcacttttcaaattgataggacttgctccttttattaaggccgcttttactccagaagatctttattccaggaagcggccaactgaaacaaagatattggccttttatgttttttc

SEQ ID NO: 2733 - DNA, 1004 bp, Zea Mays
gctaaaagagaaaaatagaatacactttattacctgatttagcaccgcataagatacatgcaaagattcaagtacatgtatctagaaagtgtcttttccgaggtgctactgacagtggaccactacaacatgttgatatggttttgtctgatcgagagggtaatgttatttatgctgaaatccctggaaatttagctgaacaaaaagcaacaaacattgaaaaaggaggagtttatgacatcaacagatttagagtgtgcgcaacaaaaactgtgttcaaaatagtggatggggacaaaatgatccagttcacatttcataccatagtaaaacgtgccacaagccctccaacaacatttccattatatgtttatcggctaacatcgttttatcaaattgagcctcatgttcaaaccacgaatatctttgttgatgttcttggtgtcataactgaaattcatgaactgacacatgtgcatgtccggagtcaactaacaccaacagtgacaaggaccattatcataaaagatctcaccaacaaaacaatgaagatcactttatgggcagatcaggcaataatgttcactcttcatgacgtctacgatgcaaatacaaataaaccaattcttgtgctcttcgtcgagtgcttaccaaaattttacaaaggtgtctacctaagtggtggtcctgcctgtagatggtacttcaatccagcaattccagaggcagaaccttatcttaccagtgcaaacaagagtaatatcaatagcccagaaaaagatgatggcgataaggataccgcacagacattacctattttcgacttctttacaaagaacttcgatatgtgcagcttgacacagtacctaataacaaaggaaaaggtccaacagatacaattgaatcgccatctaaaaggttacgctccgtatcataccctcctacatgaattattttccttcctgttacgatatcgtagttccattaccaatcttagttactaa

SEQ ID NO: 2734 - DNA, 3032 bp, Zea Mays
ctttcaggccttcaccgcttcaaacctcgtctgatcctctcacctgctcaccgagtcacctgctgtccaaggctccaagcacccgccaatcggccgctgccgaacccgcaaccggaacctgcctccaggctgcttccaccgggcgagggcgagggcgaggcacacgccgcaaaccgcagtaacgcacacgccggggcacgccgcacggcacacaacaaacaacgtgccctcgtaagcgtctcctcggctcgccttctcatctgctcctattggattttgcggggctgggcgtgagcgtgtgggctcttgtagcgggggatccatgagcagccaaccctagcttgcctggacgggaactctctacagctgtctttcgcgattctcctcgggcgtgggttttgttgcaggaggtgtttcaagctgcattgagccaccgtgcccggagtttcctgtctcttagtccttcgttcagttgcggatttctttgctgcgttctggagtggaggatcgacgtgctcctttcgtggctgtttgatgcttgttgagttcgagtaggccctgcagtctacctggttctattgtgccccgacagaagatcctgagagctagagctgtttttttccctacatatagttaagttaaattatctgcacagccgaagatgtccgcgatcatgttatgtacctgcagcggggaccagtccaagtttgaagatcttcctagatcgccagaatctcttgcaacacgtgacttttcagcgaattgctcttcttcaaagatggcaagtcgagaaacaactcctgatgacagccaagtaaatgaagtagaatcagacctaaaagaaaccctttcactaaattatgaggaggctcgagcattgttaggtagactggaacatcagagagggaactttgatgcagcattgcaagttcttcaggggattgatataagaagcctgagaccacgaatgaccactgctattgctgaaagtgtcaagcctagaatgcccccacgctcttcaagacgaaaatcttcacaagtgaacggaatgcttatgcatatgtccatgcattctgtaagcttgcttctagaggccatactgcttaaagcaaaatctctggacacccttggtagagcagcagatgctgcagaagaatgcagaaccatcatagacattatagagtctgcatggccatatggtgttccggatggtacttctgaagagtgtaagctaatagacatattccattcggctctagaatatcttcctaaactgtggatgaggagtggttgttttgatgaagccatcatcgcataccgcagagctcttgcaaagccatggaatctaggttctcaaaggtccgccaaattgcaaaaagagttggcagtgagtctgttgtactgtggcgttgaagtgaagttccctcaagaattttctcaggaaaggaatctggtaacccctgggaacaacttagaggaagcaattttgttattactcatgctaacaagaaagctatttctccgagaaatacaatgggatcctgaccttgtgaatcatttggtgtatgcactctcattatctgggcactatgaagttttggccagccatcttgaaatgctgttgcctggaacctataccagatcagagagatggtatatccttgcactttgctacagtgcagctggcatggatgacagtgcgttaaacatcataaggaatggtttttctgtactggagagaaagggaaagcctcatgttccatctcttcttttaggagcaaaactatgttgtaagaacccaaagcatgcttccgaagggataaagtttgcaaataaagccatgaagtctttcagaagtcgtgatctgcatttcatcagcactacaaaacactttcttggtgtttgttatggacctttttctaggtcctccacctcatacttggacaaatcgagactgcaagataatgcactgaggctgttgcaggatgctgccacaacagcgaagtataatcctgaaataatgtatagcctagcttgggaaaatgcgatgcagcgcaaactcaatgcagctgttgaaagtgcaacagaatgtcttgagatggtgatgggtggttctgttagtgcctggaagttactaattcttgtattatctgcacagcagaatttgcaagaagctgaagcagtagcagattttgcaatggacgaggctgagaaaaatgatcagttggatattttgagactgaaagcacaaattcaagcttcccgtggacagttcaagtctgcagttgaaacttttcgggttttgcttgctgctatccaagtaaagaaggaagtctggaaattgaccacttgtaatgaggttaaatgcctacaaaagttggagatggacgcatggttagatttggcatcaatctattcaaagcttgaggcatggcatgactcaaacatctgccttgacaaagctatatccattgatttctattatcccaagtgttggcatgtcagaggtcttctattggaggctcaattcttgcacaaggaagccctgatggcattctctttcgcgctatcaattgacccagattacgtcccgggcatggtttgtatggcaggaattctccgaaatattggaggggattcattatcaattgcaagaacttacttgcgcaatgccctccgtttagagcctacaaaccaccgtgcctggttgagtcttgggcttgtcctgaaagctgaaggatcgctgcaggaggccgcggattgcttccaggcagcatatgagcttagagaattatcaccaattcaggatttctctgagcaactcccgatcatgctgcattaggaatctatagcaaaggagttcacattttttgtggattttccccatagttgtcttagttattaacttatcccttgcaaaggtaggaaacatatgtttttgtgaatgtaaattagtccacttttgttcgtgaggaaatttactcgctcttgaaaacatcaaagttatataacttactagtacaattgatacg

SEQ ID NO: 2735 - DNA, 1150 bp, Zea Mays
gaatcctgcggatagcctgacggctcgtttgaccttcgtctgtcgtctcgtctcgtccacctccccagcggcgcgtgaagcttgaggcaatccccgccctctctagccctgcgcaaccagttcggttccatggccaacagcaatctcccgcgccgaatcatcaaggagacgcagcggcttctcagcgaaccagcaccggggattagcgcgtcgccgtcggaggagaatatgcggtacttcaatgtcatgatccttggccccgcgcagtcaccctatgaaggtgttcccctcatttatggttggctttacttggcgtatttttgtatggatagtctgtgagcttctaatgctgtaatgtttacactgttgcatgtgcattcgatattgtgagccccgtttgtagtgttgatgtgttttgtagacaatcatcattgctgttacttgttagtgtgttctcttatccttatgcagccatacgcctcgttgtttcatggagaattcatgaatgaacagtgaattagcatagatggattaccaacatggtctagtagcagagtacaagtggttcatcgcgtcatcggtatggatataaggcactaaacaggaaccttcatatattcatatccattcatctgtgccaagtgccagttcaagactctagagtctacacctcttagtggacctggttttatcagtctgctttcgggtatctaaagaagtatgtccaaccagaagtacctactcacttatacatatgattaggggcaaaagttttgactcttgttaggttcatactggtggcatattgactaatctgcccatgacagaatcccattaaatctagctatcattcaatttattgatattcttataatgcaaaagattcttcaccgtcttctctgttcaatacaaaataggtgaaataagaggtgtgtagatagttattagggatgcaaatagcgacaagttcccatataatgatttcgtgttaccttcttgtgcttattcatttgttcctggacgcctgatatagtttagtctgtttatatgttgaacaggtggagttttcaagcttgaactattcttgcctgaggaatatccaatggctgccccaaaatggttagatagaagtacaggcctgacgcagtcg

SEQ ID NO: 2736 - DNA, 2578 bp, Zea Mays
ctgtcgggactagcctcagcgcagcggttgccgcggctgtttctgcttgctgtcgccggccgcagtctccgccgcggctcacggatgccctgcatcctccttcccgcggccgcgcttaatcgaagccttcttctgcaccaaccttatcctgtcagctggaaacgccaaattctccaaaccctagcgccaaaatccccattctgatcgctgcaaccggagccggattctcttggtttacgcctggcgctcgtatcgtgtctccgcatgatgcaacgagcacgcgcatgaactcgatggatgaaatcaacctgctgcggcaggcgcagcggcagcatcagcatcatctcatggtgcgcggcatcggcgaggagatcgacctcgagatcggccctgtcgacgatccctctttttccggagcttccttagtggccgttacgtccacgcacgacactgtcgttcacgccgacgaccacaagagcctcctcatcccgtgttcgcagcccggcgcggcggacgggctggcgccgcagcagcacctgtcgcagggggaagagcatgacgggatgctcaggtcgccgtcggggcacaccaagaagaagaagaaggtggtcaagaaatggcgggaggagtgggcggacacctacaagtgggcctacgtcgccgtgcacgacaccaccaccaggatcttctgctcggtgtgcaaggagtacggccggaagcaccgccggaatccatatggtaacgagggaagcaggaatatgcagatgagtgcgcttgaggagcacaacaatagcttgttgcataaggaggcgctccggttacagatggcctccaaggagaagttgcagcctcccgagattgaggggccggtctatgtcaaagctttatcgaaaacagcagcatcaatacttgaatgtgtcctaaggagggatccccatgaagctgaatatatacagtcgatccaggaggtggttcattccttagaacctgttttggtgaagaatgcccaagtgccatggattgatgacagaggtgaagcacacgtcaatagaggtttccgtgtgcaattcagtcaggcgttaggtccatgcaggggtggtcttcggtttcacccatccatgagcttaagtgtggcaaagtttctggcctttgaacatactttaaagaatgctttgtcactatataaacttggaggtgctgctggaggaagtgattttgatccaaagggaaaaagtgataatgagataatgcgcttttgccaaagtttcatggatgagctgtatagatatttgggccctgatcaggattttcccgctgaagatattggtgttggtccaagggaaatgggttacctttttgggcagtatagacgtctttctggtcattttcagggaaattttacaggacctaaaattttctggtcagggtcaagttttcgaacagaagctactggatatggtctggtgttttttgcacgtcttttacttgctgaaatgaataaagagcttaaaggattaagatgtgtgatcagcggttctgggaagatagcaatgcatgttttggaaaagcttttgccttgtggagccattcctattactgtctcagattcaaagggatatttgttagatgaagatgggtttgattatatgaaatattcacttctaagggatattaaggctcagcaaaagagcctcaaggagtacttgaaatcatatccacatgctaagtatattgatgatgcaaaaccatggagccagcggtgtgatgttgcatttccttgtgcatcacataatgagattgaccaaggggaggctgttgcaatcagcaactctggttgtcgtgttcttgtcgaatgttcaaatatgtcgtgcactgttcaagctgttgatatcctaagaaaggcaaaagttattgttgctccagcaaaggcaactgctgctggtggggtagcacttggggagattgaattgaatccagagtttaatttgatgcaattgtcagtggaggattttgagaatagaattcaagatgcaataaagcaaacatatgaaaggtcggtcaaagctgctcaagattacgggatcatgaaagaaagccccgagtttttggtccatggcgcgaacatttgtgctttccttaatatcgcgcaagccatgactgaccagggatgtgtttagttaggcctggattctgtcaagaagcttcaactggagctttctgcaaccgcgagggaaaaaactttctgacaactagaggtgctttgatgcttaaactttgagtagttctgcacaaatcttgaagccctacaaaacagggagtaactaggatccatttacccctgtttatgctagaaatgtgtacagctaaggtgtaggaaaggcaactaggatccatttatgctagaaatgtgtacagctaaatgtaaatggaaagttctacattgtatgcaaagcctatatccgcaccatctgttacaccaatttgatttcattgttatgaacgacatattattctagtgcaaccacgctaattggtgcaacagtgcaatcaagataagacacgacaatggagttgagag

SEQ ID NO: 2737 - DNA, 1452 bp, Zea Mays
cttttcaccaatcaatttccggtcacgcgcctgctacaatctgacagcacagttactgatgctacaagatgatagcatgacgatcctaatggcgttcagagcacctagtgtggaaatcattgggctcacgaccatattcggcaacgtcgacacaaagggcgcaacacgtaacgcgctattgctgtgtgagagagcaggatgccctgaagttccagtagcagagggcagccatgagcccctaaagggaggaaagccccgtgttgctgatttcgttcatgggtcagatggcattgggaatctgtttcttcctgcaccctctgctaagaaggttgaggaaagtgctgctgatttcctgattaataaggtctctgagtttccaggagaggtctctgtgcttgcgttgggacccctgacaaatgtagcattggccatcaaaagagacccttcctttgcaagcaaggttaagaaaatagttgtactgggtggagctttctttgcggctggaaatgtcaaccctgctgctgaagcaaatatccatggagacccagaagcagctgacatagtttttacttcaggagcagatatcgttgtggttggcattaacataacaacacaagtctgcctgacagatgaggatctcttggagctaagaaactcgaaagggaagcatgcagcgttcttatatgagatgtgcaagttctacagagattggcatgccaagtctgatggttttcatggtatttgaaattaataatatactactgttatatgcttttgccaattaccatcaaatatgagaagaaacacgcttctgacagaaaatcgctttctgttcaggaattttccttcatgatcctgtgagcttcactgccgtacttcatccagagtacttcacattcaagaagggtgtggtgagagtagagacccagggcatttgcactggccacactttgatggatcagggattgaaaaagtggaattcagagaacccatggtcagggtataaaccgatttcagttgcatggacggttgatgtgccaaaggtcatcagctttataaagaagctgctcatggcaccatgagcaaagtacaaccatttaacgacgtgtcgacatcagcgctctctgatgtccaagaaaatttgacgagtacagatgctctttctcagttgcactgtaattagttcctggacctaggatgattcctattcctccaatagtaagaggaacctttcattgtgaaaggtcatgcagcagtctcgaataccatgaagcaaattctggcatacgacatcatgtctcacacatttgtatcaatacatttcgaatcaataaagtttccctcactctttactgtgcacttttctcaaagatcacaatcttgttgtaatgtgcctctcatgtaaagcaaagtaccaataaggcatatgatagttttgatacaacattcttc

SEQ ID NO: 2738 - DNA, 1783 bp, Zea Mays
agaccccctctcgcttcgcccctcctcatcctctctcctctctcccccgccccgttcgtctccggcgagctagggtttgcccccccgccttgccaccccacggttcccgccatccttggatctccagccatgtacggcggagacgaggtttcggcaatcgtcatagatgtgggctcttacagctgcaaggcgggctacgcaggcgacgacacccccaaggccgtcttcccatcggttgttggttcaattgaacaaactgaagacacagatgaccccaagccagagaaggaagctgactctgcatcagattctaagaacggtgccaagcccatggatgtggacaaagccaagacaaaacgcagactttatgtaggccaagagttagagttcaggagggatcacatggaggtgatttcatctatgaaagatggaacggtaactgactgggatattgttgataatatatggaatcatgctttcagacggaggttgttgatcaatcctgaagagcatcctatgctcattgctgaaccatctacaaacactgcacagcaaagagagaacggaacttatgtttgagaactacaaagtgccagcgctgtttctagccaaaaatgcagtgctcacatcttttgcgtctggacgagctacatctttggtggttgacagtggtggtgggtctactgtggtttctgctgtacacgatggttttgttttacagaagtctgtgtcgacttctccagttggcggtgaatttttaactgactgtatgatgaaaagcttggagagcaagggcatcgtcattaggcccagatattcatttaagaagaaggaaatcagtcctggagaatataagattgtagatcttgatcttccaaacacaactgagagttacaggttgtactgcatgagagctattgctagtgacgtcaaggagtctgtttgcagagttccagacactgcttttgatgaagtggcatatgcaaatgttcctacaacttcatatgagcttcctgatggacaaactattgaagttggtgctgatagattcaaggttcctgatattctatttaatccatctctatcccagactattcctgggattgatggatttgcagattcaataccagtccgtggccttcaacgaatggtcattgatagcgtaaataagtgcgacgttgacatacgaaaagagctattcagtaacatcttgctctctggtgggtcatcatcaattctgcagttaaaggagcgcctggagaaagaagtattggaggagtctcctcaagctgctcgtgtcaaggttatggcaagcggaaactcagtagagagacgtttcagtgtttggattggagggagcattctagcatctcttgggtcgttccagcagatgtggttctccaaagcagagtatgaagagcatggggtttcctatattcagagaaagtgcccttgaagcaggggaaggaatatgtacaaccaatattatgctttacgagccttattgttgccaaagggttccttgtgtacaacagcctggtgccttgccatgttggccaatgaatactcgagactcttttcaagtgacgtttgttgtcttcatggctagttaattttaggtgatgtaagaatgagacgggaccccatcttgttctgtaccggggctaattctttgccagcacacaaagagccaagacgattgttgtaactcgggttatttaaatcccagctgcagagcaaatacacaactttaaacgtgtagcgagcaggcagaacaacgatg

SEQ ID NO: 2739 - DNA, 2326 bp, Zea Mays
agaccccctctcgcttcgcccctcctcatcctctctcctctctcccccgccccgttcgtctccggcgagctagggtttgcccccccgccttgccaccccacggttcccgccatccttggatctccagccatgtacggcggagacgaggtttcggcaatcgtcatagatgtgggctcttacagctgcaaggcgggctacgcaggcgacgacacccccaaggccgtcttcccatcggttgttggttcaattgaacaaactgaagacacagatgaccccaagccagagaaggaagctgactctgcatcagattctaagaacggtgccaagcccatggatgtggacaaagccaagacaaaacgcagactttatgtaggccaagagttagagttcaggagggatcacatggaggtgatttcatctatgaaagatggaacggtaactgactgggatattgttgataatatatggaatcatgctttcagacggaggttgttgatcaatcctgaagagcatcctatgctcattgctgaaccatctacaaacactgcacagcaaagagagaaagcagcggaacttatgtttgagaactacaaagtgccagcgctgtttctagccaaaaatgcagtgctcacatcttttgcgtctggacgagctacatctttggtggttgacagtggtggtgggtctactgtggtttctgctgtacacgatggttttgttttacagaagtctgtgtcgacttctccagttggcggtgaatttttaactgactgtatgatgaaaagcttggagagcaagggcatcgtcattaggcccagatattcatttaagaagaaggaaatcagtcctggagaatataagattgtagatcttgatcttccaaacacaactgagagttacaggttgtactgcatgagagctattgctagtgacgtcaaggagtctgtttgcagagttccagacactgcttttgatgaagtggcatatgcaaatgttcctacaacttcatatgagcttcctgatggacaaactattgaagttggtgctgatagattcaaggttcctgatattctatttaatccatctctatcccagactattcctgggattgatggatttgcagattcaataccagtccgtggccttcaacgaatggtcattgatagcgtaaataagtgcgacgttgacatacgaaaagagctattcagtaacatcttgctctctggtgggtcatcatcaattctgcagttaaaggagcgcctggagaaagaagtattggaggagtctcctcaagctgctcgtgtcaaggttatggcaagcggaaactcagtagagagacgtttcagtgtttggattggagggagcattctagcatctcttgggtcgttccagcagatgtggttctccaaagcagagtatgaagagcatggggtttcctatattcagagaaagtgcccttgaagcaggggaaggaatatgtacaaccaatattatgctttacgagccttattgttgccaaagggttccttgtgtacaacagcctggtgccttgccatgttggccaatgaatactcgagactcttttcaagtgacgtttgttgtcttcatggctagttaattttaggtgatgtaagaatgagacgggaccccatcttgttctgtaccggggctaattctttgccagcacacaaagagccaagacgattgttgtaactcgggttatttaaatcccagctgcagagcaaatacacaactttaaacgaaaaaaaaacacacacacacacagacacagcctagctgccactaggcgtcaggtcaccgtcagtgctcaacacactcatatcaatcaaagggcagtgcgtctgtgagtgtgaagtgtggaggtggatggggggaagtcggtggaacactgcctacctcaccggtgtgtggccaaacctgccaacctcgaggctagtgattttgacctgtaaacattattgtggaaatggaccattactgccacacggaccagatcatgtgctctacttgtacacgcatccaggaagtcaaactgaggccagaatcgggcacaactgttgacagagtcgagcgggttgaacgcatggcagtaatcactttatcagataagagaagaaataaacggtttttttatataaaaaatgaatcaggcaaaatggcactgtattcgccattaaggcgcgattgattcgttcttggcatgtaaatgcaatgcagtaaataacagattgagcgcgcggtgttgtgttatgaattatgatggtcgtgcgtgcgtggaagcgagagagatagagagaggatgaac

SEQ ID NO: 2740 - DNA, 2493 bp, Zea Mays
agaccccctctcgcttcgcccctcctcatcctctctcctctctcccccgccccgttcgtctccggcgagctagggtttgcccccccgccttgccaccccacggttcccgccatccttggatctccagccatgtacggcggagacgaggtttcggcaatcgtcatagatgtgggctcttacagctgcaaggcgggctacgcaggcgacgacacccccaaggccgtcttcccatcggttgttggttcaattgaacaaactgaagacacagatgaccccaagccagagaaggaagctgactctgcatcagattctaagaacggtgccaagcccatggatgtggacaaagccaagacaaaacgcagactttatgtaggccaagagttagagttcaggagggatcacatggaggtgatttcatctatgaaagatggaacggtaactgactgggatattgttgataatatatggaatcatgctttcagacggaggttgttgatcaatcctgaagagcatcctatgctcattgctgaaccatctacaaacactgcacagcaaagagagaaagcagcggaacttatgtttgagaactacaaagtgccagcgctgtttctagccaaaaatgcagtgctcacatcttttgcgtctggacgagctacatctttggtggttgacaggtgatcattttcttcgcttcattccactaagaagatacttttttctcttatgaaacaatagtccgctttgcccatgttagattggtgaatgcatctttttatgctgcctgcttccattggttcctcctctttattcaatatagaatatacaaactatatttttgcttcattagtcagacacagttgcataggtactattagtccatcattcactccatgggaataaaatgatttgagaaactgaaagttgatgctcttgcccttgttttgtgacaagattctataccgttctatgcccttaccatgattgtcatattggtttaacgtgctagagcatgattgagttaatctgtgcttttgagcttttaggtgtagccatctctgttattttataattttggactgtctcaatttttaactctgccatgtgtttttgggatcacttctcgccttagcagccatttagcccatttaaacggtacacgtaggccagccatgcttgttaaccagcagtctagcctgtttagccatctaaataaggtggccaactatttgacgtttttggttgacaattgtttgggactctgttggtgtaacaaataacaatattatcactggttcagtttgttttattcccgatggcttttgggacctcttcatgagaaacatagctggaatatgataatatggctagttttggtgcagtggtggtgggtctactgtggtttctgctgtacacgatggttttgttttacagaagtctgtgtcgacttctccagttggcggtgaatttttaactgactgtatgatgaaaagcttggagagcaagggcatcgtcattaggcccagatattcatttaagaagaaggaaatcagtcctggagaatataagattgtagatcttgatcttccaaacacaactgagagttacaggttgtactgcatgagagctattgctagtgacgtcaaggagtctgtttgcagagttccagacactgcttttgatgaagtggcatatgcaaatgttcctacaacttcatatgagcttcctgatggacaaactattgaagttggtgctgatagattcaaggttcctgatattctatttaatccatctctatcccagactattcctgggattgatggatttgcagattcaataccagtccgtggccttcaacgaatggtcattgatagcgtaaataagtgcgacgttgacatacgaaaagagctattcagtaacatcttgctctctggtgggtcatcatcaattctgcagttaaaggagcgcctggagaaagaagtattggaggagtctcctcaagctgctcgtgtcaaggttatggcaagcggaaactcagtagagagacgtttcagtgtttggattggagggagcattctagcatctcttgggtcgttccagcagatgtggttctccaaagcagagtatgaagagcatggggtttcctatattcagagaaagtgcccttgaagcaggggaaggaatatgtacaaccaatattatgctttacgagccttattgttgccaaagggttccttgtgtacaacagcctggtgccttgccatgttggccaatgaatactcgagactcttttcaagtgacgtttgttgtcttcatggctagttaattttaggtgatgtaagaatgagacgggaccccatcttgttctgtaccggggctaattctttgccagcacacaaagagccaagacgattgttgtaactcgggttatttaaatcccagctgcagagcaaatacacaactttaaacgtgtagcgagcaggcagaacaacgatg

SEQ ID NO: 2741 - DNA, 3927 bp, Zea Mays
ctttgaggcgcctaagacttccaaagtaaacacttcacgagcactactccttgctgtctccggcaacaagactttgagttgtaatgtattttttcgtttgggtgcagaggaaacacgaacagagaatagattcaactgtgcttgcaaagaaaacaagaccaaaggatagattcaacagtgcttttgctttattggtttacgttagaggagaagaacgtaccaaaacgttctccccctacccaaccacccccaaacccgtagaattcaaaataaaaccttacaccttgtactagaaagaaaccatggcgactctgcattccatggtgaccctgctgctgctgccgctgcttctactcacagctcggccggcgtcttcctcctcctccatcgacaggtacgaaaaacaccatgaccgtgaagcactgctggcactcaaagaggctctgataggcagctcgggactactaagctcatggaacagcagcagctccgacgtgtgccgttgggccggcgtgacatgcagccgccggcacgcgggcagggtggttgctctgagcctgcgccagagaaacctgggaggcagcatctcccctgccatcggcaacctcaccttcctcaggtcgctcgatctcttcgacaacatgctgtcaggggagataccgcgcactatgacacggctgcgtcgcctgagcttccttgagctggcgtacaactatcttgctggcgagatccctgaaggcttggccaactgctccaacctcgcgtacctgagcgtagaggtcaatcagcttcatggcgggatccctagcggtctgggcttgctgtctcggctacaagtcctgtatgtcggcgagaacagtctgacagggcatgtaccgccatcgctcggcaatctctcggcgctgcagaggctggcactgtatcagaacaagctggaaggagccatcccagagggcctttcccgtctgaggtatctccggtacatccaggcggcgaggaacagcctctccggcacgattccgcctcgcttcttcaacatatcctctctccagtacttcggtttcagctcaaacaggctgcatggtagactgccaccagacgcaggcaggcacctgccggacctccaagtgctccttcttggtggcatcgggaacaacttttctggaacactcccggcttccctctccaatgccactaaactacaagagcttggtcttgctcacaacagcttcgaaggaaaggtgccgcctgagatagggaagctctgcccagagagcgttcaattggggggtaacaagctgcaagctgaggacgatgcggactgggagttccttagacatttcaccaactgcacccgtctagcggttctagatgtcggtggcaacgcccttggaggagtgcttccacgcttcgtagctaacttctctgggccggtgaatactctgatcatggagaagaaccggatgtctggatcaatccctctgggtgtcggaagcctcgttcaccttgaagacctggaattcgggggaaacaacctgcgtggtgttatacctgaggatattggaaggcttcggaacctcaagtttttcacgctggaggagaatctcctgtcaggaggtatacctacctccttcggcaacctcacgcagctgctcagccttttcctgtcgaacaataggctcaatggctccatccctgagaaccttgggagcttgcgcaggttaacgtccatggcattgtccttcaacaggctcaccggtgcgatccccggagcattattcagcctcccgtcgctagctgattcattgctgctttctcataactacctttctggcgtacttcctccacaaatcggtagcctcaagcatgcgacaacattggatctgtcaacaaacaacttatctggagaagtaccaggagcgcttggagactgtgcaagtctagtatacttgtatctggatggcaatagcttcactgggagcatccctccatcgattggtaatctgaagggcttgagcacgctgaatttcacaaggaacggtctgtccggtagcatccctcaggagttgagccagattcatgggctgcaaaggctttgcctagctcacaacaacctgtctggagccattccacagctcctccagaactcgagcgctcttgtagagctggatctctcctacaaccatctgggcagcgaggtgcccacacacggggtgttcgctaacatgagtgggttttctgcaactggaaatgatgggctttgtggtggcgttgcagagctgaaattgcctccgtgtgaggtcaagccacacagccaccggaagcggttgcgactgaagatttttcttccagccattggcatcgctatatgtttatctcttctattggttgcgctccttctgttcaaagggagaaaagggtcggacaggatcagtgctacgcgaaaccatttgttggagaacaagtatccgagagtttcatacctccagctctttgaagcgacggatggttttgcccctgctaatctgataggagctggaaaatatggatctgtttacaaaggaagactgtctatcacaggtgttggggattctgtagtggctgtcaaagtgttcactcttcagcatcctggttcttccagaagctttttggctgaatgtgaggcgctacggcaagtgaaacataggaacttgatcaatattatcacctgttgctccagtatagaccctagagggaatgacttccaagctctagtgttcgacttcatgcccaggtacagcttggacaggtggctgcatccaagaagcgatgaggagacacacaagttgagtctaacccaactgttggacattgcgactgatgtagcagatgcgctagactatcttcacaacagtagccgtccaacagtgatccactgtgatttgaagcctagcaacatcctccttggtagcgactggactgcttatgttgctgactttgggcttgcaaagctgatcagtgaatccatggaccaaccaaatttgaatattgggactgaaagcactattgggatacgaggaaccactggatacgtccctccagaatatggagcaggtggtcaagcatcagttgctggtgatgcctacagctttggggtcactctgcttgagatgttcaccgggaaagcaccaactgatgacatgttcatagaaggcttgaccctgcacttgtttgctgaggcagggttacctgacagggtatcagaaatcattgacccagaacttttcaatgcggagctgtatgaccatgatcctgagatgctcagttgcttagcttctgtgatacgagttggtgtctcatgttcaaaggacaacccgtcagaaagaatgaacatggaacatgctgctgctcagctacacagaatcaaggagtacattgaagaaatcccttaggccatgttcgtttgatcccaaaaccataaggattgagggggattgaaagggattggggaggattttgacttgtaggggatttaatccccctcaatccctatggattggcacaaaacgaacaaggccttagggtttaaatgggtataacttgatgtcctttatttatttttccaatgcagagcacttctaacaacatcattaccattgaggtggcccttttgaatgttatcctggcattcagatgggctttgtgcaaatatctgtatcaccacatcaatggaataagaatagagcattgtcaggtttacctacttgttcgtaagcttttattatgcatgtgcaatcttcgtggttcctgaatgctcaattattataagctgtccaaaaataacttccaagatatatacaaatttcacgtcatctcattttcatctccagttgttttccccttatgcatgggttcaacttcactttccacggaagacattctgactaa

SEQ ID NO: 2742 - DNA, 2051 bp, Zea Mays
atctcctggtgcttctctcaagccaccgacgctcaggctctctacatcctttagcaggcgccaactccctggagctcgccttcctgctggccgcccccagcaccgacgccccttctttttccccatctccttccttggcgcgctcgcccaggtcacgcgtgtccctgctcgcccaggccgcgacctcgccaaaccgcgcagtccctgctctccttccccagccgcgctcagcccagcccttcctccttcgcccttgtcgagctccctcagctcgcccccaaccacaactgcacgccaacctcgccctaggccatggagcagcaacaaccatggaaccctttcgtgtcgcgccctcgatgtgctcgacgaaaggatctgagggtaagagaagccaagacctagagcgatgatcactaggtgttcggtgaaaaggatgaaccggtgatcgtggttggtcttgcaaaatccgagttctattttatgttgaaaatcgggcaggctctactacctttacctggcgatgctaaaagccaaccagcactagcaacagcgactcaatttgctgccacaaacatctgcaccagcagaggccgctaccgcagaagccaccacggaatcagatcctgcaacgtccactcctctttcaccttatacaaattacccagattgtggtgcccgacgaggtggggcgtcgtttgagagggccgatgaggcgtcggagaagaagcagtcgaacccgatgcgggagatgaaggtccagaagctcgtgctcaacatcttcgttggcgagagcggtgatcgcctcacccgcgccgccaaggtactggagcagctgagcggccagtcaccggtattctccaaggcaaggtacactgtgagatcgcatgctatgtgacggtgcggggtgagaaggcaatgcagctgctggagagtggcttgaaggtgaaggagaacgagctgctgaggaggaacttcagtgacactggttgctttggatttggtatccaagagcacattgatcttggcatcaatgacacgaccttgacagtcaagatgctctttcaggttattttctcctgaaaccacttcttttgccatctcctaatgttatggtcccagttacatctccattcattgcaggagatggtcccagttactttacatggttctgttggacacaatgaagccatccagagatgctattaaaaatcctgctagtcattatggctttaaactgtaccatgtctgttctattttcagctaggcagagcatgttctatttacagcaggccagcagacaccaggcagtaaggtgatgtatgaatcaattatcaggtgacaaaatggttatgtttaatcatgcatgttttcttcctgactctctatgtttctttgaggcattcaactacttgtagtatcagtgcatcactgatgtatatatgtgttgatgttcatcatccaagatcaaatacatcctgctaggtcattacttgctaatgtgcatctgagtttgctgttgccaggatggaaatgttttttggcagctttctcagtgaatcagtatcaccgcagaacctttttggacacccagatgtcgagagatgcccatttctgaggaatatcaatggagctacaaccttttccctctcttctgctttgccagtagctgctcaaggaggcaagggtccaatttttgaggaagggtcaggctttgagtcagcattcaagcttttccatggccgagatggaatagttcccctttcagaaagatcatatgtatctgatgaaaaccacaatgagagcattgacgtcaagttatatacttagttaggctcaatttagagtacacttatgtagagtacacttatttatattgaaccgtcggagttcctacatatgtatcaagttatatacttagttaggctcaatgttagcatcaacagttgatgagcaactttaaatttagagtacacttatgaatgagttatttgacaatgcttatttatgagatattgaatgttatttatctatattatattaattatagtgtt

SEQ ID NO: 2743 - DNA, 1752 bp, Zea Mays
cttgaatttaaattttgtcaggtttgagcctcagttactgcccacagtcgccacagatagacctccagtaccagtcacacacgcgaacgcgacactcgcaaagtcgcaagcgggtcgcaatcaaggctgctcccctctatctccgtgttcgcccctcggttcaccacccgccgccgccgagacctcctcctcgccggctactcctgaccccataaaggcagcgctcggaggtggccctctgtcgggtggagtggtggacacatccgcgcccatggccaaccgcggcgctgcggccggcaagctcaccgtcgccgagacattctccaacctcagggagcaaggcaagagtgcattcatcccgttcatcactgctggtgatcctgacctggcaaccacatcaaaagcattgaagattctcaattcctgcggttcggatgttatagaggttggcgtaccatactcggatccactggctgatggaccagttattcaggcttctgcaacacgggcgcttaagaaaggcactacactcgattctgtcatagaaatgctgaagggggttacacctgagctttcttgccccattgttcttttcacatactataatccaattctgaaacgtggtgtgggaaacttcatgtcttttatcaaacaagctggcatacatggacttgtagtgcctgatcttcccttggaggagacagcgttgctgaggagcgaggccattatgcacaacatagagctggtgctgcttacaacgccaaccacgccaacagatcggatgaagggaattgcacaagcttcagaaggatttctctatcttgtgagcgctgtaggggttacaggtgcacgctcaaatgtaaacttacgtgtagaacaccttcttagggagatcaagaaggttagtaaactataacctgtttgtcgtcagtaaagagtgaacgagttttaatgcaccagcatggctagagaaatttgcgttcaagaatggttatgagaaaattcctggtatgccatcagattttatactcatcccttgtgtgccactgagtgacatataggtatattttttggtgtctatgacatgtggggccagtggcatacaaatggttatcttcctggctttacaggttacagacaaaccggtagctgttggtttcggtgtatcgactccagagcatgtgaaacagatcgtgggctggggagcggacggtgtgattgttggcagtgcgattgtgaggcagttgtgtgaggctgctactcctgaagagggtctggaaaggctcgaggagtacgccaggagtatgaaggctgctatgccgtgagctgatctcactccccgtcacaggcaagctggtgtccatggggatgcgggcagagcagtgtctgattggctgcactgaaaatgacattaccttcagacaattcgccttgctctcttctggttctggagtactactttcgaggtccgtcagactgggtcacaagatgatcccaaacggccccagatgctgggtttttggacaacggaaagtcgattctgacctctgttaatgtcggccactcatgggtcatgaccaagccatgtttatggtcaaatcagtcccggatgctaacacgcttctctaatctctatctacggggactttttccggtgcttatcgtatcattatcatgcatgttactggtagttacatgttgtctgaacagattctttagctctgccatggcagcatgaagtgtatctggatg

SEQ ID NO: 2744 - DNA, 2305 bp, Zea Mays
tttgcttcattggtttctctataatctatattcataacacaatcttggggtaaactgaagcacagatatcctaggggagagaggagggtgcataatagttgattcaacaaggagagggaaacgattccctgatagcatgtcaaagaccatacccatttggtgctctgtcttgaaccgagcgattgagaggcatcggctgcaggctatccacaaaagtgccgaagtgaattatcagtcgtctaccctgctgaatggagatgcagaaaacaactctgatctatctaattgggatagctcagtgcaccttcctgtatgggttctaggcacagagaaaaatgctatagaggggcgtattgatgaatggacagaccaatttgaatcatgtggtgcagatattcattctcttgcgttgctacacaaaggatgtcttcagaattcagttggcactatattcctggagcaggagatgatgaagagagttgggcacgtggtctaactcctaccttattctggaaacattcatatgaccttattgatgctggaccagatcgttgtaaccagatagttgctgatattgttgaaaaagatagggtttatcgtgcacagagaggtgaacattgtcctcaaattacatgtaagtctctgaggagccttgctggtgccaaatgtaatgatgatcagacaaccgagatgtgtgctatgaacttggatcattgtaccagtacaatggatgcacactgttctaataatggccttctactcttttggattggaacatcaaaccttgcagtatcatctactttccatggtgccttagttggtgtggactgcatactgaactgtgacagcacgtcgaagctacctgctagttcatcagaaaattcttaccttgagctatctattgttgatgaccgattttcattgatgagaaaccttccaaaagcagttgactttgcaaagaggaatttgatggctgggagaaaaattctcgtgtgctgtcaaaatggagaagatataagtatttgtgtggccttggcaatattggccttgttattcgatgataacggtaagtataataatgttgattgtcttgtgaaactgctacacaaggatttgaggctcttcctaatttgcattagtgcttgagattattagttcccacagatgcacttttgttatgccatgtcaagaaacataatgatgcgtgctctagatttgttgatgagtagttgtgccctcaggtcctactttcttgtgtctatactttaagtatgtcaagtatggttgcatcatgaattaataagtaataactaattgtttctttcaaggatgctttgactatggaaattattttgtcaaaagagatgttacaaagttggagatgaggaggaggctggtattcatctgtaaatttgctgtaaacgcacggccatctagaggaaacttgaaacaggtgtatggtttcctcagcagtcaaaaggaactgctgtcatgtttgacatagcttggtcttctgtgatgtagatgaggtatcagttctgatctgctgcttgagtgataggtgtggagtacgagctggggcttctgagtttgtctttcacacagtctgttgatcagatggtgcattacgatcatgcccagaggttttcattggaattgccaccatggcaatgatctcattctgggatcagtatctcaagccaacgtcaatcaacatttatttggagaagaatgaacacaaactttggtagagtgtgattgcaaagacaagctgatggcttggataacctagcgatgattcgagtattatcaatctgtgataaaatatagaagaaactaagttaaggacgtgcctgccagattggaaagtcattagtgcttaatagaattatgagggaaataatagtgagaagttatcttatttattttgcggtcttttttatctgcaaatcatgtttagcaaccatttccaatcgctttgttttagaaactggaccaactttcaaattgaagcgcatgacaaaaagcaagtgggcacttgaagaaaatgcatatcttacgaacttttctatgacaatgaatgggacaaattttctgttgagacatgtaaatagtagcagtaaaagtttcatttctaaactttacccttgcagttgtactgatagttccaaagttcatttcaggactataatgaaagctagaagtgttttagtgggctgctcagctgctgggactggaactactatcccaaaatgtcatcacacgtttaaacacccgttagggcacccacagcagtaaggtttca

SEQ ID NO: 2745 - DNA, 1645 bp, Zea Mays
ttctttttttttgcctctccagaagtttctgcagggaggcacagcaagagagagagcccagcactagataagtagggggggaaagaagagcatccaagcgtactcctcgatctccttcaagcagctaacataattaactcatgggtgcatagagatatgccgccgacgacccatcatatctatggcacgtcatctcaatggaggagatcctcgggcccttctgggagctgctaccaccgccagcgccagagccagagccagagcgagagcagcctccggtaaccggcatcgtcgtcggcagtgtcatagacgttgctgctgctggtcacggtcatggtggcggcgacatgatggatcagcagcacgccacagagtggacctttgagaggttactggaagaggaggctctgacgacaagcacaccgccgccggtggtggtggtgccgaactcttgttgctcaggcgccctaaatgttgaccggccgccggtgatggaagaggcggtaatgatggcgcctgcggcggtgagtagtgccgtagtaggggaccccatggagtacaatgccatactgaggaggaagctggaggaggacctcgaggccttcaaaatgtggagggcggcctccagtgttgtgacctcagatcaacgttctcaaggctcaaacaatcacactggaggtagcagcatcaggaataatccagtgcagaacaagctgatgaacggcgaagatccaatcaacaataaccacgctcaaaccgcaggccttggcgtgaggcttgctactagctcttcctcgagagatccttcaccatcagacgaagacggttcaagatgcctaccgaggaaagagtgaggaaaagaaaggaatccaatagagaatcagccagacgctcgagatacaggaaagccgctcacctgaaagaactggaggaccaggtagcacagctaaaagccgagaattcttgcctgctgaggcgcattgccgctctgaaccagaagtacaacgacgctaacgtcgacaacagggtgctgagagcggacatggagaccctaagagctaaggtgaagatgggagaggactccctgaagcgggtgatagagatgagctcatcagtgccgtcgtccatgcccatctcggcgccgacccccagctccgacgctccagtgccgccgccgcctatccgagacagcatcgtcggctacttctccgccacagccgcagacgacgatgcttcggtcggcaacggtttcttgcgactgcaagctcatcaagagcctgcatccatggtcgtcggtggaactctgagcgccacagagatgaaccgagtagcagcagccacgcattgcgcgggggccatggagctcatccagacggcgatgggatccatgccgccgacctccgcctccggatctacaccgccgccgcaggattatgagctgctgggtccaaatggggccatacacatggacatgtattaggcactgcgggtttcgtgatcgctgggaacattttatttgcaggcgtcgctgaataaggctggttgtctcgatctcccttgacatgaaatccaaataactcacaattaaccatgagtgttccgtttggtcccagtttcgaaggtattgttaatcataatagtgttg

SEQ ID NO: 2746 - DNA, 1913 bp, Zea Mays
caaagagcaaattatggctaattgaccttgctggaagtgaacggaaatcccctgttgatgagcaactggtggtcctattgtactgcttatttataggtgatttggagcatacacatctggtcaagggcctgggctatgctctacttcacaaagtacggagtgaaattgaaaagaaacctgaggcagaggatgggaaggatgcaaagtcaagggcaacaaaagaagatcaggcagtctccttccgcactgcaactgcaaagtctgtctaccagtggatcataaagcctcaaagcataattaaagagaatgaattgtttcttcctggtcggatgtcatttatttacaacttggaggaggtagtaaccaatgacattccaacaactcttcataggagcaaagctgattgcccagttcaagaggagatggtaactgtaagtgtggatggttctgtacttgacaggattgctaaaattatgacgtaccttcggcttggatcatcagggaaggttttgaagaaaaagaaaaaggagagagatataaaagggaagaacaatttggcaagtggcgactgtgatgagtcagtaaaaccttccaaaattaatggttctactcagaaacatcaatcagatatgccaccaccaccagctcgaccccctcagaacaataatttcactggaaaggagaaacaaccagtccctgttgcaagagcagacgatgatgacatttttgttggagatggagttgactatacagttcctaacgaggaaatgagtcagagccctgtttctgatatggatgaatccccacataaccatcagaagcagtccaatttcattgaacccatgtatggccctgtaccaccatctgaacctgctcaagcttggcaacagccgaatgggtatgatgctgttcaagcccagatggcagctgctggatatcaaggtgactggtcaagctatgtgtatgcagaacagcagttgggttatccagagcagtacgtgcagcaaagcacacaggaatatgatgtgttagctgaccccagtatatcacaggatccgaggttcatgactcaggcagacaaggatcggggtttaggttctgttttcaaacgtgacgatcaaaggcttaatcagctgagggaaaaggacgaacgggagagagatccaaattttatttcagatagttactcagagtgttatcctggttaccaggagtataataatgagatcgcaggaagcgatgatgaagatgatttatcgaagatggatatgggtggacgggcgaagggccgtcttcacaggtgggacttcgagactgaagaggagtgggccaagtacaacgatcagaaagaagccatgccgaaggctgccttccagttcggggtgaagatgcaggacggcaggaaaaccaggaagcagaacaaggaccagaagctgacgaatgacctccacaagatcaacaagattctggctaggaagaagggcgagaaagatggggcggaagatggcggtcactacgatgatgatttacctagctcaaagaaacagcgtggctgaagcagtcatttttttgtttttgtttctcctgctcgtactgtaggcaggcgaacattctatgaagagtcacagtgtcatgtttagctggcagctgtatcctgctgcgtttgtttaaggtgtcctggtaggaaatatgttgatgctattgagccgaaaccatggaaggaatgtggctatatatatatatatatatatatatatatatatatatatatatatatatatatattcttagaaagaaaagccagatctttatgttacaattacagtgatgaacctgcaagtatttaatttgtcatattgggaggcttttgcaatgtggttagagctgagaatatccaagagtgtggctcagtg

SEQ ID NO: 2747 - DNA, 1944 bp, Zea Mays
ccccgcacgcatgtcaccgaacaaccgggaccgggcaattcgtccagcagcatggacgcgcctccgccctcacagccggacgatgctgctccggcgccctcctcgaccttggcttctgctccctctccggcgccaacatccaacccacccacttccgccgccgccgccgcacccgccccggactccgccatcgccaaccctaacccgaacctagccgcggcctcctcggcatccgttccggccgcatcctcctcggctcctcctataccacgcggaggggttgtcctgggggtgcccgcgccgcgttccgcacagacgcccgctggttacactgggttcgttccgccgcctccgcttgctcaccagtttggatcgatgcatcgaggccccgaccagcccccaccttcatcttcacagtttaggcaaccttcccctgggactcagaatattgggattgttggatcactcaatacatcccagattagtccaggcacaatatctggtccgcagaagcccagacctggtcttccatcatcaactcctattccatctggtagccaaatgccaggttcacaaagacccccatctcagtctttaatgaggccggtgactgtgagttctccttcgctggcttcacaacaaactccacaaagttcgtcttcaacatttaggccccaacagaggccacaagtttcacaaccaagaccacaacaatctcaacttgttactccacctcaacagaacacaattttaacacagcagcagcagcagcagaaacaacaacagagtgcctcacatcaaaatcaacaaattgctgcccctaaaaatcagccacagctttctcagcatccaactgctcgtactccaatatcaatgacaccaaagcctgatttgcctgctatacaaaatgttgctgttttacaatctgtggatacagctgcaactgatgcaaatgctagtgaaactggtactcgattactcaccaagagaagtatacatgaattagttgcacagattgatcctaatgaaaagctggatcctgaagttgaagatgttcttattgacatcgcagaagattttgttgagtctgtcacaacttttgcttgttctttagcaaagcataggaagtcaagcacattagaagcaaaagatgtactcctacatgcagaaagaagctggaatatcaccttgccaggcttcagtggtgatgaaatcaaactgtacaagaaacagcacataaatgatattcacagggagaggcttgctctgataaagaagtccatggcgactgacacgagaaactctgctgcccaagctgcagctaaccagaaaaatcagactccgaaaccacctgccccagcttccccgtgaaacatgtccacaggccctgcaaacacagtatcagtgtaccacgcatcacatctgtggtgttcggacagttgtcggttgtatgttggtagtgttgcaatgagtacatgtatagattattctgtcgttactcgttactaggatctggttagaatgttgtttagttaatccaatgcatggtttctgttattgtatatcacttctgttctaaactataaatcatttagggctagtctaggagccacaaaacctgagtggattgaaggggttaaaatcccctcatttaattttaaataagaagggaaaatatcatatgcaatcacttatcctggtgcaagcatacaatcaagcgatctggtgcattcgatctagatctaatgatgactgttattttatatttaacccattctacctaaaacatagtacctattttacttttaaccccttctatatgaaaccgttggatctagattgtatgctctggatagtttgattgcatgcttgcaccaaaatgagtgattgcacaggatatgtcctcaagaagggaaaatatcctcctctggttttttactcccg

SEQ ID NO: 2748 - DNA, 2124 bp, Zea Mays
gtcttctgtagatagtctctgccccgcacgcatgtcaccgaacaaccgggaccgggcaattcgtccagcagcatggacgcgcctccgccctcacagccggacgatgctgctccggcgccctcctcgaccttggcttctgctccctctccggcgccaacatccaacccacccacttccgccgccgccgccgcacccgccccggactccgccatcgccaaccctaacccgaacctaggtaccgtcgcaaaccctgctcaaaccctagaggctcctggccccagctccgccgccgcgcggccgccgccgccgcgaatgagaacgccttacacgcacctggccgcgcccatcacgatgtcgtcctcctcctctgctgccacagccgcggcctcctcggcatccgttccggccgcatcctcctcggctcctcctataccacgcggaggggttgtcctgggggtgcccgcgccgcgttccgcacagacgcccgctggttacactgggttcgttccgccgcctccgcttgctcaccagtttggatcgatgcatcgaggccccgaccagcccccaccttcatcttcacagtttaggcaaccttcccctgggactcagaatattgggattgttggatcactcaatacatcccagattagtccaggcacaatatctggtccgcagaagcccagacctggtcttccatcatcaactcctattccatctggtagccaaatgccaggttcacaaagacccccatctcagtctttaatgaggccggtgactgtgagttctccttcgctggcttcacaacaaactccacaaagttcgtcttcaacatttaggccccaacagaggccacaagtttcacaaccaagaccacaacaatctcaacttgttactccacctcaacagaacacaattttaacacagcagcagcagcagcagaaacaacaacagagtgcctcacatcaaaatcaacaaattgctgcccctaaaaatcagccacagctttctcagcatccaactgctcgtactccaatatcaatgacaccaaagcctgatttgcctgctatacaaaatgttgctgttttacaatctgtggatacagctgcaactgatgcaaatgctagtgaaactggtactcgattactcaccaagagaagtatacatgaattagttgcacagattgatcctaatgaaaagctggatcctgaagttgaagatgttcttattgacatcgcagaagattttgttgagtctgtcacaacttttgcttgttctttagcaaagcataggaagtcaagcacattagaagcaaaagatgtactcctacatgcagtgttgtccattacagaaagaagctggaatatcaccttgccaggcttcagtggtgatgaaatcaaactgtacaagaaacagcacataaatgatattcacagggagaggcttgctctgataaagaagtccatggcgactgacacgagaaactctgctgcccaagctgcagctaaccagaaaaatcagactccgaaaccacctgccccagcttccccgtgaaacatgtccacaggccctgcaaacacagtatcagtgtaccacgcatcacatctgtggtgttcggacagttgtcggttgtatgttggtagtgttgcaatgagtacatgtatagattattctgtcgttactcgttactaggatctggttagaatgttgtttagttaatccaatgcatggtttctgttattgtatatcacttctgttctaaactataaatcatttagggctagtctaggagccacaaaacctgagtggattgaaggggttaaaatcccctcatttaattttaaataagaagggaaaatatcatatgcaatcacttatcctggtgcaagcatacaatcaagcgatctggtgcattcgatctagatctaatgatgactgttattttatatttaacccattctacctaaaacatagtacctattttacttttaaccccttctatatgaaaccgttggatctagattgtatgctctggatagtttgattgcatgcttgcaccaaaatgagtgattgcacaggatatgtcctcaagaagggaaaatatcctcctctggttttttactcccg

SEQ ID NO: 2749 - DNA, 2049 bp, Zea Mays
ttcatgaatcatgaatttgttccccctttgcccatgccggacgccccatttttggcgccgctgccaggagaccgaattatggcataatcacaccaaaacccgctcccttccaaaccttcccatcagtcaatcttacacccgaccgagcccctctctcttctcgttgccattcccgattcccaaacgcgcagcggcgcaggcagctgcgttcacgtgtccctccagccccgtagcgtagcgccatccagctccaagctgttgctacaagaagccgccacaacaaccgctccgaacggctcaccggccgggcggcgctcccatagtcccatgggagaagcgacctaacttttctcggattctagctcgagtctgcaggcggctgctgctgctggtggtggtttcttgagaggcgagaccctgaaagggatggcactggaggccgtggtgctatcccagtcccagttccagcaaggcagtcgctttgggtgcggtgccatggcagcaggaggggcttggagtgatctgttgtttagtggaacggaggggttgttcgagatgggtggcgccgccggccgcggctggaacgcggccgcgagctcgccgccgcagctcctgcaggagctgggtgacaacggtgctgccggctcactacctgtggcgtctgcggggagtgcgagtggcggcgccggtcaggatgccccggcaatggctgcggcagcggcgtccggaaggaggaagcggcggaggatgaggccagtgaagaacgaggaggaagtggagagccagcggatgatccacattgcggtggagcgcaaccgccgcaagcagatgaacgagcacctcgccgcgctccgctcactcatgccgccggcccacacgcaacggggcgatcaggcatccatcgtcggcggcgcgatcaacttcgtcaaggagctggagcagctgctgcagtcgctggaggcgcggaggcgttccccgcagtgcgctgcctacgccgtcgatcccgacgacgcggggccgttcgcggacttcctcaccttcccgcagtactcgatgtgcgccgtcattgcggccccagagaacactggccaccaccgtgagggcggcgccgtcgccgagcaggaggcgtccgggtcgaagccgtcggccgtggccgacgtcgaggcgacaatggtggagagccacgccaacctgcgggtgctgtcccggcgccggccgaggcagctgctgcgcctggtgctggggctccagggccaccgcctcaccgtgctccacctcaacatgagcagcggcgcccacatggtgctctactcgtttagcctcaaggtaaaactccacaaccttcttcctacatttcctcgcgaacaattacaggcagctacgcgatggctctcagtccaaggaagtatagatcgtacctggtgcctaggtttccgtgccttctttttttctggatcttgctttgcctccaacaggcaacagctagctgctccaaattcccccgtctgtttactttactagttactacgggtctacggtttataacggagcagatcaaggttgcaattctttgagtttgtggctttgtgctgatggttcatcattcaggtggaggatgattgccagcttacctccgtgggtgagattgcggctgcggctcatcacatcgtcgagaagattaatgaagagcaaaacaaggctgcagcttagaaattagaatagaatcaagagtgctttcctgcacgcaacctttttagctcctgtagcaagtgaagtgattcctttttgtgagaacgacgaataatgtatactaatcagcttacctcgtcttcgaaacagtaatatgtatgtgtaaccaacctatctttgtgcatagataatgtccatggccaggcatgcatgaacgagagctctggctacagaacaactccagttccaggccattcgatttttttgccattctactgtagcactcatttaatttgtgtcacggacatgtgaaaaaatttgcgacccacctccaaatagttaaaattttccccggttcca

SEQ ID NO: 2750 - DNA, 1444 bp, Zea Mays
atcagccaccaggcaaccatgcggcagccgccccgcggaccacgcagattagagcagcccgcagcagcgaattaaagttacagcgggtcgtttgcgagcacacaaggatctctagctctgccatggtggtaactggtattctgggcgggctgctctaaccatcaaagcgtagcgcacaccacttgctcgacaaaagattcaaggaatctttcaacatatattcctctctccaggctttcattataaatagaggccaactgggttttgcacttcatacaaccccataccttcagagcttacaaggagtagcagagctcagaagagcattcgtattcagcacatagtgcgccttcttgaaagaactgtacaggagatcacacaatgagctattatggcagcagctcttctggtggacgaagcagtaggagagtcgactatgggaggacatatgtggtgaggccaaagggaaggcacctagccaccattgtgtggctccatggcatagctggtcccagctcctggattctcttcctctaccaaatatcaagtggatatgccccactgctgcaacccggcctgtcgcggcttttggtggattcccctgcacagcatggtttgacgttgaggacacatctatagatggccgagacgacattgagggactggatgcttcagctgcacacattgcaaatctgctgtcgtctgagccgtctgatgtgaagcttgggattggcggtttcagcatgggcgccgccgttgcccttcactcagcagcatgctatgctcatggcaaattcacaagtggcattccctatccaatcgcactcaacgcagtcatcagtttgagtggctggctcccttgctcaaggaccctgaggagcaagatggagggttcacatattgctgtaagaagggctggctccttgcccatcctgcttagtcatggaagagtggatgaagttgtcgtctacagggatggcgagagatcagctgaggttctgaggaactcaggattctcatttctgactttcaagccctacaacgggttgggccattatacgatccctgaagaactggacgacctctgcaagtggcttagttcgtcgcttggcctcggccgatctcgctaaaagaatagttttttttttttggcgtatgcgcaatgggtttggtgacagcatatattttgaggggaggtttggtttgatagcttgtaaaacacttgatgctagctgctctcttcgcatgtggcttttgtttccgtcgtcctaatttacgtactctatgtctctatgtaatgcggtactttgttgtctgatgtttgctaataaaaagaaaatgccgttgaggcctctgatcaatggaaacagcatttgtactgtatccaggcagcaaaacaacatttgtactcatcactgcagaaaacagaaaatctggagaggtc

SEQ ID NO: 2751 - DNA, 1526 bp, Zea Mays
caccaggcaaccatgcggcagccgccccgcggaccacgcagattagagcagcccgcagcagcgaattaaagttacagcgggtcgtttgcgagcacacaaggatctctagctctgccatggtggtaactggtattctgggcgggctgctctaaccatcaaagcgtagcgcacaccacttgctcgacaaaagattcaaggaatctttcaacatatattcctctctccaggctttcattataaatagaggccaactgggttttgcacttcatacaaccccataccttcagagcttacaaggagtagcagagctcagaagagcattcgtattcagcacatagtgcgccttcttgaaagaactgtacaggagatcacacaatgagctattatggcagcagctcttctggtggacgaagcagtaggagagtcgactatgggaggacatatgtggtgaggccaaagggaaggcacctagccaccattgtgtggctccatggcataggtgacaatggtgctagctggtcccagctcctggattctcttcctctaccaaatatcaagtggatatgccccactgctgcaacccggcctgtcgcggcttttggtggattcccctgcacagcatggtttgacgttgaggacacatctatagatggccgagacgacattgagggactggatgcttcagctgcacacattgcaaatctgctgtcgtctgagccgtctgatgtgaagcttgggattggcggtttcagcatgggcgccgccgttgcccttcactcagcagcatgctatgctcatggcaaattcacaagtggcattccctatccaatcgcactcaacgcagtcatcagtttgagtggctggctcccttgctcaaggaccctgaggagcaagatggagggttcacatattgctgtaagaagggctggctccttgcccatcctgcttagtcatggaagagttgtcgtctacagggatggcgagagatcagctgaggttctgaggaactcaggattctcatttctgactttcaagccctacaacgggtacagatgaggttctgagagtttcaatttcctctcctcccccagacaaccagattgattaggtgacttgtgacaacgcaggttgggccattatacgatccctgaagaactggacgacctctgcaagtggcttagttcgtcgcttggcctcggccgatctcgctaaaagaatagttttttttttttggcgtatgcgcaatgggtttggtgacagcatatattttgaggggaggtttggtttgatagcttgtaaaacacttgatgctagctgctctcttcgcatgtggcttttgtttccgtcgtcctaatttacgtactctatgtctctatgtaatgcggtactttgttgtctgatgtttgctaataaaaagaaaatgccgttgaggcctctgatcaatggaaacagcatttgtactgtatccaggcagcaaaacaacatttgtactcatcactgcagaaaacagaaaatctggagaggtc

SEQ ID NO: 2752 - DNA, 2127 bp, Zea Mays
tccattggtcagtgtctccccgcccgcctctcccatcttcaaaaaccacccacggcccgtcccctcgacctccccgaaaccccacttctcggatcgagactagggttagggtttcgtcactcccgccccgattcgaaccaatccgcctaggcccccgccgcgccatggccgccggttccattgtggtggacttcccctccatgggcgccgccctctgcttccccaacctcgaatcactcctccgagactccgcctcgggtttcctctccgccgtctccgccgccccggcccccggcgccgccgacctcaccaacttccaccgcgtcttctcgcgcgtcctcagcacctactcagacccgccgctcgaggtcgtctggttcttctccgcgctctccttccacgaccgccctgacgacctccgctcactgctccagctcctctccgccttcgccgcttcctcgcccggggccgccaagccgctcgccctcctcgcccccgtcgtctccgagcttttccactcagataagccgcgcagggagaccgaggccgtcgtcgaggctgtcctcagctacatcagcatctgcagcagtcgccccgccccctcttcgactgaaggcaccaccgccgacgctgtgaggctgctgccggctttcggcgatcttgtcaaggtgtggagcgtgcggcactcgagggagaggtgcccgttccaggtgctgttcccgctcgctggtgacgaggccaggcgggagctcatgaaggaaggctgcagcgttgactacctcgctggggtggtgctggttgaggcgttccttctcaggctctgcctcaaggtgcagaatgcaacaggggtgcctcgctctgagctgcagaaggagctcaagatctgggcagtcagctccatcccggtcttccagagccaccaattcttcgagcgctgatgatgaaatcttggtgagggatgttctatatgattctcttatcctggtggattattcattcattaacaatggtgctggagttgatctcttgcctgtatatgtgtcgagattgattatcactcttgatgctgtcaatgatgccaggaggaaaggtgatcaaggtagagcagtgtcatttattaatgccttctcaacctcaaatattcccaattttctcatcaagtgggctacttgtcaagctggctctggtgcactcagcaaaccaatttgcaatacgccccaagctattctcaagtggcttattgaccttgaagataaggggctcaaagtgtttggagattacagttcttgggttatgaggaggtttgtttgcaatgaggtcaagaatgggtatgggaacatggttcagtcagatgcagaccttttctttgttgataaacagagtggtagggaacttatggacaccaaaggcagcgaggatgatgaagctgttgaggagatggagactgcaggtaatgcttttatggctgctgcccagtcaatgaagggggtaactaacggcataaggaagaggaagagctgcggaaacgaagatgcagctgctgtgaagtttgtgaagtacaaggtagaagacagctcagtgaagggctacctgttagcagctaatggcatgagcagtggcagtgaggtagagaacccacagtcggatgatgagatggaagaatccgactgatgcatagaaaatgacagcacccactaatgcttactttggggagagttgctttgaagagtttcttggacaaccgcctttttggagtctggaccagccttgtttcagatgccgcttcttaatgatgtcgtgcagtaccctgttctaggccaataatctgcaggagggcccctctccagctaggctttttttcggatatagtggtaaccgttagctgaccctacttgacaaggagcatgtgatgtctgctatgagctgtatcgtgttctttgttattataatgctatatagtagagacctcaatgtagtcttgcttcattttgcttttgtaatagatgggtacgttgttgttatcccacggaaccagttggaactaatgaactgttaacctttcctgtgtatagcgcctttctgtgcttacttgtgtatggtgtcttttttgtgctgacgaggaagtcc

SEQ ID NO: 2753 - DNA, 2645 bp, Zea Mays
tccattggtcagtgtctccccgcccgcctctcccatcttcaaaaaccacccacggcccgtcccctcgacctccccgaaaccccacttctcggatcgagactagggttagggtttcgtcactcccgccccgattcgaaccaatccgcctaggcccccgccgcgccatggccgccggttccattgtggtggacttcccctccatgggcgccgccctctgcttccccaacctcgaatcactcctccgagactccgcctcgggtttcctctccgccgtctccgccgccccggcccccggcgccgccgacctcaccaacttccaccgcgtcttctcgcgcgtcctcagcacctactcagacccgccgctcgaggtcgtctggttcttctccgcgctctccttccacgaccgccctgacgacctccgctcactgctccagctcctctccgccttcgccgcttcctcgcccggggccgccaagccgctcgccctcctcgcccccgtcgtctccgagcttttccactcagataagccgcgcagggagaccgaggccgtcgtcgaggctgtcctcagctacatcagcatctgcagcagtcgccccgccccctcttcgactgaaggcaccaccgccgacgctgtgaggctgctgccggctttcggcgatcttgtcaaggtgtggagcgtgcggcactcgagggagaggtgcccgttccaggtgctgttcccgctcgctggtgacgaggccaggcgggagctcatgaaggaaggctgcagcgttgactacctcgctggggtggtgctggttgaggcgttccttctcaggctctgcctcaaggtgcagaatgcaacaggggtgcctcgctctgagctgcagaaggagctcaagatctgggcagtcagctccatcccggtcttccagagccaccaattcttcggggtcctgctgaacatgctcttgaactctccgctgcctgtttactctctagtggtatgtgtttcctgactaatgagcaatttgagagcatgacacaacaagctagtattattatggattcactgcttattaacaaaattataagagtattaattaagcattcacaaggcatgtggtagttgtatggaccataaaaatattaacaaacatggcaaatagcttataaactcatttcatgaattaagaaacatgagtcatgatcatgctttttcattacctgttctgtaaactagttatttacctttgtgaaataagaaatgtgcaacttgttgccttgttcttcaactgtgcttggaatcaggaatctttcctaatttgtggaaactaaagaggagaacagaacggtatatgactattgtgtatcgcaaagctggtgttactatagcattttgctgtcatcatctgcaaggagcatgatttaagatggagttgtgtctcatctttgtgatatgcaaacagagcgctgatgatgaaatcttggtgagggatgttctatatgattctcttatcctggtggattattcattcattaacaatggtgctggagttgatctcttgcctgtatatgtgtcgagattgattatcactcttgatgctgtcaatgatgccaggaggaaaggtgatcaaggtagagcagtgtcatttattaatgccttctcaacctcaaatattcccaattttctcatcaagtgggctacttgtcaagctggctctggtgcactcagcaaaccaatttgcaatacgccccaagctattctcaagtggcttattgaccttgaagataaggggctcaaagtgtttggagattacagttcttgggttatgaggaggtttgtttgcaatgaggtcaagaatgggtatgggaacatggttcagtcagatgcagaccttttctttgttgataaacagagtggtagggaacttatggacaccaaaggcagcgaggatgatgaagctgttgaggagatggagactgcaggtaatgcttttatggctgctgcccagtcaatgaagggggtaactaacggcataaggaagaggaagagctgcggaaacgaagatgcagctgctgtgaagtttgtgaagtacaaggtagaagacagctcagtgaagggctacctgttagcagctaatggcatgagcagtggcagtgaggtagagaacccacagtcggatgatgagatggaagaatccgactgatgcatagaaaatgacagcacccactaatgcttactttggggagagttgctttgaagagtttcttggacaaccgcctttttggagtctggaccagccttgtttcagatgccgcttcttaatgatgtcgtgcagtaccctgttctaggccaataatctgcaggagggcccctctccagctaggctttttttcggatatagtggtaaccgttagctgaccctacttgacaaggagcatgtgatgtctgctatgagctgtatcgtgttctttgttattataatgctatatagtagagacctcaatgtagtcttgcttcattttgcttttgtaatagatgggtacgttgttgttatcccacggaaccagttggaactaatgaactgttaacctttcctgtgtatagcgcctttctgtgcttacttgtgtatggtgtcttttttgtgctgacgaggaagtcc

SEQ ID NO: 2754 - DNA, 1065 bp, Zea Mays
gcagtatacagcagtagttagtactataaaatagagagatgagacgaaaatctcctctgcatccggcatcccgatcctgtgtgtctctactctgcactcctcgattcgattcaaccgacccagcaggcgggaaatggcgaacggtgggaccgaggcatcgccgctgcggccccggcggcgcgccggctccagggacccgttcctcatcgtgtgccgcttcttcggcgtcgtcacggccgccgccgcgctgctctgcgtcgccgccaacgtcctctccgcggtctactccttccgcggcggcgctgacatcatcggcggcgtgttccggtgctacgcggtggtgttctccgtcttcgtcgccgttctcgagaccgagtgggcacccgtcatcaggctctggaagatatttgagtacttgccggcaaggggaatgctgcagatcttgtgagtatttaattctaagtttctcgggtacaagcagcagtgcaaccaatgtagcgacaggggcagacgggcagtcctgttagttgtacatcgcatccttccacaagtgttgctatcatgaccaaggcgtacccaaatgttgagaggagcgagctgattttgatccaggagatcgctacttacatgcttcttgtgtgtggagctgtctacataatcgcaggtatactatgtcttggtgttttaaaacgttctaggcagcataaagcaacatcacaggagcaagcggccaaggatctggaggagctagagaagaggagagaggagcttgagtctctgttaactgccgagcggtcagagatggcctgatgtcgacctaccatctctcttctggtgtaaataagtgtttttttttttattctctgttgaatgttggtagcatgcatactgctttgccgtgaccatcggtttcatcgccttctctagctagtttggagcatgttgtttcagctgggttctagacattcgtgtaatgcactgtttacttatatgatgatctcctgttgtagatatatgttgcagaaatttacgaatctaagcaaagaatctgggatgattgaggaa

SEQ ID NO: 2755 - DNA, 1076 bp, Zea Mays
atcggttgtcaaggacgacgagcaaaagtctctcttttctacgcctcttgatgtgtgggcgagctcaagtttctctgatccttttacaatcagctgtaaaattcttaaacaaaaattcgggacacctatgaatgcaatatttgacttatttgatttcaaaattattattctttctcactaatcttcaaatgcaagtcgatgcaagtgctcactgaccttgagatgcaagttgatgcagcgatgcaggcgcttattgatcttcacgtggaggacaatgcaaccgcgacgatacacaagtatattattcttcagtaccttggttttgcatgttgatgtcagttttgattaaaaaaagtctatactcgcacaggataaccacatggtccaaacatcaaaaattactttttccaggttcaaagttcaacagatcatgtaacatttaggttttacatttttcctattgtatgttaaaaaataatgaaaatttgaattaaattcttactagccggttaatttactccgttaatccctcattaatgtatgtactgttttcatgctaattaaactttgggagaatttttttccaactgatgtggaaaaatgaccattcaggcatttgagaagggctacccatctgttttatggaatgtcaattgcaatttattcagatgctaattttgcctttgtatgatctttacataataggttggtaaaaagcaaggtccatcgattattcgagacttaatgtgcaactatttttacagtttgtcagttatatataaccttttcagggtataagaagttcaatcaacattttccctccatgagtgaatgcagatcgatcaaattgagaagatgactacttcaattgaagatgatcggaagataagtgtttgtgatatttttttattgccactttttgttcctaaatcaatcatttgctgtggttccagaaagtaactgaggagtgataaaacgacaattttgagcttcaacgctttgctaggttggcaaaaaacttaaagcaacagagggcggatttggtggcggcgactgtgaggcgggcgagcgaggtg

SEQ ID NO: 2756 - DNA, 1725 bp, Zea Mays
cgcactgagacgcccggtgcggtgaccctgatctgcacgatcgtacgagggagccgtgaagacggatggcagagggcaaacgatctgggacacgtttgcacacacttttggcaagatttcagacttcagcaacgcggatgttgcagttgaccagtaccaccgtttcgaggaggacgtgcagctcatggcggacatgggaatggatgcgtatcgcttctctattgcctggtcaagaattttgccaaatggtacgggccaagtcaatcaggccggcatcgaccactacaacaaagtgatcaatgcactactatcaaaaggaattcagccatatgtaaccctgtaccactgggacctcccccaggccctggaagacaggtacaacggatggctggacaggcagatagttaatgactttgcggcttatgctgagacatgcttcaaggcgttcggagaccgtgttaagcactggatcacgctcaacgagccgcacacggttgcagtccaaggctacgatgctgggcttcatgcgccagggcgttgctcggtgctgctccatctatactgcaggacagggaactctggcactgagccctacatcgttgctcacaacttcatcctagctcatgccaccgtttcagacatgtacaggaggaaatacaaggcagctcagaatggtgagcttgggatcgcatttgacgtcatctggtacgaaccaatgacaaacagcacgatcgacattgaagctaccaagagggcgcaggagtttcagctaggatggttcgcggacccgttcttcttcggagactacccggcgacgatgcgggctcgggttggagagaggctgcccaagttcaccgcagacgaggctgcccttgtcaagggggccctggacttcatgggcataaaccactacaccactttctacacgaggcataacgacaccaacatcatcggacggctgctgaacgacaccttggcggacaccggaaccatcagcctgcccttcgacaagaacgggaagcccattggagatcgggctaattcgatatggctgtacatcgtacccagcgggatcaggaagctgatgaactatgtcaaggagcggtacaatagcccaacggtttacatcactgaaaatgggatggacgacggcaacagccctttcacctccctccagaacgccctcaaggacagcaagaggatcaagtaccacaacggctacctcaacaacgttgctgcctccataaaggaggacgggtgtgacgtgcgtgggtacttcgcgtggtcgttgctggacaactgggaatgggccgccgggtacacctccagattcgggctctacttcgtggactacaaggataacctcaagaggcaccccaagaactcggtccagtggttcaagaccctgctgagctccagctgaaggcgtcacacgggctgtgattggactgaccatttacccgacaccatacccttatcctgttgtgtcaagcactcaagctccaatcaatgtaaaataatgttacccctctctctctctctctggtagaaaaacatgtcgtgtagggctacatttagttacacattaaaagggcatatcagtaacttcaaacttagttcgtttgaaagcataagttacacgtgtggatttgtattgaaatacactttgtaaaaaaaagtcatgtttgtaaataaattaaataatatagcctagaataaatcagc

SEQ ID NO: 2757 - DNA, 2347 bp, Zea Mays
ccgacggaaggcccttagcagcgccgccaccaccacgggagatgcgtggagagatgaagcaaaccaagtcaggaagaatagaaatgagggcagaatggaatgaaacaagaacttgtttttttgtgagcttactgaaggagtacaattcaccaagatatcgtgcccaaaatggttggacaaaagaagcatggaacaacatgacacaacgcatcaacgataaatttgaaacaaattttgtggtgacgtaattgaagaacaaatgaccagtgggggccgaataaacttacaaattcataccgaattttgcctggtccactaaagctgcctgcgcccccccccccccccccccccgcatgggctcgtagcccacagacgtcccaggagctggcccaatttatcttcgccatccatttcgattgaatggccacgatttaccgaaatcgcatatataaatgaaaatttcggcatgccctaaccctagcttcattcgcttccgatatttccggagtggtatagggcggatttggtggcggcgactgtgaggcgggcgagcgaggtggtcattgggctcgcgccggagaacgctatgatcccgctgttcgagacggggggcgcgcagctcgagctcatacgggatgccgagattgagccgtgtgcctacgtgaggtgggagcaagggaggccgagaggatccgcttcatgagttggatgcacacgagagacgttggggatcccagcttcccaatgcgggagatccagaagagtcaacggcggatcgatcaagtggattagcactctcccctgtctgcgtgatctgtagaacaaggataagtcggggacgctgttctgctttgccgcgatggaacatgtgttccaatccgagaatttcaggctggggcggttgggatgagggggaagccaatgggagatggatcaaggagatgagcatgggctagacgacttcctggtgaaggtagcttcaacagaccataactttcatgacgcttcaacccgctgcaatgaagacggcgatgaacacaatttcaacataacatataacggtgaagggtttagtagatgaatataataggggatgtatgtgacaaatagaagagttctcaccaaaggcaaatgaacaaaaccgaaaagaaaaggaacatcgtatgtaatttatagtgaaacaaaatatatgtaaagaataaagagggacgtgaggcgttgtgagagcggcaagatccgattaaaaaattgccataaccgagtgaattcgagtgaggtggggggtgtggaaagcgtgaaatctggttggcaggccctattgtcagagtgtgcattaaaatcggatcaggtggtctggcaccggttcaggagaaaccggttgcgtgggaacgtgggtggactggcaccgggtcaggagtaaaaccggtcgcgtggtggcgtcagttggcgggtggacgcgcgcttcgcactgggacgcacgacgggacgacaagtgacgctttaaaggagtaaagagattgacggacctaagcaactgcataaccatttcgaggcctattttgagaagcccacagacggaagattacgtctccttgtcacggcccaaatagagcatacaagaactcatcagaatctccccgccgccatgcggatctgcagtaccttcatcctgtttgatccaaagccgactccttttcttcctctaatccttctttctggcagtatttgttagggttttctccgggattgaaggcactgctgcaggctgaaacgtttctcgcttgattggcggaagaagggattccagcgatctgtttgctgctagctgcgagagttcaatatgtctcggaccttcaaatcgacgacgggtctctctcggcggtttctgaatctgatcgcggccaaccactcccctggcgtcaagtcgctgcaccgcatcggcctgggtcgcatctttaactcaacgccagcgccaataccaaacggagatcgattggagtccgcagcaggacaagaagactacatggtgcggccccgcgcgttggatatcattcggctccccacgccgtcagggcgcggtttcctcttcgatgccaactcgtgcggggtgtcaaccgtggcccatctccatacacccaagcagctgaagacttcttttctgctatgcttgattgatggggctgcgtcttcacccagttctgcctgtggcttgggctattttatcttcctctgcgcattatgtttttcggctcactttcgagcttgtatccccggtattgtaataacattattcagactctgtaactatttgaagtaatgaatgtggttactagcctcctgggactag

SEQ ID NO: 2758 - DNA, 3105 bp, Zea Mays
cttcccttccactcccgtccatagcagcgctgccaccaccgacggaaggcccttagcagcgccgccaccaccacgggagatgcgtggagagatgaagcaaaccaagtcaggaagaatagaaatgagggcagaatggaatgaaacaagaacttgtttttttgtgagcttactgaaggagtacaattcaccaagatatcgtgcccaaaatggttggacaaaagaagcatggaacaacatgacacaacgcatcaacgataaatttgaaacaaattttgtggtgacgtaattgaagaacaaatgaccagtgggggccgaataaacttacaaattcataccgaattttgcctggtccactaaagctgcctgcgcccccccccccccccccccccgcatgggctcgtagcccacagacgtcccaggagctggcccaatttatcttcgccatccatttcgattgaatggccacgatttaccgaaatcgcatatataaatgaaaatttcggcatgccctaaccctagcttcattcgcttccgatatttccggagtggtatagggcggatttggtggcggcgactgtgaggcgggcgagcgaggtggtcattgggctcgcgccggagaacgctatgatcccgctgttcgagacggggggcgcgcagctcgagctcatacgggatgccgagattgagccgtgtgcctacgtgaggtgggagcaagggaggccgagaggatccgcttcatgagttggatgcacacgagagacgttggggatcccagcttcccaatgcgggagatccagaagagtcaacggcggatcgatcaagtggattagcactctcccctgtctgcgtgatctgtagaacaaggataagtcggggacgctgttctgctttgccgcgatggaacatgtgttccaatccgagaatttcaggctggggcggttgggatgagggggaagccaatgggagatggatcaaggagatgagcatgtatttgttagggttttctccgggattgaaggcactgctgcaggctgaaacgtttctcgcttgattggcggaagaagggattccagcgatctgtttgctgctagctgcgagagttcaatatgtctcggaccttcaaatcgacgacgggtctctctcggcggtttctgaatctgatcgcggccaaccactcccctggcgtcaagtcgctgcaccgcatcggcctgggtcgcatctttaactcaacgccagcgccaataccaaacggagatcgattggagtccgcagcaggacaagaagactacatggtgcggccccgcgcgttggatatcattcggctccccacgccggtaatgagcttccgatcttcagcgtcatttgaaagcaaagaatggaagttggattgcttcccgttttcggactgcaaagttttctgcatggaccagtcagggcgcggtttcctcttcgatgccaactcgtgcggggtgtcaaccgtggcccatctccatacacccaagcgatgcaggcgcttattgatcttcacgtggaggacaatgcaaccgcgacgatacacaagtatattattcttcagtaccttggttttgcatgttgatgtcagttttgattaaaaaaagtctatactcgcacaggataaccacatggtccaaacatcaaaaattactttttccaggttcaaagttcaacagatcatgtaacatttaggttttacatttttcctattgtatgttaaaaaataatgaaaatttgaattaaattcttactagccggttaatttactccgttaatccctcattaatgtatgtactgttttcatgctaattaaactttgggagaatttttttccaactgatgtggaaaaatgaccattcaggcatttgagaagggctacccatctgttttatggaatgtcaattgcaatttattcagatgctaattttgcctttgtatgatctttacataataggttggtaaaaagcaaggtccatcgattattcgagacttaatgtgcaactatttttacagtttgtcagttatatataaccttttcagggtataagaagttcaatcaacattttccctccatgagtgaatgcagatcgatcaaattgagaagatgactacttcaattgaagatgatcggaagataagtgtttgtgatatttttttattgccactttttgttcctaaatcaatcatttgctgtggttccagaaagtaactgaggagtgataaaacgacaattttgagcttcaacgctttgctaggttggcaaaaaacttaaagcaacagagtgttcaagctaatgttttggtgctagaaaaggctttaatgcatcaggcttgtgttcctgtgttggataatgcttagagaagtttagcagtgataatgcttcactattcgaaaatcagtaaaaagtttagaccatttatgtgacatttttggatagttcctatgttgtgttgcaaccattaactatattaactgtatattttcacatggtgggacagatagaggacttcatagtgttcattcgaataatgttgatgtataagttaactttccacttttcttggttacttaatgaaattaacttttatagatttgtgtctacatagtgttcatgcaaatattgttgtatattatattatatttaagactcttaattagtgtcatttaacaacaataaaaaaaaattacacaatacattgttgatatgagataatcaagtccaaaaaatgtagaattatacgggcgcggcgaagcgcgcctgccatcctagtaataatgctaacaagaagagtcctctctcccttcacgttctgtatgttcttttttgttcttttggaggagcagggcgtctttgtcaatttaatgcaagtaaatcaggagaaagttttgttgattgatattgacaatgatcatattcaaaatcctattggtgatggcttttcagcatttaaatcaactagccccaaatgcatgtgattttttatctgaacagcattagtatatgacaaagtaattatacattatgttgataagcttaaaataattagttacatgttttcgtctatcggtcccgtgcatcgcacgggtttt

SEQ ID NO: 2759 - DNA, 831 bp, Zea Mays
gtcaaatcgaagtccaacgagacatattcagcctaccgggagcgactgagcgtacgggttatccccgtttctacgcgctcgctcctgtacctctccccagtgcccaagaatccaagatctggaagggccaggtgggaggaccaagcttcgtcgacgtcgactcctcgtcctccctcacctcgctcgcttctctgcaattctccgcagccctcctctttcggtctttcccgctggcctcctcttttcaaaaccctcgctaatctcgtgccccgtcccacccacctctagcttcgaatcctagcgcctcgcctccgcattctagggtttccccgcctccggcgccggccatggaggcggtggtcgtcgacgcgggctctaagctgctcaaggccggcatcgcggcgcccgaccaggcacccccactggtaatgccgtcgaagatgaagctggatgttgaggaccaggagatggctgacggcgcggtggtagaggaggtggtgcaccctgtggtgcgcggcttcgtcaaggactgggacgccatggaggacctactcaactacgtcctgtacagggacattgggtgggagattggggacgagggtcagattctcttcaccgaacccctcttcacgccaaagactcttcgggagcaattggtgcagcttatgtttgaaaagttcaatgtttcaggcttttatgcctctgaacaggctgtattgtcactctatgctgttggacgcatttcaggatgtaccgttgacattggtcacgggaaaatagtgaatcaatcgttcaagctctatttgctcaaccaagttgatgaagctattg

SEQ ID NO: 2760 - DNA, 1398 bp, Zea Mays
atccgtcgttcgtcgatgcctaccattcctgctgctccagagagacagtttggctcggcctcgcttttcctccactataaaaatccggtcgcgacggagcaaaaaatggaccccagcgtagcggagccggcagccaagcagaaaaatacgagtatcgcacgcgcaaggcgattccgtccccattctccacccaatagggagctagagctacgagacggggaaaggggggacgggaataggcgtcgtcggccatgtcgtcgtcgtggaactcggtgggtctggcgatcctgtaccaggtgctgggctgggtcgccttcgccgcgtggtccttcagcttctacccgcaggtcctcctcaactacaagcgcaagagtgttgtgggcctgaatttcgattttctggtgttgaacttgacaaagcactcgtcctacctcatatacaatgctgctctcttcttcagcccattcatccagcaacagtatcatgacaaatatggtgataaagagatgattcctgttgctgcaaatgatgttgctttttcactgcatgctgtagcattgacagcctttaccgtttttcaagtattcatatatgagcgaggaacacagaaagtctccaaagtttgcatatcaatttctgctattgtctggatcgccgctcttgtttgcctcattattgcttggccaaaaagtgactggctttggcttattgatgtattcaattcaatacaagttggcatgacagcaatcaagtacatccctcaggccatcatgaacttcaggcggaagagcacaattggttggagcgttggcaatatattacttgatctcacaggaggggtgctgaatttttgtcagatgggtgtgcagtctatagatcaacatactttggtgaatttctatggaaacattgggaaaacccttctttcattggagacggttttctttgatgtcctgttcattatccaacactacgtgttgtaccctgtcaagaaggacgagaatgacgatttccctgttctcccccattgaagtaaaacatgttgcggcccattaaaattccaaatgaaggaggtggaactctcttgggctgaaagaacacaccatagtggcagtgggcctagttatagcagataatatatagaagaggcgtggtgtggagactggagactaaggttcatctcaaaaaagaaaaagagaggatcctaaaaagaagatattatgtctgagaatagtttccaagattcttagcataccgttagcgtttcatggactatatgtcagattgtacagctattcattggaatatcgtaagatttatccgtgagagtaagggcaccacacaataaatgaggcaacaaccctgaaatctttttactctgatacgtgctccatccgt

SEQ ID NO: 2761 - DNA, 1910 bp, Zea Mays
cctaaaatcctccgcctccttcctcgccgtttcgggcctcgcctcgtccccaaatccaacccttcgtactcagtttccatcattggcatggcgtccgataccgagggcatcgccgccctcttctcgatgtacaacgacgacgaggaagaggaggatgccgacgagcccagccctcctttcccagcgcttcccgccgccgtcacctcctcctcgccgctgtcccctcaagccggggccgaggaccccaacccttctgtggcgcctccgtcaccttcccgtcccgaggaattggccagtctcaaaaccctagcgagtccccacccttccccggcgcgggggctgcttccgccacttccctcgcggcgctcttcatcaccctttgcagtgtcgtccccctccccgctacggggaccgttcttcgcgccgccggcagacctgccgcgccctccgcggcgcggggcgcttgcaatcgtggactatgcgcacgacgagacggctatgtcgcccgagcaggaggatggggagatcacgagcaacacatacggatttggctcagatgctcaggctgcagaggggaatcttgaagaacgaacttactccggcacagttcatgttatgaccccaaatactctagcagaattgtctcagcatcctgatgcacccgagcagaaccaagtagggacagacatggcagtggacgtaactagaacagaaattaaaggtgcccaggtggaaggaactactgatatttcaactaatggtgaaagtgatgatccatcaaatcgtttccttcctccacccgtgactacaaaatgctctgcagcattacagggctggaaagagctttaatgctgaagtgcgcaacaggaaggactacagaaatcctgactttttgcagcatgctgtgggataccaagaaattgatcagatagggacctgtttcagtaaatatgtttttgatccttatgggtacgacaaaggcgactactatgatgagatagaagctgaaatgaagcgtgaagttgagaggaaggaacaggagaagaaaaggagcccaaaagttgaatttattactggagtacaacccccaatcaatgcatcaataccgaagatcccaggtttggctggtgtctgtacactaccggtacctacagaaggtgtacagaaagagactagaccaaacaagaaatcaaaatgggataaggttgatggtgatgttaagaaccatgtggttcctagtggacacgacaacttatcagcaactactgcggcactcttgacttcagctaatgttggtgctggatacgctggttttgcgcaacaaaagagaaaagaggccgaagaaaagaaaaacgatcataagtcagacagaagatcgtagcaccaccttttgtttcattctgagcagtcagcgtatcatttattttttttcagtgacatagttttgtaatgtggatagagaaaagaaggaaacaattaaaaccaatcctagggaaatggtttcagaaaagccctctgggcaacttggtagtcttgtattatacaggtaccagaaacttaacattttagaccaagaaaaagagaaccgtgagcgttctgcacttctgccgcctgttacagtggtcaattatgtgtttttgcattcagctcattggtctgccgcttgaatgctgggattttaaatcgccaaccatttatttatcatcgatggtcacctaatctttatgtcttgatcgtttatttttatttcatatcgattgggtgcgacatatatatttggacttgatatagatttaaactgacttaattctactcaattttagatcaaaatgaatgaccctttaggggtgttgactaaattttagtctctttattttagtttttaaacataaaaactaaaataaatataa

SEQ ID NO: 2762 - DNA, 1711 bp, Zea Mays
atagtatagaagcatagatttgtgaactttgagattatctattggatttggtttttcttttttgataaactgaaataaactgcgcttggaactcagcgtaaaacggggaaggacggacgggcccacatgactgttactgtaacttaatccggttcatggtctgtggtttgtccaacaaagcctgggcctggccgcctggacctgaaaaagtcgttcgggattcaaacccttcgatcccaaatctgccctgcacgcctcgccgccggccacacccccggcggtcgtcgccctacccgcccttctccttacctctaaccccgccggagcccaacacctccccaccatgccgcgaaacttccgcaagcggggcatcgagcaggacactgacgaccgctccgacgacgaggacactcgccgcatcgccctcgaggagatcaagtacatgcagaagctccgggagaggaagctgggtatccccgccgacctcgccgccgcatccactaacgggtcctccgcccgtggtctattgggcaccggggcagcggtcgccggtgaggccgagaaggaggacctcgtcctccaggacaccttcgctcaggagaccgccgtcactatcgaggaccccaacatgttgaggtacgtggagaccgagctggcgaagaagaggggtaagatggttgatgtgggacacaaggaagagatggaccatgtggacgagctctataccgtgccagaccacctcaaggtaaagaagaagaactcagaggagagctcgacacaatggacaactggcattgctgaagttcagctgcctattgagtacaaattaagaaacatcgaagaaaccgaggcggctaaaaagttgctgcaagagaaaaggcttgcaagaaaaccaaaaccagatgcaaacattccatcaagttatagtgctgattatttccaccgtggcaaagaatatgatgaaaaactgcgaagagagaatcctgggttgtacaaagataatgattctcggccaagtggaaatccaggaggcaaagcaacagatactaaaaatccagatggtgttggtgcaggacggagagaagctgcgagtgatgaactcatgcttcagcgtttccgcaaacgagaaaaattccgcgcccttcgaagataagccagagctgacagctgctaagggcaaggagcagattaaccttattacagaggcgatttggggcaatatatttgagctgagggatatctgaattttgtgtcagctctgaggctcatatattaagaggggccgcagtggttcaggacataggagctcataactttccagatgctcagatcgtgccatgttcatctgcaatggaagaaaggaaggtgtgttctccgtacaaatataaatgaactgcttcgacatcttgagcaaactccaaggggtagtgcgaatgtctgatctcattttctttggagtgaatggcaaagcctgcaaattcatctttctagtctagaatgtattgtttctctgaattatttgcagtttgctgcagtagcatcagttatctagatttctagggacgagcaatctgtgagttgtttttgttgcactattgctgcttgctttgcctttactagttcaagtatcaattctttataagagttttgagtttcatatcaattttgaggttttggccttttgcacccccgttttttttggtttagctgt

SEQ ID NO: 2763 - DNA, 1497 bp, Zea Mays
cgcacttttcccgcccatacgcaaggaatggccggcgccgtctccgtctccgctcaccggcggcaatggcggtacacgtgggaagccctaaaccatcttcccctcctccgcctctacctcctaccccgcgccgcgctgcccttccgcatcccctcggacctccgcgccgacctccgactccagggctctctcctccacctgtccttctcgctccccggggacggggctgccgtcgcgctcagggtccccgtcccgagggtgctcgtagacccttccgcccccgtagagtgccgcgccgccgccgcgggggaccacctcgagctccgcctcgcgctcgtcctgcccgtcgaccaccctgtcgtcgccgccgcgttccctccaccccccggcgcggagcctccggcttctctagcgctgcgcgatgatttgaagagtttatctactggagacgttcacttgtattgcaaaaattgttcgtcaaggttgacaaaacagccactaaggaaaatcatggaaatgccatctgtagattgggtagatgtggctgacaattgggttggtggatgttgcacctcatttggtggtgcaggcgagaaacttgtatctcagtttattagggcatatggtcgtttagaaggaacaagtctactggatgcaacttccattactgtagaaacagacaatcttgaaacagatttagtgtctcagctgatggccgcctacgactcttcaagtgctacacatctacagaaattcctgtaacagggcctcatgatgtgtttagggggcatacattggaaagagtttttgtgaatctgttgcttgaagttgcagaagacgaaatatcttttcgcacattagtcagagatttgaaaaccaaaaggcccatgctgcaattagttcttcttagttcaaaagcatggttatcttctggttgctgttatgaaaatgatatcgatggttcacatggaacaacagatctgcagccaagtgttaaactcttgtattctgattatagcaatgcttcagaagcagatttaaggatagtagaagcgtgggcatccaaatatcgggctgaagagctgtacatgatgaagcgtcagatagacgaacttactgaatgcctaagctcaggaaggaacaactttccagtttcttgttcttcccttgaagggatgcggctctcatcgcttaggcgctgacttcagaatatgacatggaaattgtgcctggactgatcatatttttgtactgatcaaaggagtctacagcatagaatcctgatggcatacctgatcatcctcggtgtcttttgagctttcagcaagctacctaataatttcttctttaaaatttaagatggcatgccttgtcctctgctctgaaaagacttggtggcatccgaaatggagcaatggcttatccaaaactttcagcttctctggtagtctaattgcatagcatttggcacgctgttactggccctgaaggtttaaa

SEQ ID NO: 2764 - DNA, 2010 bp, Zea Mays
cgcacttttcccgcccatacgcaaggaatggccggcgccgtctccgtctccgctcaccggcggcaatggcggtacacgtgggaagccctaaaccatcttcccctcctccgcctctacctcctaccccgcgccgcgctgcccttccgcatcccctcggacctccgcgccgacctccgactccagggctctctcctccacctgtccttctcgctccccggggacggggctgccgtcgcgctcagggtccccgtcccgagggtgctcgtagacccttccgcccccgtagagtgccgcgccgccgccgcgggggaccacctcgagctccgcctcgcgctcgtcctgcccgtcgaccaccctgtcgtcgccgccgcgttccctccaccccccggcgcggagcctccggcttctctagcgctgcgcgatggaaaatcatggaaatgccatctgtagattgggtagatgtggctgacaattgggttggtggatgttgcacctcatttggtggtgcaggcgagaaacttgtatctcagtttattagggcatatggtcgtttagaaggaacaagtctactggatgcaacttccattactgtagaaacagacaatcttgaaacagatttagtgtctcaggtagcttgttcagcacttagtagacattttgttgctataaaagaagatatatttaatgttagtgtagaaaaagatcataccactgggaagataaagttgaagaattcagaagagcaagcaaatatcacagctactcatgcacaaccacctattattttggaagaggggcctagtgttagttgtagtgaaacaaacggagtcactcagactaatcagcctggcatttctcagacagaagctgatactgatgcatactttgagaagtctgaaaatgactgttgtgttgagaaagtggggaaatctaagaaagaggttgatttgttgctggtagatccatgccgttgctgttgtgtcaatggatacagtgagaaagctgaagataacccttcacagttgtccttggtcaatgagaaaaagcagaatatgttggagattaaaagagattacaaattaacaaaaactatttctcttggtagtagcttcattgttaaagcatctaaccttttgaatgattttgagtgggttgaacttctctgtggtcaatgttcatcacctcttggctcatacccttctcagtgttcgcttggtccagctgatggccgcctacgactcttcaagtgctacacatctacagaaattcctgtaacagggcctcatgatgtgtttagggggcatacattggaaagagtttttgtgaatctgttgcttgaagttgcagaagacgaaatatcttttcgcacattagtcagagatttgaaaaccaaaaggcccatgctgcaattagttcttcttagttcaaaagcatggttatcttctggttgctgttatgaaaatgatatcgatggttcacatggaacaacagatctgcagccaagtgttaaactcttgtattctgattatagcaatgcttcagaagcagatttaaggatagtagaagcgtgggcatccaaatatcgggctgaagagctgtacatgatgaagcgtcagatagacgaacttactgaatgcctaagctcaggaaggaacaactttccagtttcttgttcttcccttgaagggatgcggctctcatcgcttaggcgctgacttcagaatatgacatggaaattgtgcctggactgatcatatttttgtactgatcaaaggagtctacagcatagaatcctgatggcatacctgatcatcctcggtgtcttttgagctttcagcaagctacctaataatttcttctttaaaatttaagatggcatgccttgtcctctgctctgaaaagacttggtggcatccgaaatggagcaatggcttatccaaaactttcagcttctctggtagtctaattgcatagcatttggcacgctgttactggccctgaaggtttaaa

SEQ ID NO: 2765 - DNA, 4281 bp, Zea Mays
caaggatataatttaggagatttggttgtggcagtataggtggctcacagatgagagttttatttgggtctcatggcgatggttcattgagaacttggtcttccaatgggagcatatgacttgtgctgcttcgtatattgggtgcatgcacctaacttacctgaagagctgttgtttggatttatgtcaaactgatgattggtgaagaatgctgaggacaacgaatatccgttggatgtgtcgccagcactggagtttgtcataacagaaaaggatattactggtacaggagctgactcgacacttgttgtctttaataatgaaaggggattttcggcagcaaacattgaatccatatgtaggattggcaggtccactaagaaagggaatagacatcttggctacattggtgaaaaaggtattggtttcaaaagtgtatttctagtttcaagtcaaccacacatattcagcaatggatatcagataaagttcagtgaaaagccttcagcagtttgtgatataggatatattgttcctgaatgggttgatgggaagccaaatattgatgacataagaacagtatatggcccttctaggagccttcctacaactgttattatcttacctttgaagactgataagattcttgctgtgaagaaagaactttctagcacgcatcctgaaattcttttgtttctttcaaagattaggcagctctctgtcaaggaaatgaacaatgatcccaaggccagtaagatcagccagatttcgatctccagtgaagtggactactggtccagcaaggacatagatgcagagtcttacacgcttcatttagctatgcaggaaaatagcaagggggaaacagaagagtgcacctattatatgtggaggcaaaagtttgctgtccaaccagactgcagaattcagaaaaggatggaagttgatcaatgggtagttacgttagcatttcctcatggacagagactaagcagaggagcaaaatcgcctggagtatatgcattccttcctacagagatggtcactaatttgccctttattattcaagcagattttcttctagcttcatcccgagagtccattttatttgacagccaatggaatcgtggtatccttgagtgtgtaccttctgcttttatcaatgcttttggagctctcttgaaatcgtcaagggatgccccacattttgcgctcccacccatttttaggtttctgccgattcaggaatcctcaatatcgctctttgatagtatcaggctgtccataaaaaccaaagttcaagctgaggatataatgccttgtgaaccatgcactgcacagaaggtcttctgcaagcccgctgaagtctctcgcctggatagtgcgttctgcagaattttgaatttggcccagaagcaagggattggtctgcagaatctatcttcgtatggtacttttgtactaagctcctaccttgacaaccttgagtatgatgatgtattagaatttttaggtgttggatatgccaatagagaatggtacagtaagtgtattgatggattaaaccttgtgaaagaggcatcagaagaagtgtaccttcagatcttatattttgttgctggaaattggaaagtgttttctggaacaagtatgatgcttatatctctcataaaatatgtggatgccagcggccaattgtcatgttccagtgtgctagcagcacaaaggtctttaagatttctgaatgagaataacaagactccacatgtcattgaacaaatgaaaaatggctgctgggttaagactcttattggcagaagatcaccattaaatgcaatcctatttaattcagaatgggagaatgcctcggccatcagtatcttgccttttatcgatacagccttctatggggttgacataactgatttcaggtcagagcttaggctatttggagttgttgttgacttcaaaagaaattatcagctggtggttgataactttcggttctctatagatacaatcactcctggtgccacaatactaatgctcaattgtattcgatatgttgaggaatgtcatgattttgtagaaagactgaaagatctcagatgggtgaagactaatgttggcttcagagctcctcacgaaacattccttattgatgatgactggaaatgtcttttggaggtcattgacaagacaccattgcttgatctggaattctatggggatgaaatcaagctgtacaaagaagagttatgtaaaactggtataatcgctggcttcaaggaagcaagtaagaaaatagtgtgtcatgtcaagaaacttgtaaacactagtattacaaaagagctggcatttgcactactaaaatgctacagtgacctaaccaccaggcatgggaggttacctgttgctcttgcgaacttcatgcaacatgagagatggctgcatacaacatttggtttcaggtctccgaaggaagcaattctttttagctcagaatgggagtctattgctttagtctcttgcctaccattcgttgatgacagcgatgcacagtatggccttgggaaggagatttactgctacagtaatgaactgaaggccttgggtgccaaaactcgactagaacagggtgcagcatttgtcatttcggggctccgtattccaactgatccatcagctgtgactccacaagctgttatttcattgctaaaatgcatcagaatttggagacaaaacggatctgatctacctaaaagtttcatgagcgcaatcaacttgaagtgggttaagacaactgcaggttaccgccatccaaacggttgtgtcctctttggttcagtgtgctcttctcatgtttacagggatgatggccctttcgtagatgaagtgttttatggacaggagctagtttcatatgagagtgagctgcaaaaaataggagttaatgtggatcccagagctggttgtgcttgtgcactgatggcacagcatctcaaaggtctctctaatgctgatgcaatctcaaggatttactcgtacttggaggtataccgctggaagcctcgattcaccagtgatgactggatttggatacctcatgcagctaatcaaggacaatgggtcaaccctgccagttgtgttctttatgatactcacggtctttttggctctcagctctatgttctggtgaaatggtacagcagcaaattgcttcgatacttcaacacggcttttggtgtgaagcatcgtccaacagtcagtgattattgcaagctctggagtatgtggcagggctcaaactctacactgacacaaaaagaatgtgttgccttctgggaattctttggcaagaactggagcactgatatggggaaattcattgctgggtgtgtcgataaggttcctgttagttccggagaccagatcttgctacttgagaaacaagatgtctttattcccgatgatctactacttgaggatcttttcaagaagcaggctcagaaacctttgtttgtttggtatccttcaactagtttgccttgcttgtctcctgctagattaaatgatatctacagtagcattggtgttcagaagatatcaaaatctgttgtcagcaatcaatacgatcacttggaaattgaatctgtcacccttgttcataagggtaccgtaattaaacttggcttgctcaaaattgtcctggctttccttacggatcctatccttgacatttctgtcgagaagaggtatgaaatggtcacaagtctcacaaatgttgctgtctacgagacaagagggcctctcaatgtgagttatcaggttggactttcctcgggaagaagcttgcatgttacatgtgcaaggtttttccgttgggagagggagagctcgaggttatttgtgacggaggctgatgaaccaggatcaatgacctatgcaatgaagatggagtatgcatcatgttttgctgaggagatctcaaaaggattgttgtcggagaataaagaacagattccagctcttgctgaactcgtgaggactgggttcttgctggaatttgatgttcctgcagttcagattttgttgaatttgaagaacctacgactgtttgagcaggatgaacaatttcttttaaagctttcacaacattgtgacgatggactaggtggtccttctccttcctatattaatataatagtttgctatttgagggtactgtgggattttgccaagagatcaacatactgatttagttgcatctaaggttatgaa

SEQ ID NO: 2766 - DNA, 3242 bp, Zea Mays
gggctcttgttggagatgctctgaggtcagttcctagtgttacttttgaattataccgaatttgtttcaccgcggcatattaacgaccatggccatcttgtttcttcactggaagattccacaagaaatggtcgatgtacatcaaggacacgggcgcaggaagccttttcactgtgaagttgcttgcccctactctaagatcgccgcttctgttcagtgtgatgactcaagtggtgatgaaaagctgaactttgctcctgataatgagcctatccagaaatggcaccggtctttgagctctgacagtgttgtgcagacactccgctgtttaaggaggaaacctgcagttgcattcacctactttaaagatacacatagccttggttttcaccatgacttctcaacctactcagagatcatacaaattttgtcccattcattccaggggaagatgctggtatccttgtttcgtgagattctcttgggaactggtagtggtggccctgaaatcttaccgctcattgatcacttgagaaaaacatgtgccacttctcacgtcgggatgattgaaatgggagtgaaattagatgtacatggattctcatcatttataattggcctttgtgattgtggaaagtttgatctagcttataacatggtaagaagatatgctgttctacaagagatatcccaagagagggttccaattgaagccatggcttataatatggtaatcgatggactatgcaaagaaatgaaactgaaggaggctgaaaaggtcttggagatcaagaccagacatggatctgcccctgatctatatagctatagctatctcattcatagtcattgcaaaatgggtaacctagagaaggcatggtatcatgttgaagacatggtatcccatggcattgagataaattgttacattgttgcttaccttctacagtgcctcaggaagttaggcatggtatctgaagtaattgtgcacttccagaaatttagagatttaggggtccatcttgatggcgtgctttataacattgctatggatgcttattgcaagcttgggaacatgaatgaggcagttaagctactgaatgaaatgatggctggaagtttggtaccagacaaaatccactatacatgcctgatcaatggttattgtctgaaaggagaaacagaaaatgcctggcaagtatttgaggagatgctgaaggcaaatataaaaccagatgtagttacatataacatattggccagtggatatagcaggaatggccttgttatgaaggtatttgacattctagagcacatgatggatcaagggctcgaacctaattcactcacctatggtatagctattgctggtttttgtagaggaggcaacttgagcgaagcagaggtgctgtttaatatagtagaagaaagagggatagataatatcaatgtgctgtacggttctatggtttgtggttatttgcactcaggctggactgaccatgcttacatgctttttcttagagttgctaaacaaggaaatatggtggatcgtttgtcatgttcaaaattgataaacggactctgtagggatgaaaaggttggagaggcttcaactgtatgtaaaatgatgcttgaaaagaatgttgtccctgatgtaatttcatatagcaaacttatatcagcttattgtcagacaagagatatgcacaatgctcgcttatggttccatgatatggttgaacgaggactttctgatgttattgtatacactgtactgatgaatggttattgcaaggttggtcggttgcaagaagcatgtgaattatttgtccaaatgataaatttaggaatcaagcctgatgtagttgcatacacagtgctattggatggccacctaaaggagaccctacaacaagggtggcagggcatcgctaaggaaaggaggaccttttttcttaggacaaagcataaggtgttgctgaactctatgaaagatatggaaatcgaacctgatgtaacctgttacacagtattgattgatggacggtgcaaagcagaatatctagaggaagcacgaggattgtttgatgagatgttagcaaaaggacttatccctgatgttcacacatacacagctcttataaatggatactgtagccagggagaaatagctaaggctgaagatcttttccaagaaatgatagctaagggaatgaagccagatgtactgagcttttcagtattacataagagaaccttgagacatgaaaaggctcattaatatttatgtgtactaatggttatgttgatgaatgtcagtttgactgaaggtgaaggggcgtcctgccaacaaaagggaaggcgaacacctggattgaaagactgctctctcagttcagcattgggtcgtcaaggagaacaaaatgatggtaccttcagcgtgaggatcgatgactgtcaatggagctgtgcaaacacaatcgtggcaaagctggctgtggcactggcgcctatgccatttatgagggttttgcttgaccgttttgtggctgcaactagtggtgtgttcccagacaaccaagagctacaagacagaggtaagctctcgggttccgtcctggggcaatggggagctgttgatgatcctgagtccatgctgcaccacatccattgggcagtaatgaggtgattccaatcgttaagagtcaagcataatgttgtgtgatagatctatttgcggtgtttgacatcgaggctggggaagttggaaaatggacacagatcgcagagctcggttaaacaatctccatgtctgcattatactgatgactggaatgagggtgtgtccaaggaggagctggactctgagatcccacctggcgaggagtcgatatacggatacataatgggaatggcagatacatgtagtctgtagaatccatcaggatttccccttgataggtctcaggtttcactctaatattgtgcattgtccctcaagatgttaatacagcaatttcttgtttagtgctcataacattactccagtctccaggcgtagtgcttggtgtagagacataaaacagataatgcagcaccagtttgtggcttcaaattccgaaacaacagctttgtggaagacagaaaagaacactagtttttggcgaactgttgattcatttcagaatccaaagattggatgacctatttcgtatttcaaaaatgacatccaaatgggc

SEQ ID NO: 2767 - DNA, 711 bp, Zea Mays
acgcgcagtcttcttcagaattccctgatcacgttccaggcagctgagagcccgcgtactagccggacaggaggcgacagcgacaccgcgagacgtgccatcatgttggaaggaaaggcggtggtggaggacaccgacatgccggcgaagatgcaagcccaggcgatgtcggcggcgtccagggccctggatcgcttcgacgtcctcgactgccggagcatcgcgtcccacatcaagaagcaaggggagcttcatctacttccgcctggagtcgctcaggttcctcgtcttcaaaggggcggcagcatgatgacaagccccacggctaacatcgcgagttcacgaccaggcaaagcaggtggaggatgggtttttttttcaccggcctttgtggacggcttgcctcgctgtatacgatatcaccatggtaataccaaccagtagattgaaacgttgtgggagattatattggaaacaatggaatttcatcacttgtcaaatagcttttgtgtacgaaatctagatggatgtaaatttgaaatcatttggatttggaaactggtcaattagtatcgctcgtgaacgaaatctagacggatgaatctgtcgatcgttactggtgtgtggatgaaaatctgaaaatgtttggagtcgaatatataatgttgtcgatgaaaattcgaaactatttcgagttttgcagaaacgtca

SEQ ID NO: 2768 - DNA, 2761 bp, Zea Mays
catgttcctccctgccatgtacacttgcatctgcataccttcttcttgacctcaatcgtaacgtttgacgccagaaaccgtcgtgtatcacacagccggattcacccataggcccaccgattcccatatggagcccaccaaaacccaacccattacctgatcccaggcggcagcggaaacgcaaggagaggggcggcgatgatacagtagatttcaaactcaaactgaccaccagagagagatagaggggagagatcggagaggaaggacgtttggagcaggcggctattgcaggctttgcagccgccgtcctcctgattcgggcccccctccccggatcgctccagattcgcacgatttggggatcgtgcgtttcgccatcagatcgggagaagaaaaatcaaggtgaaggggcaagtttctgcaacttaaataaatagagtgaatatgactgacatgaattctgatgagattcttgaggttcctgacactcctgaccgattacagcagtcaaaataccatgtttccagctctattgttgggagggatggtacaatggcagctgctaatccatcaccacagcgcaaatttagaattagattcaagaacaattccgtgcaaggttcatcaagtcaaaataatggttgtagcatactgcctgcagctttagatactgatcatattttcaaacaagctgaagcagcacagattctggaactgtctaaagactataaggcaaaattttccctacagaaacctgacagcacaaggatatctgttgacagtgaaaagagggctggaaaacatggctttgatcagagcagaagcatttcgaacaatataagttgtagtgtgactggaggaaggaaccctaccttccaagttaaagatggagaggttggtcagcaagatgcaggtcatcagagtgcaaactttctagacataggaccaggttttcctactattcaagtgggaaaaccaggatacagattatgcactcgcactactgataagctgaaaggtgtaacaggtgctgatgtttgtccaggatcaagttctggggaggtcaaaggggacttgatcactaacaaggtcattgcaggacctacaagccctctgcgtgtttttcctcgaaggcatgtgggccaaaaaaggctggtacgcaatggatgtatttccccctctaacatagccaagacagatgcaaaagttaatgaaaaacaggaaatgtgctctttaagtgaacatttggaccatccgcatcagcctgatgcatttgacggaggtgatgtgattgacctcacggagaattcaccaataatgacaaggcagagatctgaagtgaacaataaattgatgtctggacacaatatggacacaagggccgcaaaaaagctgagaacagacagatttggcaggactttggttcggcagtccaaatgtcatgcaaacaacagcagttgttctgaagttagcttatcaggcctcaacaacaatggaaaaggaattgactgtgatatcttggatagtgatcaaactggagaagctaatttgaggggggttgatcttagtactgctggaacttatctaaacaaaaacttttctgatataagcacggagcaaggttggagaacaacacacaaccacacaagtaaattacccatttcgtttatgggtaatataactagcagttccggatgggaatctggatcttctaccacacgatctaatcaaaaccatggatctgctggaggcaagcatagctctgttagtggagcaaacataatagttcctgataagatagggaataaaacaataatgcttggtagagaaaggagaaaacaaacctcaacttcttcccatattggtgaaagctctagtgctgctgacgaacctagaggtgatcttcaatcgtcaaaaatatcagctggcccaaatcatagcagtcatcagcataatattcctaagcacaattggagtcggatgagttattggctcgccaactccaggagcagctctacaatgaatctgctcgttttgccccaacagaagagattgatgcaattgtagcaatgtcacttcaacatgaagaagatactcatcggacatctaggaccttaaggaggttccaaaaccatactagaggtgctcgggctactcgtttgagttcttatcgaaatgctcttagggctgaattagcaacagcaaacaatatgatttcccgtcagcggaatactgctccaataaatttgggattgagagctgctttagcaagatatcctggtgctttgcacattcaaccaaacattgacttaaatgactatgatgcactgcttgctctggatgaaaataaccaccagcacactggtgcttcagaaagccagatcaataatttgccacagtcagtagttcagtccaatagcattgaagatccatgttctgtctgccttgaaaatccttctgtgggagatactatccgccatttgccttgctttcacaagttccataaagagtgtattgacgagtggcttaggagaaagaaactgtgcccagtctgcaagtttgggattaactgaagtttgccgtaccagtctacagtggagttctacttggtagtggcagcgacgaggtgctgcaatttctcatacgggatgctttcctgcaaagatttttttttgaagaaaaaaaaatcacggaggggggcagaaaaaaaaaaaaaaaaaaaaaaaaaaaaaaaacaaaaaaaaaaacccaaaaaaaa

SEQ ID NO: 2769 - DNA, 1596 bp, Zea Mays
ctcaggatggtttgatcctttctgttgcaatctatcggctgtccaacatttgttccgaattgctaaccaaccataagaatactttcctttctccctttcttttttgtagacttttgcttgtgcaaagttgttccacttctgatgcaaattcaattgagatcttgctagtcttattataaagaaatgagcaatagtaagacacttgtacctgtcacaacaaggatatgtacattctcaatgtatggcaacaataacgaggacaaagatcttgctagtcttattataaagaaatgagcaatagcaagacacttgtacctgtcacaacaaggatatgtacattctcaatgtatggcaacaataacgaggacagagcctttttaaccccgagcaagttggggatgacagcatcttggttgaccttgctgatgccatcacaaaggaaggaattagtgcttttcggtttgatttttctggaaatggggaaagtgatggtgaattccagtatggaagctacagaaaagaggcagctgatttgcgctctgtagtattacatttctcagaacagaaatatgacataattgctcttatcgggcatagcaaaggaggaaatgctgttcttctttatgcttccaagtaccatgatgtccctgccattgtgaacatttctggccgctttgcattagagcgaggtatggagggacgccttgggaagaatttcatgaggagaataaacgaagatggatacattgatgtgaagaataaaaaaggtctagcctttctttacttgattaataatacgtcatttttttcatgttaatcttattatgagtctgattcaatggactatcccttagttttctaatcaattagcacagggtcatcaaacaaatgcatgcgtctgatctggtgtcaatcttgaaactgtcaaaaactaaactataggctcggtgtttctgctcactctttccaagccaggacacatggcaatgcgattgtaaagaggatcatgcatcgcgttgttttggtggttgtgcaggggagttgcagtaccgggtgtcgaaagcgagtctggatgaccggctgagcactgataccctattctccagccgtgccataagcgaaggctgcagggttctcacgatccacggcgccaaagacgagatcgtcccggcggaggacgcccggcagttcgcggcgaacatccgcaaccacgagctgcgcatcgtcgcagatgccaaccaccgttacaccgggcacagggaggagctggcctcgctggtgctgggcttcctcagctcccatccctaccagatcacgtcgcgcttgcgtccgagactctagatagagtagagcacacccacttgaccgtttgcgaacaaaaaaaaatcccctgtaccaatctaagagttgtgggtgtggtgatgtgtttatccagaaccagaacacgagcacctgccgtccaaatcagcgtgactcgctctcgctctagaatttcaaaaaaagtcagtgccaggcatctaacagcaatctcctcatcattgcgttgcgtccaaaagaagtgacaatggcaggtgggccccgcatggcaggccatcc

SEQ ID NO: 2770 - DNA, 2337 bp, Zea Mays
ttttgctttttccttttaccttttcctattacttatttatttgtcgatcggtttcctataataacgctcctgcgagtgacaagttccttgtctgcctagcctctttgtcacattgagaagattaacccgttataacaccttctgtccatctggcctcgctcgtcacttgctttgagaaaagaaatcgtgtgcgtagaaatgtctggatcatttatttcgtccttattggattcagcaaccaggagctcggaaatttgaaggccaaatgccaccgtacccatcgttgtattgaccatcagtgtataaaagaagccggacagtttcgctgctgacgacgagccacctaaaggcccaaatagaaaaggaaaagtaactacacataacaaaatctagagcaacgtctgctgggcggaactatgacgaattcatcatcaactccaccacgatcggtatcagtggcaatccagcaacgtctgctgggcgcagccgtatccggcaactccgcggaaatgaaacacatggccctgcgagccccgggggtgctgctggggaccactcctcaggggaacacctgcctccacatcgcctgcatctatggccacgagaggttctgcagggacgtcctggcgctgacgacgaacagccagcagtctccggcggcggcgcctcttctcgtgaccatcaacgcggatggcgagacgccgctgctcgccgccgtggccagcggccacgtctccgtggccttgtttatcctcgggcgctgtcgggaggagcggctgagcgaggcgatcctgacgcaggacaagcgcgggttcaacgcgctgcaccacgccatccgcaacgggcaccgggggctcgccctccagctggtcgacgcggagcccggcctgtcgaaagccgtgaacaaacacgacgagtcgcccttgttcatcgcggtgatgaggaactacgcggacgtcgcggagaaactgctggagatccccgattctgctcacgtgggagcgtatggctacaatgctctgcatgctgccgtgagaagtggcaatccagttgtggcaaaaaggatcatggagacacgtcctgagctggcaagacaagaagacaagcacaaggcgaccccaatgcacatggctgtgcactgggataagattgacgtgctgagagtgctgctggagcatgactggtccttagggtacgtactcgactccagtggtatccctattcttgcttcagttgcgagtcgaggatacgttggtgctgcccaagagcttctcaggcattgcccagatgctccctatgcccctacaaatggcctgttgacatgccttcaccaagccgttcagggtggtcacatggagcttctagaattcttcctgcggtcaaagcatctacggaagctagtcaacatgcgagacggagcggaagagactcctctgcacgacgccgtccgaaagtgcaatcccaagatagtcaatgctttgctgcagcatccggacaccgacgtcacagtgcttaaccggtcgggtaacccggctacctggctactacggggcgaccacgccaagactttaaactggaatgaagtctccatgcttatgttgaaagctgatcctgatgcagcaaacgatacatataaccttcataagcaaatcaaggatcgagtaacttctgaatcaaggaaggatataaagttattgactcaaacatacacaagcaacacttcattagtggcaatcctcattgcaacaatcacctttgctgctgcttttaccttgcctggaggatacgacaatgatgctggaagtgaggggctacccatcatgtcaagaaaggttgcctttcaggcatttttgatctctgactgcttggcaatgtgctcctcactggctgttgccttcatatccatactagcaagatgggaagattttgagtttttagtttactacagatcgtttactaagaaacttatgtgggttagctacgtagcaaccaccatagcatttgcaaccggtctatacacagttttagcccctcgcctcctatggttggctataacaatttgccttatgtcagttctactgccatttcttacttggttactaggtgaatggcctgtcttgaagcttagatttcacctgggcaaaacattcaagtctgagctccttgatatggtctgattttatgaactcgtcttatttcttccaacaactctctgttttactatatctaaaaagatagtatgtatgcctcatgttgtttgaaaagatgtcattgtgattttgaatgtcatgtaaaccttaaattttgtaatttgatgtttattgcatacatggcaac

SEQ ID NO: 2771 - DNA, 2416 bp, Zea Mays
ttttgcctggaatgcccagcttttaaattgcatgttaggaacaccatgaccaccataacttagaggcctcgtaattatcccccaagacactagacaactttcaccattaacctcctttccccttttccaaagaaacccccatcaaattttgtcaattgatttaatcacccacttaggagcggcccggcggcaaggagccgtggcacagctccgaggctaggggaggtccgactgtgcggcctcgcagcgggagccgcggctcggcccatggcggaagagcagagccaccccacgacaggattcgacgcagccccgacccgtgacagaggggcggagcggccccgcgcctaccgcgtgcaatgagaggtgcggctccggtccgcggcggaggggtggcggctggcctggaggtggacggagtggaggaggggcacatgcatgtcgacgcttgctaccgcctccatggcggcgcgcagagtggcccgaccggcgccgaagtccgcggctgtcaccacgacggcgtacggagaagccccaatctcgcggatccacataccctcaggtgacactcccgatctgttgctgctggatgacgcgacgcgcagcgggatcagatggatccgccgtggaaatgaggacgatgaacacggcggtcatagggatcggccgcgcatcctaggagggcgctgcccccggcggagaacagtctccccgggggcggcgcagccgtggcagcggaagacgtctgttggatctaaaacctaaactcgtaataccatgaaggaaggagagaatgtgtataatgtgtaatgttcattgcctgagccctcgagatgtttatcatggcttggagggcaaggcgcctctcctagagataaggaaggctatcatgggattacaatcaatcctaaactatccatatccggtgttgcctaatatactctaacacgattgaaggcttgatatcaaccaccaacgatttaacttgagtctcttttagcacggtcattaagacctcttacattccagatcagaaaatggctagattccataataaaacaaaaagaagactaccagcgattctccacataacagcacctaaacagaggttagtggcttaccaaaacttcacccatgagccggattggacccaaaaataactaacagattgagcccaaaagtagctaatggtctaaaacgcatgaaacacaacattttacagtttagaacgccaaaatgtggttttaacctttaattagcgttttgacgtttaaacgtagttttaataataccggcatggcatgcatctctaccgcatattcgagaaaaaagaagaatttcacagtgatttttcttctaccttctatgcagagaagacatttctgggaagaaggtatatgcggggcttttataacgatgttgctcggctgcaggatgtgcgtaaaatattccctcattgcagctcagatatggaaccggggcagtgcttcttcccacaagaagttgcaaaaagcatcaccaccccgatgtttatactcaatccagcatatgatgtttggcaggtagagcatgtgttgtctccagaaggttctgaccgtgaaaatctatggcaaaattgcaggatggatattagcaggtgtagctcaaaacagcttgaagttcttcaaggtttcaggaaagcgctgcttgatgctataaatgaattcaagaagagaagggactggggtatgttcattgactcctgctttatacactgtcagtcaatgaaagctttggcttggcattcgccatcagctgctagagtgaacaacaagacggccgcagaagcggtgggagattggttctttgagcggagggaggtgaaggaaatagattgtgaatatccctgcaacccgacatgctacaatgtggttctcgatcagccctacaaggaagattaactgacttgcagtgttagttgtggtagatttaattcgtaattgactctccatgagttgatatttgtcgagctaaatgtgatcattagcagagttcggactgagacttgtacttgaggcctattaaaatacgaggagaacaatacttacaaagagaattctatacaatgagcgttgatatgacatacagtaggatatatgtgtgtgtcacgagacgagagggaccttgtccttgaaacagggtaggccatcgttttctttgagagggacattgtgctgtgcatggagagataggttggctgatgacagtggcaagggatgttgtctccgtgagcggagcctggttggttgatgcgtttgtgttctccgggggtccagtctgaaagcacgcgtgccttgcggtcgcgttgaattttggcaactgggcttctgtaatgaggcttggtaatcatttggatccttgttcctcaaagaatgac

SEQ ID NO: 2772 - DNA, 1860 bp, Zea Mays
cacgaatctcgaggcgagctgttcgatcaccactatctgacgtagcttcttcgctcggctcttcttcaccccacccctctcccactcggccactccccccgcggggacaccgagcgctcgccgccgccttcgagttcggagcggagccacagccacgcatgccaatggccgtctccgctgttaccgcctcccatctcgctctctcttttccagcacgtagtcgccggagacgcgctgcgccccgcgccgcggcaggcggcctaacggctcgcgcacggcggctgcgctgcgagttcgtcgccggtggtgggaacggggcgctctccggagaggacgaccctcgcctcgtcgaccgccaaaaagttcttgatgccgctatgaatgacataaacaactcttttggaaaaggaagtgttacaagattaggcagtgctggtggtgcttttgttgagacattcccaagtggttgtctaacactagattttgctctgggtggcggtcttccaaaaggaagagtagtggaggtatatggtccagaaagcagtggaaagactaccctagctttgcatgcaattgctgaaatacagaagcttggaggaaatgccatgcttgtcgatgcagagcatgcttttgatccagcttattcaaaagctcttggggtagatattgaaaatctgattgtctgccagcctgacaacggagagatggcactagaaaatggtacagaacagttacttacagcctctgccccccaaaatagtgcaattctagttgcggaccgtatgtgcagatctggagcaatagatcttatctgtattgattcggtgtcagcgctcaccccacgtgcagaaattgaaggtgagataggaatgcagcagatgggtctacaagctcgtctgatgagtcaagcattgagaaaaatgtcaggcaatgcctcaaaggctggctgtactcttatgttcttgaatcaaataagatacaagattggagtgttctatgggaatcctgaagtcactagtggagggatagccttgaaattctttgcatctgtccgtcttgagatacggctcattgggaagataaaatctgccaagggagatgaagatgttggtgtgaaggttcgtgtcagagtgcagaagagtaaagtatctaggccctacaagcaagctgaatttgaaatcatttttggggagggtgttagtaaattggggtgcgttcttgattgtgctgagctgatggatgtagttgcaaagaagggttcgtggtacagctacaaagatataagattgggccaaggcagagagaaggcactgcagtatctccgagagagcccaaccacctgcgatgagatagaaaaggacttcttggattcaacactagactcaagttgacttttattgtttgcttgatatgaatataattacatatacgaaaataatcatagaaaggtggttcgagctatgataccagaaggatccagacatatgagcctactagctttcgggcagtcatcatcaactgaagatgaacaggcgtatgatgaacaataatggtacatgaggttccgaagatggaacacttgtgaaaccgtcaagctctggcttgtgtcccttgcggataacagaaaagatcagagctggaacgattccgggtgcaatccgacggaaatgaacaaggcctaatgttgtacgtgtactgtggcatggcagaaccgtccggtttaacccaatttcgggcacacctgccagctatttatcactaagtgcaccagagattatatcaaatccgatagtctgttaagcccatccaatgaaagaacttaaaataatccatgtttacatcaggatcataaataaggag

SEQ ID NO: 2773 - DNA, 1651 bp, Zea Mays
aggccaacccggctgtctctcctctcctctcctgctcttgacttccatttccatcccaattcccaccactgacctgaccgcccgcacgccgcccttggcctcgatcacatcatccctccgctccacttttgccgccgtcctccgtctccctccccccgcgtccaaatccaaccatccccaccgcgcgcctccgccatggatcccttccaccacctcaacagctccttctccaatccctaccacccgctcctctccccgtcgccgccgcactttcccctgccgcccccgcccccgcagctgccctccgtctccgccgcctccagcgcgagcctcgagcgggagcgcctcccgcagtggtcccacgccgagacggccgccttcctcgccgtgcgcgccgacctcgatcactccttcctcaccaccaagcgcaacaaggcgctctgggaggccgtctccgcgcgcctccacgcgcagggcttcgcgcgcaccccggaccagtgcaagtccaagtggaagaacctcgtcaccaggttcaagggcaccgaggccgccgccgccgccgccgcggccgacccggcctccgcgcagcagcagcagccgaggccgcagttcccgttccacgacgaggtgcggcggatattcgacgccagggccgagcgcgcgcaggcattggagaggaagagggccaagggcaagggcgtccgcacggcggcggcggcggcgctggacgacgaaggcgccggcgagggggacgacgccgccgatgttgacgacgacgaagaggacgaggacgaagaggccgcggcgggcgacgaggaggccggcgggggcctgcctgctgcggcggacgcgggcggcagggccggcgcgaagaagcgcaggcggaagcaggcgcgcgccgccgccgctagggccgcggcggggcagggcgaggtggaggccatgctgcgggagttcatgcgccggcaggccgagatggaggagcgctgggcggaggccgccgaggcgcgcgaggccgagcgccgggcgcgcgaggaggagtggcgcgccgccatggtcgcgctgggcgaggagcgcctcgcgctcgtgcgccgctggcgggagcgcgaggacgccctgcgcgcgcgcgcagaggagcgcgaggagcgccgccaccagctcgtcgccgcgctgctcgccaagctcggcggcgccgactgctgacgtgtcgtgctgcgtcgatcggcatgcatgatgcatcatccatcgatcgatggtctccctcgcgcgcgcgcgccacgcgaccagctcgtccatccgaatcggcgaatccttcgaccccccgcccaccgaatatcacgctccaccggactaggatatcacatgcttcattctgcaattgaggggggcaccaacatctatccatgtgcgggactactactccagtagacaaggaccaattgtccgtcgacctgatgtggatggagcgatgatggagattaattcggattgtgccaacaaattgcactgatatatatgatggagttgcattattgaagtggtacataaggttgtactagttaatttgactactacctgacactgtacagtggcagagagcaaacgatggtgttgcttgcacgctagctttcacgaatactcgaaatttcag

SEQ ID NO: 2774 - DNA, 549 bp, Zea Mays
gcaggaggctggagtcattgtctttgtccgcgtggacgcggctgacttgcgaacccaccggaccaaccaggacttggagcgtgcggcgtcggagttcgccggcggtgaggagcagaagaggaagggaaccaaagatgggctgctccatctcggggctcaacgcgctctacgatgcggccacgggcggcggcgacgtctggatcaacgagcgccgcttccgcgtccttcgccagatcggcgagggcgggttcgccttcgtctacctcgtcagagagcaccagcccgcctccgatgccgcgttcgctaggcgtgaccccgcccacgtctcagaggatggaacgtatgccatgaagaaggtgctgatacagagcaaggagcagttggatctggtgagggaggagatccgtgtgtcgtccttattcaatcaccccaaccttctgccgcttcttgatcatgccataatagccgtgaaggctctagaggctaaaagcaggggaggccaagttagcaggggagcggctggcggagggggatgagcagggaggggag

SEQ ID NO: 2775 - DNA, 2361 bp, Zea Mays
agagctgcctcataaaagctccctgcgtttgctcctgtttgcagcttgcacggaggcggggtagtagaggacggcctcgcaaggtagctctgctcgagcgaggcagcagcactactcccgttcaggagaggaggcgttctccaccgggtcataggaatcctgacgagatggacggcaatgctaggtcgacggcggcgagtcagaagaagtccatcgtcccggacgacgacctcgtggagctgctctggcacaacggaagcgtcgtggcgcagccccaggggcaccacaggccggcgccgccctccgaccgcgactgcccgggcaccagcggccttactgccgaggagaccgccgcgtggttcccggacaccctcgacgactcgctggagaaggacctgtacacgcagctctggtacagcacgatcgccgacgccgccccgcaacacgagggcatgttcccgggccctacctcgcagccttcgccgccgccgcccgttgcgagcagcggcgtcgagtcgagctgggccggcgacatctgctcgaccttctgcggcagcaaccaggtgcccaggacgccggcagggatcagggggaaggacgcggcattgcagccggaggtgccgagcggtgccggcgcgcacgacggcacatcgtcatccggtgggtccggaagcaactatgggggatccgggctgcccagtgacagcgtccatgtccacaagaggaaggggatgtgtagagacgagtcagatagtcggagtgagagaagaagggaccggatcaaagaaaagatgcgtgcgttgcaagagctgatcccacactgcaacaagactgacaaagcatctatactagacgagacgattgagtacctgaagtccctccaaatgcaagttcagatcatgtggatgacttctgggatggtgccaatggtgtttcctggtgctcaccaatacatgccaccaatggctctaggcatgaattcaggttgcatccctgcagcacaaggcctaagtcagatgcgaagattaccatacatgaaccaccccatgccaaatcatatccctctgaactcgtctccagctatgaatccaatgaatccactgaacactgtgaaccagttccaaaacggtcacctcagggaggcaagtaaccacttccttcacctagatgatggtcgagcagcggtacctcgggtacaatagtatattatgatgatccagatgtcgtggaatttacggacatttcaacctttttatgtctgctcatcacctagctgattaaccaaataaactgtcaaatgttctacaggtaccaagacctggaccccatgtttatggacaccaaatagcacaagccgaagaacacaacagaatactggaagtggcagctagtactgttataccaacttctaaggcagggcaaccacctacttttgatggagtttagagtggtcataaatcctgtaaggtgttgcactgataatctgacgatgcatagcgttggtaccttgagttgtatatctgtgcagtagtgtcagcagcatactctttgacatctaagcttggttctagagttattaataggagcctagtataggtaacaagattgcaagacaactacctgtctaccaccatattctctgtggaagaactggagctgcatactgctgtgcagtacagtgttcaagagagaatggaacagatgagtatttgaagcacaacctgaacaggaaatggtcttctttctggcaatcgctgaaaatactgacgtgatgaggagcagattgcatccctatggctgtattgtaatatatctacatcaacatggcaatacgtgtctggacttggatgctacagttacatgtaaatgcagagttgcaggagcatacatcttcacacgacgtggacagtggactacgggccgagacagtggcccagacacgacacggctcttatatcaggctaggccagacactatttaatgtgtcatgcctcaggccggtccacgagacacggctgaccatctataccacatactctactcctccacggcaacagttcagcatcctcctggcaatggcaacggttcagcatcctccatggcaactgtgcggagccctagactagacctgctgcaagatggcagaccctcatcttcagagcggattgggtttggatcccctgtactcctccttgctcccctgttgctttcagttcgtctcacggttattgttcagacttcagatacatatgtcgttgtgcctggttggctgtatctggacatcagtttccgtgttgctactattttcccccctgtatttctttataacggacattcaccttataaatatacacacaaaac

SEQ ID NO: 2776 - DNA, 2400 bp, Zea Mays
cttgtgtctgctcatgctgtgccgtggtggccgtgggctgcaagctacagagctgcctcataaaagctccctgcgtttgctcctgtttgcagcttgcacggaggcggggtagtagaggacggcctcgcaaggtagctctgctcgagcgaggcagcagcactactcccgttcaggagaggaggcgttctccaccgggtcataggaatcctgacgagatggacggcaatgctaggtcgacggcggcgagtcagaagaagtccatcgtcccggacgacgacctcgtggagctgctctggcacaacggaagcgtcgtggcgcagccccaggggcaccacaggccggcgccgccctccgaccgcgactgcccgggcaccagcggccttactgccgaggagaccgccgcgtggttcccggacaccctcgacgactcgctggagaaggacctgtacacgcagctctggtacagcacgatcgccgacgccgccccgcaacacgagggcatgttcccgggccctacctcgcagccttcgccgccgccgcccgttgcgagcagcggcgtcgagtcgagctgggccggcgacatctgctcgaccttctgcggcagcaaccaggtgcccaggacgccggcagggatcagggggaaggacgcggcattgcagccggaggtgccgagcggtgccggcgcgcacgacggcacatcgtcatccggtgggtccggaagcaactatgggggatccgggctgcccagtgacagcgtccatgtccacaagaggaaggggatgtgtagagacgagtcagatagtcggagtgaggatgccgagtgtgaggaggcaaggagaccaaaccctggcggcggcatgggcggaaacgccggactcgtgcagctgaagtccataatctctcagagaggaagggaccggatcaaagaaaagatgcgtgcgttgcaagagctgatcccacactgcaacaagactgacaaagcatctatactagacgagacgattgagtacctgaagtccctccaaatgcaagttcagatcatgtggatgacttctgggatggtgccaatggtgtttcctggtgctcaccaatacatgccaccaatggctctaggcatgaattcaggttgcatccctgcagcacaaggcctaagtcagatgcgaagattaccatacatgaaccaccccatgccaaatcatatccctctgaactcgtctccagctatgaatccaatgaatccactgaacactgtgaaccagttccaaaacggtcacctcagggaggcaagtaaccacttccttcacctagatgatggtcgagcagcggtacctcgggtaccaagacctggaccccatgtttatggacaccaaatagcacaagccgaagaacacaacagaatactggaagtggcagctagtactgttataccaacttctaaggcagggcaaccacctacttttgatggagtttagagtggtcataaatcctgtaaggtgttgcactgataatctgacgatgcatagcgttggtaccttgagttgtatatctgtgcagtagtgtcagcagcatactctttgacatctaagcttggttctagagttattaataggagcctagtataggtaacaagattgcaagacaactacctgtctaccaccatattctctgtggaagaactggagctgcatactgctgtgcagtacagtgttcaagagagaatggaacagatgagtatttgaagcacaacctgaacaggaaatggtcttctttctggcaatcgctgaaaatactgacgtgatgaggagcagattgcatccctatggctgtattgtaatatatctacatcaacatggcaatacgtgtctggacttggatgctacagttacatgtaaatgcagagttgcaggtttggtcggcaggagcatacatcttcacacgacgtggacagtggactacgggccgagacagtggcccagacacgacacggctcttatatcaggctaggccagacactatttaatgtgtcatgcctcaggccggtccacgagacacggctgaccatctataccacatactctactcctccacggcaacagttcagcatcctcctggcaatggcaacggttcagcatcctccatggcaactgtgcggagccctagactagacctgctgcaagatggcagaccctcatcttcagagcggattgggtttggatcccctgtactcctccttgctcccctgttgctttcagttcgtctcacggttattgttcagacttcagatacatatgtcgttgtgcctggttggctgtatctggacatcagtttccgtgttgctactattttcccccctgtatttctttataacggacattcaccttataaatatacacacaaaac

SEQ ID NO: 2777 - DNA, 2734 bp, Zea Mays
gtgggctgcaagctacagagctgcctcataaaagctccctgcgtttgctcctgtttgcagcttgcacggaggcggggtagtagaggacggcctcgcaaggtagctctgctcgagcgaggcagcagcactactcccgttcaggagaggaggcgttctccaccgggtcataggaatcctgacgagatggacggcaatgctaggtcgacggcggcgagtcagaagaagtccatcgtcccggacgacgacctcgtggagctgctctggcacaacggaagcgtcgtggcgcagccccaggggcaccacaggccggcgccgccctccgaccgcgactgcccgggcaccagcggccttactgccgaggagaccgccgcgtggttcccggacaccctcgacgactcgctggagaaggacctgtacacgcagctctggtacagcacgatcgccgacgccgccccgcaacacgagggcatgttcccgggccctacctcgcagccttcgccgccgccgcccgttgcgagcagcggcgtcgagtcgagctgggccggcgacatctgctcgaccttctgcggcagcaaccaggtgcccaggacgccggcagggatcagggggaaggacgcggcattgcagccggaggtgccgagcggtgccggcgcgcacgacggcacatcgtcatccggtgggtccggaagcaactatgggggatccgggctgcccagtgacagcgtccatgtccacaagaggaaggggatgtgtagagacgagtcagatagtcggagtgagagaagaagggaccggatcaaagaaaagatgcgtgcgttgcaagagctgatcccacactgcaacaagactgacaaagcatctatactagacgagacgattgagtacctgaagtccctccaaatgcaagttcagatcatgtggatgacttctgggatggtgccaatggtgtttcctggtgctcaccaatacatgccaccaatggctctaggcatgaattcaggttgcatccctgcagcacaaggcctaagtcagatgcgaagattaccatacatgaaccaccccatgccaaatcatatccctctgaactcgtctccagctatgaatccaatgaatccactgaacactgtgaaccagttccaaaacggtcacctcagggaggtaccaagacctggaccccatgtttatggacaccaaatagcacaagccgaagaacacaacagaatactggaagtggcagctagtactgttataccaacttctaaggcagggcaaccacctacttttgatggagtttagagtggtcataaatcctgtaaggtgttgcactgataatctgacgatgcatagcgttggtaccttgagttgtatatctgtgcagtagtgtcagcagcatactctttgacatctaagcttggttctagagttattaataggagcctagtataggtaacaagattgcaagacaactacctgtctaccaccatattctctgtggaagaactggagctgcatactgctgtgcagtacagtgttcaagagagaatggaacagatgagtatttgaagcacaacctgaacaggaaatggtcttctttctggcaatcgctgaaaatactgacgtgatgaggagcagattgcatccctatggctgtattgtaatatatctacatcaacatggcaatacgtgtctggacttggatgctacagttacatgtaaatgcagagttgcaggtagatggcaaccttttctcccctgacatgttaatgctacagttacatctaaattaatttaatagtgtttgttttaaagttaaaaaaaggagtgttgaagtgtttgttgtcaactgaccaaaatacaaccaactggtcctgtctacagacagagattggagaacatgcatgcctatgcatccgaagtgtatatgcacatcatatatcaatcactcctgtctttctgcctgctcctttttccggggaccaacactcccaacattgagcttatctacttcccgtactagacaaaatgtaattgtaggttttagcaattatagataaaaaaaatgtttatgataccaaataaacactattaaattaatttagaactatagatatcatttttttactgtcataaatacaataccatttattagaaacttaatcaaacatgagtcactctaacgagctgcattttttaaggacaaaggaattatatatgttgctaacaccatagtttgtggaaaggtttggtcggcaggagcatacatcttcacacgacgtggacagtggactacgggccgagacagtggcccagacacgacacggctcttatatcaggctaggccagacactatttaatgtgtcatgcctcaggccggtccacgagacacggctgaccatctataccacatactctactcctccacggcaacagttcagcatcctcctggcaatggcaacggttcagcatcctccatggcaactgtgcggagccctagactagacctgctgcaagatggcagaccctcatcttcagagcggattgggtttggatcccctgtactcctccttgctcccctgttgctttcagttcgtctcacggttattgttcagacttcagatacatatgtcgttgtgcctggttggctgtatctggacatcagtttccgtgttgctactattttcccccctgtatttctttataacggacattcaccttataaatatacacacaaaac

SEQ ID NO: 2778 - DNA, 2722 bp, Zea Mays
cgatggagtcgaggtacggggtcgtggaacatggtatgctacactacttggaagagtttttttcacttcagatagaacatcaagtacgtaaaaagtgctcacctctactggagagtgctctgctgcctggtggaagtgattcgactctgcatgaatggaaggctgttccagatatttggaggacagcagcagaaaaatatgctgacctcgtagctgtggtagatccttaccatgaaccgccaacggaatggacgtatacacagcttgagcaagaaatattggatttttctcaaggtctaagggccattggtgttgctccggatgaaaagctagcactttttgctgataactcatgtcgttggctagttgcagatcaaggaatcatggcaaccggtgctataaatgttgttaggggaacaagatcatctgatgaagaattgtttcaaatatacactcattcagaaagcattgcacttgttgtggacagtcctcaattctttaaccggcttgcagagtctttcatgtcaaggattaatacaagattcattgttcttctttggggtgacaaatcatgcatagatagccaagctattaaggatataccactttatggatacaaggatatcatcgaacttggtcgagaaagccgcaatgcactgtttctttccgacgagcaaggtcagcaagatgtctttgaatctattagtcctgaagatgtggccacactaatatatactagtggaacaagtggcacaccaaaaggcgtaatgcttacccaccgaaatctcttgcatcagataaataatctgtgggagattgtaccagcagaacctggtgataggttcctaagcatgcttccaacatggcatgcatatgagcgtgcttgtgagtacttcatcttctcgtatggtatccagcaagtttacactactgttaagtacctgaaggaagatttgcagcgttaccagcctcaatatattatatcagtaccactggtctacgaaactctgtacatttcaattcataggcagatttcatccagttctgctgctcgaaaaattattgctctttcacttatcaagataagtttcctatatatggaggcaaagaagatctatgagggaacagttttatcaaacaatcttgtcaaaccatcagtcatcgcctatatgatgaagtggctgtgggcaagattggttgctgcatttctttggcctttacataatctggcgaagattctagtatacaagaaaattcattcagcaatcgggatttcaaaggctggtattagtggcggtggaagtcttccgatgcatgttgataagttttttgaggccattggcattaaagtacaaaacggctatggccttactgagacttctcctgttgttgctgctagacgaccattctgtaatgttcttgggacagttggtcacccaataaagcatactgaaatcaagatttttgacattgagactggtgaggtccttccagatggttcaaaggggattgtgaaaattaaaggaccacaagtaatgaagggatactataagaacccatcggctacaaatgaagcttttgatcaagagggttggttcagcactggagatgtaggttggatagtacctcatcatgccatggggccaagtcgccagtgtggagggatgattgttcttgaagggcgtgcaaaggatacaatagtcctatctacaggtgaaaatgttgaacctgctgagatcgaggaagcagccagcaggagtaccttgattaatcagatagttgtgatcgggcaggatcaacggcgtcttggtgccataattgttcccaacaatgatgaagttctggcagaagcaaaaaggaagtccatccttggtgaggatggcgagctagcgaaagataaggtcatgaacatgctatatgatgaattgagaacctggacagcgcactgctccttccgtgtcgggccaattctggttgtcgacgaaccattcacgattgacaatggtctgatgacacccaccatgaaaataaggagggacaaagtgacagacaagtacaggagggagatcgaagccttgttcaagtgacacgcggagcgcgtgcgcacccatcagagttcccttttccgagtacaagacggcaaccgtacggcgtacatacagacacctgcaagctgcaatgcgtccatgtaccatgtatacgtacgtacttgcgtacggtcggaagatgactgggttggaactggaagagatgatatggcggagcggccggtgggagaacaccatgagacttgttactagactcgaatgttcgtaggttgcatgagcaaaatgacatgtgttccacaattgcatcattcaataagcgattcactgagccagataaggtcttgttcggttagttctcaatccatatatatggattgagtgagtttaaatcccaaacaagtcaaacttcttcttaatttttttcaatctcatccaatccatatgtaatgacaataaccgaacaaggcatgaatcaataaaattctcccaaaccaccgcaggtaccatgcaattggtaaaaatatcatgcttctatcttatagatatctgaaaccaactttacagttttcttaataccataagaatatttgtctgatagaaacatggaaaaaatacagacagctatgtacaactcttgttacattgaaatcatcgagacgttcgataagaggagg

SEQ ID NO: 2779 - DNA, 2811 bp, Zea Mays
atggagtcgaggtacggggtcgtggaacatggtatgctacactacttggaagagtttttttcacttcagatagaacatcaagtacgtaaaaagtgctcacctctactggagagtgctctgctgcctggtggaagtgattcgactctgcatgaatggaaggctgttccagatatttggaggacagcagcagaaaaatatgctgacctcgtagctgtggtagatccttaccatgaaccgccaacggaatggacgtatacacagcttgagcaagaaatattggatttttctcaaggtctaagggccattggtgttgctccggatgaaaagctagcactttttgctgataactcatgtcgttggctagttgcagatcaaggaatcatggcaaccggtgctataaatgttgttaggggaacaagatcatctgatgaagaattgtttcaaatatacactcattcagaaagcattgcacttgttgtggacagtcctcaattctttaaccggcttgcagagtctttcatgtcaaggattaatacaagattcattgttcttctttggggtgacaaatcatgcatagatagccaagctattaaggatataccactttatggatacaaggatatcatcgaacttggtcgagaaagccgcaatgcactgtttctttccgacgagcaaggtcagcaagatgtctttgaatctattagtcctgaagatgtggccacactaatatatactagtggaacaagtggcacaccaaaaggcgtaatgcttacccaccgaaatctcttgcatcagataaataatctgtgggagattgtaccagcagaacctggtgataggttcctaagcatgcttccaacatggcatgcatatgagcgtgcttgtgagtacttcatcttctcgtatggtatccagcaagtttacactactgttaagtacctgaagaagatgctgaagttccttagggcattttgacatcttcttctatcttctttgataggaagatttgcagcgttaccagcctcaatatattatatcagtaccactggtctacgaaactctgtacatttcaattcataggcagatttcatccagttctgctgctcgaaaaattattgctctttcacttatcaagataagtttcctatatatggaggcaaagaagatctatgagggaacagttttatcaaacaatcttgtcaaaccatcagtcatcgcctatatgatgaagtggctgtgggcaagattggttgctgcatttctttggcctttacataatctggcgaagattctagtatacaagaaaattcattcagcaatcgggatttcaaaggctggtattagtggcggtggaagtcttccgatgcatgttgataagttttttgaggccattggcattaaagtacaaaacggctatggccttactgagacttctcctgttgttgctgctagacgaccattctgtaatgttcttgggacagttggtcacccaataaagcatactgaaatcaagatttttgacattgagactggtgaggtccttccagatggttcaaaggggattgtgaaaattaaaggaccacaagtaatgaagggatactataagaacccatcggctacaaatgaagcttttgatcaagagggttggttcagcactggagatgtaggttggatagtacctcatcatgccatggggccaagtcgccagtgtggagggatgattgttcttgaagggcgtgcaaaggatacaatagtcctatctacaggtgaaaatgttgaacctgctgagatcgaggaagcagccagcaggagtaccttgattaatcagatagttgtgatcgggcaggatcaacggcgtcttggtgccataattgttcccaacaatgatgaagttctggcagaagcaaaaaggaagtccatccttggtgaggatggcgagctagcgaaagataaggtcatgaacatgctatatgatgaattgagaacctggaggaagtgcttaattattttgttcacgcgtttcaggacagcgcactgctccttccgtgtcgggccaattctggttgtcgacgaaccattcacgattgacaatggtctgatgacacccaccatgaaaataaggagggacaaagtgacagacaagtacaggagggagatcgaagccttgttcaagtgacacgcggagcgcgtgcgcacccatcagagttcccttttccgagtacaagacggcaaccgtacggcgtacatacagacacctgcaagctgcaatgcgtccatgtaccatgtatacgtacgtacttgcgtacggtcggaagatgactgggttggaactggaagagatgatatggcggagcggccggtgggagaacaccatgagacttgttactagactcgaatgttcgtaggttgcatgagcaaaatgacatgtgttccacaattgcatcattcaataagcgattcactgagccagataaggtcttgttcggttagttctcaatccatatatatggattgagtgagtttaaatcccaaacaagtcaaacttcttcttaatttttttcaatctcatccaatccatatgtaatgacaataaccgaacaaggcatgaatcaataaaattctcccaaaccaccgcaggtaccatgcaattggtaaaaatatcatgcttctatcttatagatatctgaaaccaactttacagttttcttaataccataagaatatttgtctgatagaaacatggaaaaaatacagacagctatgtacaactcttgttacattgaaatcatcgagacgttcgataagaggagg

SEQ ID NO: 2780 - DNA, 1653 bp, Zea Mays
taaccttgtttggaagggttaataacgaaggtggcactgaactctccagtcttcacagttgcagacttcagagctcccaagattattcctttcttctcagcgacaccgctcgataccttgcgatcccaagatggcatcgccgccgatacccacacattatttttccttggtgggagacttatctttggcccagatgtgaggtcactcgtgctcacagtatgtttgattgtagtcccagtgatcttctttgctgccaccgtttgtccacaacttggtcatgagttccacagccaaattggaggttgggtggcatctgtggctgtcatctttacagcatatattcttattgttctacttatcacatctggccgtgatcctggaattgttcctcgaaacactcatcccccagagcctgaagacatcgatgaatcctccaacttaccagattgcccgggtggtcaacaaggttcgacaggtttaccacctacccgggatgttcttgtcaatggtgtttcagtcaaggtcaaatattgccatacatgcatgctttatcgtccgccaaggtgctcccattgctcaatctgcaacaactgtgtagaacgttttgatcaccactgtccttgggtaggccagtgcattggcaagaggaattaccgattcttcttcatgtttgtgtcttcaactactgtactatgcatatacgtgtttgcattctgctgggtcaatctcaggagaattatggacacgcatcaatgcaaaattggaggattgacctcattccacatctatttgatttctacaaatcagactacttatgagaacttcagataccgctatgaccggagaacaaatccttacaaccttggagtgggtcagaatttcatcgacgtcttgttttcaaggatacccagctcaaaacacgatttcagagcaaaagttaaggccgattcttcgaccttcgcgtcatccctcagtatgggacgggttctaagcccacccaagacgagcgtggaccttgagatgggcatgaaaaggcaagcggtggccgcagaggactttgaagacttgcacagccagatcggcagtgctatggggctggagagatgtggcaccgagccgccgcattttgtcggccggaagggctgctctgagatgtcacctgacatagaggcgttcgcagaagagtttggcatggaaggtgggctcagtgagaggaaaaagattgagcggcggacaaatgatgattcgtaggaagtttcccacgtcacaaaccacctcttcggccttcctccaggccccaaacttggtaaaagcttgcaaagaagaaagtgaagtaggacaaaacggacggtagagtgaatcaggcattggttagtttgttttgggtgtcatttctagccaagacttgagttagaagtgaaagatgttccttgacgatatagaaatgatgaatccacatctggtttggacttcttagtctatgtgatgtattggatgtgtggtgtggcagtgttgcttctgattttgttgaaggtgtaatctgttgatttaacttggctatgcattcatttaagcgatcaaatttctgcacttttgcgctaaatctttagatattgttcagataagggtggattgaagggaattaaatcattt

SEQ ID NO: 2781 - DNA, 1330 bp, Zea Mays
tgcagttgcagctagctgctcgccacaactggcgcgccgcactcaccgcgccagtacgccacgctcgggctcgatcggcatcgattcccccaatcccgcacccgcacacccggctcgcaatccctagcactagcagcgccgcggcggcaggcaggcagggggggggggggggggggtgccggaggccgctcgtagcacggaacgtctccggatcgatccatggagcgcgcgaggagggcttcgcacgccggctcttggtacaccaacgatggaagctggaagaggaactcaatggttggctgggggcagccggtctaaccaagtctcctgatgttagggcagtaattgcaccccacgctggttattcatactcgggccgatgtgcagcttatgcttttggcaacatcgatccaactaacatttctcgggtgtttctgcttggcccttctcatcactactacactccaaaatgtgctttaaccagggcttctgtctactgtaccccaatcggggatttgccagtagaccaggaagtcattgaggaactcagtgctactggaaagtttgaatttatggaccttaatgtggatgaagctgaacatagcatggaaatgcatttgccctaccttgctaaagtatttcaaggacataatgtgaaagtcgtccctatccttgttggtgcacttagctcccaaaacgaagccttgtatgggcagctgctctccaaatatgtggatgacccaaaaaacttcttttccgtgtcgtcagacttctgccattggggatccaggtttagctacacatactacgaaaagaagcacggtgccatccataaatctatcgaggccttggaccgtatgggcatggagatcatagagactggcgatcccgtagcgttcaaagaatacctgcaggagtacgagaacaccatatgcggacgccaccccatcagcgtcttccttcacatgttgaaacattgctcgacaaaaattaagataggctttgtccgctacgagcagtccagccagtgcaagaacatgagggatagcagcgtgagctatgcatccgcagcagcgaaggttgctggtgcatccggggaagaagataaacaagactgagcgagctacagctctgtttgatatactatatataagccgccaaaccttggtgcggaatgtgtgactggtttcccataagaaaaagaacatgtgatttggtaaaacattttcttcttcagtaaaataaataaatatgcagactgctggggatctgtactaattaattaagagattttcctaacaaagtaaaaaaatatataaataataatcaa

SEQ ID NO: 2782 - DNA, 1137 bp, Zea Mays
aaacatcctgttgctccctcgtcaagtcgtcatcccaccaacgcagatgcaaaatggggagacggggtttaagcaaataatagtcgaggaaggagaggttctcctcactacacctcggctcgctggagccgataaggctgccgcgccctccctctctcctgcggtgctcccatggaatcggcggcgattgggtcgcagtccccgctctccttcccctccaacctctgcgaatcaaaagtatcctctggtttaccaatatacaatgtgaagatcaagggcaatcataggcttgacgtggtgtgccgtgggatgtttctacaagaaagtttatgcaaaggaaaaagaaagaagttttcaaggacgctgatgacgaggccgagcagatgaattggaggagaatgatgagagagatagaggaggcgggatcagctgtacgtacccattctgaagacccagcgaagcgggaaagagccacttccaagggatgctattcttgggactcttgtgcggttcaaacaattgaaaaaatgggatattgtcagtgagattcttgaatggctcagaacacagcattggtggaacttcagtgagatggacttcttgatgcttgtgacagcttatgggaagttgggggattttagcagggcagaaagggtcctcaagtacatgaaaaaaaaggttaacagccatgcgtcatgtcaaaactggtctgatggaggcgtatggaagagggaccgaattttttgtattttagcccttaaacagaagtaaaatcacgtttagacctaaaaaaattttaaatgcagttttggacccttagctcggcgccatagcttgtggcgccgagctaacacagctcggcgccacagcctatggcgccgagcggtgacgtggccgcaacggctagttgcgtccagggctgacctggcgctgatgtggcggcggcgcgccctcgtagctcggcgccacagatcttggcgccgagctacgaattcctataaaaacgcccgcgcggctggccgagaggagctcatttcatcccatttccaaacttcgtcaaaaattcctggattcaaagatttgagttggttcacttcgtagaccaaggtatgatttccaactgattcgttttgtata

SEQ ID NO: 2783 - DNA, 1465 bp, Zea Mays
gaagatcgacgacagccgcggcctcttggcctcaatccctgaagtgcctgccaccacgccgcgccgcgccgcgcccgccatacaacgacttcctgcagtcctgcgctgcgcccctcctttccgcctccacgctgccgacgtccaccacacagcacggtcgactcacccgatccctccatggcggcggcggtggcggcggtcgcggctgccacgacggcggaggacgaggcgcgcctgctgcgtctggaggagcaggcggagcacggcggcggcggcgcctgggactacctctgcctcgcccgccggctccgcgcccgccgccccgcccacgtcctccgcgtcggcctcgctctcctcaacaacgcctccgctcgctccggtctcgcctcagaacagtggacgctctacgagcaggtggccacggcggccatggattgccagcgtctcgatgtggcaaaggactgtattggagtcctttcaaagcaatttcctggcagcacccgggttgcccggctagaagctcttctgtttgaagcgaaaagtgaatgggctgaagctgaaagagcttacacgcaaatcctggaaatcaatccatttgaccagattgtccacaagaggaaaattgctattgcaaaagcacaaggcaatatgtcgctagcaattggttatctcaataagtatctggaattatttatggcagatcatgatgcctggagagaacttgctgaaacatatgtttccttacaaatgtacaagcaagctgccttttgttatgaggagctaatattatcccaaccaactattccactctatcatatagcctatgctgaggttctgtacactatgggtggcttggaaaatcttcagacagctaagaagtactatgcatcaacaatccagttgactggaggcaagaatacaagagccctctttggttgtacttcggcaatcaatcagttgaccaaaggaaggaataaagaggaagagggctcggagctgcagagattggctgcagaagtactgctgaataattacaagcagcaggctccatcaaaggcgccccttatcagcagcttgttgaagaacatgaaactcagctgataccaactagctctacacattcagaatgtcctgattcgatagatagttaagttaaattgatgtggcataatgcttgtttttttttgtggcactggcaccaacattgtgcaatggttaaaaagtaggtgctcccaaggccatgggttgtgtacactacacctgtttgcttgccgagaaatatgcatgacttctttttcattggatgttctattatagatcacaataaaccccggccattgtacttcagcacaaacaaaactttgaatcagtcgctggtgaagttgtacctgttgattttgattggtatctgactgttgtagccttgtagatgaatccctgactcggagcatttttttctttatcg

SEQ ID NO: 2784 - DNA, 2532 bp, Zea Mays
tttgtcctccactccacttcccctcttcacgagaggagagagagagagagagagagtgcgtgcgaatgcggagttactcggggactggtacgagcggagcaggggtgggcggtgggggaagcgagtggaagattgggagccaagagcacggagagtgccccgggatcttcacctcccatcattcgagggtggagtgctgtctgcgcagaaatctgctcaccgggtgccaggaaacaggtggctgtagagaattgcttggggattcgtcaagaaacgacccagtaggtggttgtgcacttgttatgctgagactgaatggaggctgtagacaagattgctgagcccaaagacccttttgtgctcactgcccagaaggttcagagctcggagccaccgatacctataaaggcgtcatgtgaagggaatgactcccaacagcaagaagagacggatttgccagatgatggcgaagagagcttccggagcatggattcctctgatgaaggtgtccggagctccttctctggggctagtcaccctccagagcctattgacatggatatcatgaagacagtctatgttgcaatcgacgagaagtccgagccaccggttagtttagtgcgaggagtctcggtgaaggggcctttcatagatgacctctcgatccgtgttacaggcgcaaaggcaaatctggtggtaggtgcaggcggtgctgaaggtatggctgaagagaggaaggtatctgcttctgcagtggcatcagtcaccacagcaaggtcgtctcaggctacctctttgcctcaggactcggaggagaaggagtgcgtctgggacgcttcactccctccgagtggcaatgttagccctcacagtagtattgacagcatgggtgtggtcactgctatgagcaccctcaacagctgcacgagcacatataaaagcgagaccatagctggtgaagcaatgctcaatgtggagaggaactgtgagagtgtaaagggtgttcgaggtgacttactagaaagtgcaaaaaccagcatgagtcgagcaagtgatagcagtgttgttagtgatgacagcagctggagccacatcactggaggtgccagcaagcctcacaaggggaatgatcctagatggaaggcaattcatgctgtacgaactcgtgatagcgtgcttggaatgagccattttagactactaaagcgtcttggttgtggtgacattggcagtgtttacctctcagaattaagtggaactcggtgctactttgcaatgaaggttctcttgtttggtgatggaattctgtccaggtggtgatctgcatactttgcgacagagacaaccaggaaagcatttctctgagtatgctgcaaggttttatgccgcagaagtacttctagctctggagtatctacacatgttgggagtggtctatagagatctgaagcctgaaaatgttcttgtgcgcgatgatgggcacataatgctttcagactttgacctctcgctgagatgtgcagtctcacctacactcatcagaacatcagctttcgattctgatcccagaagagcaggtggttctttctgtgtacagcctgcttgcatagaacctacttcagcttgtatccagcctgcgtgcttcctccccaaattcttcggacagaagagcaagaagaagactcgaaaggcaaggtctgagttgggacataacgccggcaccctgcccgagcttgttgccgagccaacatcagctcggtcgatgtcatttgtcgggacccatgaatacttggcccctgaaatcatcaaaggcgaagggcacggaagcgctgtcgactggtggaccttcggcatcttcctgcatgagctgctgtacggcaagaccccgttcaaggggtcagggaaccgcgccaccctgttcaacgtggtaggccagcaactgaaatttccggagtcgccgtccacaagctactcgagcagagacctcatccgtgggctcttggtcaaggagccgcagagccgcctgggcgtgaagcggggagcgacagagataaagcagcatgccttcttcgagggtgtgaactgggctctcatccggtgcagcactcctcccgaggtcccgaggcctgttgaggccgagctgcctgtgaagtatggggtggcggaggcgatcgggagcaacagcaagcgggtagtcggagcagacgtgaagtcggccggaaaatacctggactttgagttcttttaagagcagtgcgtgcccagtggcagctattgtttgcgtactgtccgtgtatggtcggttttgatgtttgtgtgattcgatatggtgatttgtgcctcgccgtcgatgcacaattgtcaggtttgaatcgaccaaaattaggtaggtgtgtgttgccatttgcctgctttggcacatttcgagtttatgtatggaactatgtatagagtatgcattgcaatttgcagcaaacctgaaaagcagctaagaaggccctttcctccttgtttatgcaatgcatctgttcc

SEQ ID NO: 2785 - DNA, 2120 bp, Zea Mays
gttgttgcgaaacggtgccgcttcgagccaggtgcgggagggaccgagggaggcggagcaagtgggagctctggagctggagcgggtggaagtgggctgggactgggagccctagcaaagggccatcgcatcccctcttgcatactctctctctctctctcgtgattctcccgtgccccggtctctctgtctctagtggcgacgactgcgctgcgccgccgccctacgcaggtgcccaagtgtctatcttcgggactgcgccggcgacgagcacccaccagaaattgttggacctgggtctgcccctggactcgagcttggggccaagctaattcgagctctgagcatttgatttctagcatcttacatgcaaaaagctagtacttggaatccgagcaagatctaacccagacagtgcagtggcagttcagcgcagcatatcaagattgtctctgttaatttgtgtatgagatcagttaactgataaggatatgtaaagaaccaatgatcagtaatttttacactccagattgtagtatcctctaagatggacggaagagaatcagtcttatggtaaatcctggtgaatattcatgggaggtcagcaagttctggcctgactaagtctggtaaaaaaagttgcttcatctcagatcatcaatggtgagaatgaggttcccgaaacgttatctcatagtattgctgacattcatctgcacaaatgtttgctacattgagcgcgtgggtttctcgattgcttacactgttgcagccgatgccattggtgtgaatcaggccaacaagggcatgatactctctatgttctattatggttatgttttatcacagattcctggtggatgggcagcacagagaataggaggcagacgtgttctgctactgtcatttgtattgtggtctatgatatgtggtttaatcccactcgaccccaacagagtaaccattctggtcctttctcgcctatttgtcggtgtagcacaaggtttcatattccctgccattcacactgttctggcgcagtgggtgccaccgcaggagcgctctcgctcggtatctctcactacctcggggatgtatcttggtgcagctggtggcatgcttttcttcccaagtctggtgaagcacacgggaccccagtcagttttctttgtcgaagcagtgctgggagtagcatggtctgtcatatggttgaaattttccagcgacccacctcgtaccgatcttccaaaggtatcgatgccgaaagtggcatctcgggacatgattaaggcacaagcaggaggggttgttgcacctcgcacagtaaagatcccgtggcgaaggataatattcagtctacctgtttgggcaatcgttgtaaacaacttcaccttccactatgccctgtatgttcttatgaactggctccctacctattttgagcttggcctcaagcttagcctccaggacatgggttcctcaaagatgctcccttatttcaacatgttcattttctccaacatcggtggtgtgatcgccgatcacttgattacaaggaggattctgtctgttaccaagacgaggaagcttctgaacaccatcggattcatcgtctcagcatttgcactcatggcccttcctttattcagcacaccctcaggcactgtaacgtgttcggcgatatccctcggttttcttgccctgggaagagcagggtttgccgtaaaccacatggatgttgctccgaagtttgcagggatagtgatgggcgtctctaacacggcggggacactggctgggattattggcgtcggcctcactggtaatatcctggaggcggcgaaggcttctaacaaggatctaacagactcggaaacctggaaaacagtcttctttgttccggcatacctttgtatcttcagctctgtcatttttttaatcttttcgactggcgaaaagatattcgagtagatggtgattatattttttgtttctcatttacagtgaggcaggatagcagaacgggaatctcacatgtacccgtagcatttgttacaaaatttcatactgtatcatacacatgatctaaagctatgtcaggaaatctcacatttttcatt

SEQ ID NO: 2786 - DNA, 2499 bp, Zea Mays
gtacgtcacccggttcatggttgcgagagaggcggcgcggccacgagtccgggaccggctcctcagaaaccggccgcctatctctcccccttccctccgtgttcgtcggccccggccccatattttctctagccttgctcgtgtggctggaagagtggagatcggggaagcgtttgtgttggcactctggacggccgagcccgacatggaccgcgacgaggaggtgggccacggcgaccgctcgctcctattcatcggcgatgaggacgatctcggcgtcgaccgggacggcggatccccgccgacctcctccgacgatggatcattctccgaccggagcgacgccgagacacgcgccggccatgtccggcgtcgcgacggcggcgagcgtgaggacacgcccgaggacggccagaatggcgcgtggccgcagagttacaggcagtcgatcgacatgctgagcgcggtgccgtcgccgacgatgaactcgatcatggcagcgagcccgagcctgaccagattcggcagctccttcctcaaggccgggagctccttcttcctgaggaaaggcgagggctcggggctgccgctcaccaggccgctgctgccgccctcgctcccgcagctgtcgcagtcgtcgttgcacccgcagccgcggcccgtgaagcagtccacggacagcctcgcccaggcgccgcggtggccggctgcgcacgaggcggagctgcccgagagaccctccaggcaatgcctgaaatccgattatatcgagcttcctccgcctgctagcaagtgcagcaggaaccaatcaatcatcaatgggttcaatgtgctgtgcggcgttggaattctcaccacggcttatggaatcaaggaagggggatggctaagcctcctgctgctccccttgctgggtggcagctcgtgctacacgggcttgcttctcaagaggtgcatagacagttcgcccaacattgagacatacccagacattggacaagtcgctttcggaatctttggtcggatctttgtatcggttgtcctgtacatggagctttatgcaagctgcgtggagtacattacgctgctaggagacagcttgtcgtcagtgtttccctcagcgcatttagctttcactggcatcgacctgaacgcgcacaatctctttgcaaccacaatggccttggcaatcctcccatcagtctggctcaggaacctcagtctcctctcatatctttctgctggaggcgtgatcgcgacgatcacggtcatcgtctgcctatgctgggttggcatcggagaaggaattgggtttcgcttttccggtgctgtagtgaacgtgacccaccttccagtggcactcggcctgtatgggtactgctactcaggacactcggtgttcccaaacatctactcgtccatgaaggagcgctcgcagtttccattcgtgctcatgttctgcttcacggtggtaacgcttgtgtacgccggagttgcggtctcagggttcctgatgttcggcgagtccactatgtcacagttcaccctaaacttgccacagcagtacatcccatccaagattgccatttggatgacggttgtgaatccttacacaaagtatgcactgacgatgacgccggtcgccttgtcgatagaggaagccctaccaaagaagatgcagagttacctggtcggaatgctcgttaggacatgcctcgtcctctcaaccgttgcggtggctctgcttttcccttactttgccctggtgatggcactgcttggatccgtgttcacaatgctcgtggccttgatactcccatgcgcatgctacctctccatcaagaagggcgcagtgcccttgtgggagatcatcctgtgcataatcatcatagcgattggcgttgtgtgcgcgtgcatcggctcatttacctcgatcaaccagatgattagcagcagatagtgtctgcgtagctgttgcagattctttctttccaatgttgacagagctgaaactagcagtctgtcgttttttttttgtttttttgtttttgcagctacgtttatttgttccttctttttgacagaaaaaagaaactcggtaagaaagtttttctgtaacagggtgaagttatatttcaggcaatcatgatagtaattcttttgcgtacaattatgaaccacaggatgaagttatactaatttttccgacagctatggacacatatgaaccacaggatggccacacaacaggcacatctccgatctctcaccatgacacttttttttgttttgttttggggttgctgttgttgggaaactagtcagtatatatggcacatgtgatggacatcacgtcctcacctaccagggcgctacagctccaggcccacatgggccgagccacagcccacatccaccgaacggggtgggggggcctacgcgctacggccatggatagatgcgcaccgcttgcacgagctagtccctccagcacacgag

SEQ ID NO: 2787 - DNA, 3059 bp, Zea Mays
acccagctggacccacaattcatagatgcagtggtaattataacaagaagacaacattgtagatgcagtggtaattataacaagaagacaacattgtgagtggcaaaaatccaattatctcctgatttgcctccattaaacataaatcgtggccgctcgagctgagcccactccccattcctcgatccattcgtctccagatatatagaatcatcgcgtctgccaccacctgcagcaccctctccgcttcgtcctccctcggtcctccgtccgccattgttgcttggctggcttgctcaagccagccgtgtgcgtcgtcgttgcttctgcgggcactcctccaccacttggtagaatataactcgctgacaagttggaggccggaggcggagagggagcaggagcaggataagcttggcagtcggcacagcagatagggggcctgattagattaaatcattagagatagataaaagacacagacatggagtgtgctgccgtcaagtaacagcgcagctggctggttgcgggcccctgctgatctggggctgggtggcagtggcacggacgccgtcgctttcgatcgacgggggagctgagggctccctgctctgccgccgcaccggcaccgcgcccacttcaccgcatcgccgcgcggattcgtccttacttgatcgagacgactagctatactataacctagcctgccccctcacccggtcacccctcctcgctcgaccgactctataaatatatataaacctcgcgcagcgcagggcatgcatcgtctagagccatcctcttcttctagtctttttcctcgtgctgctgggcagggctgttgctccatccttccacgaccgccggcgctgctctgcctcgccgtaccgctttcccgacgaggcgtcccggccggatcgctcacatgggggtggcgatgaaactgcttgcacgagtccggaggcgcctcgtcccgctcctccgccgccaccggatggcgctgctcacggcgccggcggtggccgcgctgctgctgctcttctggtccgcggcgtacggcggtgacgcccaggaccagggcgtgccgccgccgtaccaggacgccagcaaggacgtggaggtccgcgtcagggacctgctcgcgcggatgacgctggccgagaaggtcggccagatgacgcagatagagcggatcgtcgcgtcgccgcaggcgctcagggactactacatcggcagcctgctcagcggcggcggcagcgtgccgcggaagcaggcgacggcggcggagtgggtcaccatggtcagcgacttccagaaggcgtgcctgtccacgcgcctcggcatcccgatgatctacggcatcgacgccgtccacggccacaacaacgtgtacggcgccaccatcttcccccacaacgtcggcctcggagccaccagggatccaaacctggtgaagaggatcggcgccgcgaccgcgcttgaagtgagagccaccggcatccagtacgcgttcgcgccatgcattgcggtgtgccgtgatccgaggtggggccggtgctacgagagctacagcgaggaccaccgtatcgtgcaggccatgactgagctcatcccgggcctgcagggcgacgtcccgcagaacttcaccagcggcatgcccttcgccgccggaaaggacaaggtcgcggcgtgcgccaagcacttcgtcggcgacggtggcacgcagaacggcatcaacgagaacaacaccatcatcgaccagcagggcctgatgagcatccacatgccggcctacctggacgcgctccgcaagggcgtctccaccgtcatgatctcctactccagctggaacgggctcaagatgcacgccaaccacgacctcatcacaggcttcctcaagggcaggctcaacttccagggcttcacgatctcggattgggagggcatcgacaggatcaccagccctccaggggcgaactactcctactctgtgcaggcttcgattcttgctggcattgacatgcggcctgatcccgatgagcaggatcgacgacgccgtgactcggattctgcgcgtcaagttcaccatgggcctgttcgagaaccccatgccggaccccagcctcgcggaccagctggggaagcaggagcacagggacctggcgcgggaggcggtgcgcaagtcgctggtgctcctcaagaacggcaagccgggcgacgcgccgctgctgcccctgcccaagaaggccgccaggatcctggtcgcagggagccacgccgacaacctggggtaccagtgcggcgggtggacgatcgagtggcagggcgacacggggcgcaccaccgtcggcaccacggtcctggacgccgtgaaggcggccgtggacccgtcgacggaggtggtgttcgcggagagccccgacgccgagttcgtcaggagcggcggcttctcgtacgcgatcgtggccgtgggcgagcacccgtacacggagaccaagggcgacagcatgaacctgacgatcccggaccccgggccgagcaccgtacagacggtgtgcgccgccgtgcggtgcgtgaccgtgctcatcagcggccgccccgtggtgatacagccgttcctgggcgccatggacgcggtcgtggcggcctggctgccggggaccgagggccagggtgtcaccgacgtgctgttcggggactacgggttcacggggaagctgccgcggacgtggttcaggtcggtggaccagctgccgatgaactacggcgacgcgcactacgacccgctgttcccgctcgggttcgggctcaccacacagggcaagatgtaccagaactagaagaaggcggagcgaggggaaaggggtagtacttggtaaagataataggaaattgaattaagcagtgctctgccgaggaaacgtgaacctgtagttcttgtttccctcaattctatgtcgattaattttgatgtatgctcagttctcactgtggagtagcatccacacatgagccatctcattcttatatgataatcatgatttgattttgctcagctc

SEQ ID NO: 2788 - DNA, 1195 bp, Zea Mays
aacttcgtcacggcgtcctgcttggcaagctcaggccacactacctctccagcgacgcctacggcctacctcattgatggcctcccctgctccaacctcgccgccggcgccgcgaagtcccccgcgaatctccccggcgtctgcggcaagacgggagctggtgaacaagattacaagacccatcaattgcctcctccaaccaccgtgtgttcccaagagaaggcccaaggctcaacgtcctcgctccatgcctcgccgcagcaggactgcaggagggtggccggcgttggcccctgttccccgggaccagtggtgtctgaggcgcaaaagaaggtacacatcttgcccagggagatgcttggccactccacctttggtctgtcaatgtggctcctcaagtggctcccggtccacgttgtggaccgtgttcttctgtgcatagcgcgggccatgctcggggatactgctcggcttgggctaaagcggccggcctctggtcctcttcagctcaagtcactgtctggaaagaccccagttcttgacgtcggcacatttgcaaagatcaagtctggagatatcaaggtacgacctgccgtaagacaggtatcaggaagagcggtagaatttgcggacggtgagttggaggagttcgacgccattgtgcttgcgactggctacaagagcaatgtccccttctggttgaaggaccgagtgttattttctgaaaaagatggattgccaagaaaagcatttccgaacgggtggaagggtgagaagggcctgtactcggttgggttcacccggcgtggactgatgggcacctcggtcgatgccaggagggttgcccacgacgtcgagcagcaatggcggaaggccaaagggacgcatcgggacggcgttcctctacctctggtcgctgttgtttaccatggtgatgggttgtgattgtgagttgccaaagggtgtatgtacgtacgcatgcattctgctgcttgcttgtgtagtgctttgtatagggtattgtactgtcaatttctttttctttttttcttttggcgtgcgttcgttttgatgactaaccatcctacgtactataggggagggggtgaatactgaggtggccgtgttcttccaaagtcggggctcagttgacttggcctctagctactgataatgaaagaagcttgcctggttt

SEQ ID NO: 2789 - DNA, 2539 bp, Zea Mays
tgatcctccatggtggtgacagagtggtggcaagcaacaggagtctgaaaatttaatgcttgccgagaagcacaagactgagaaagagcagaataaccagctaagggatcagatttctcatcttttgaaagttgaacaagagcaaaacctaaagatgcaggaacgggatttaacaattcagtcactacagactaaactcaagtccattgagtctcagcttaatgaagccctcaatgctagcgatgctagatcaactattgggtctgaatctgcttcagtaatttcttccccaaagataacagaatcaactgctgactcatcttcagtgacgaaaaggcttgaggaggaattggcaaaaagggatgcccttattgaggcttcaagcccttcagcaaacaagccagctaatggtcaaggaagggagataggcaggagtgacagcagcaaaagtcgatcaccagatgtgtttgcatcaccagtgtctcaggataaaactggaaacagtggagctattgtaaaatcaagcaatgagctagcaaaaactacacctgctggggagtaccttacgtctgcactaatggattttgatcctgaccagtttgagggatttgcagcaatagctgatggtgctaataagcttttgatgctggtcttggctgcagttatcaaagctggtgcagctagggagcatgagatacttgccgagatccgtgatgctgtgttttcattcattcgaaagatggaaccgaaaaaagttatggatactatgttagtttcaagagtcaagatattatacatcagatctttgcttgctaaatcacctgaactacagtccatcaaggtctctccagttgagcgtttcttggagaaatcaaatactggtcgaagtagaagttctagtaggggaagtagtcctggcagatctcctgttcaccaccatggtcatggttcccgaactgcgcttgttgatgaacatgtgcatggtttcaaggtgaacattaaacaggaaaagaaatcaaaattctcctcaattgttctgaagcttcgtggtatcgaggaggagacatggagacagcatgttactggagggaagctccgggaaattactgaggaagctaaggccttttcaattggaaacaaggctttagctgctctctttgttcacacgccagctggtgaattacagcgccaaattcgtgcatggcttgctgaaaactttgagtttctatctgtaactggtgcggatgctgctggaggagccgcaggacagcttgaactgctgtcaaccgctattatggatggctggatggctggtcttggtacagcgcagccccctaccactgatgctttaggccagcttttatcagaatacacaaagcgtgtttacacatctcaactacaacacttgaaggacatagctggcacattggcaacggaggaggctgatgatcctgcacatgtcagtaaactccgctctgctctggagtctgtggatcacaaaaggagaaagatcatgcaacaaatgcgaactgacactgccttgttaacaaaagaagaaggtggctcaccaattcgcaatcctcttactgctgcggaggatgcacgattagcatctctcatatctctagataacatcttgaagcaagtcaaggaagtaattagacaaagctctacaggacctatgagaaaatcaaagaggaaagctttgctagagttattggatgacctcttgacacagatgccctctcttcttgatatagatcatccatgtgctcagaagcagatcatggaggcacggaaagttgtcgagtcactgcaagaagaccctgatgatcctgccccacagtctaatgcattgggagagggcgaggtttcacagtggaatgtactgcagttcaacacgggaacgactgcgcctttcatcataaagtgcggagcaaattccagtggtgaactggtgattaaggctgatctgcgagtccaggagcctaaaggtggcgaggtgatccgtgttgttccaagaccaacagttcttgcggacttgagttttgaggaaataaaaggtgtgtttgagcaattgccagaggcagttagcttgcttgccttggcacgaacagcagatggtacaagggccaggtattcaagattgtacagaaccttagccagcaaagtgacggccttgaaagagactgttgcagagatggagagaggtggtgttttcaaagatgtacgataaatgctgtgttattgtagagttatttatgatattgatgttgtatatggatgccatttgtcggcatcccttgtaactgtatttgtttttactatgtggaaacctatgttgtaacactattctttggcaagagatgagccttgcctgccccaacccgtaatactatggttgtgcaaggcattaatgtaaattgtagctgcagctgataaatgtctgcagtgctgcaagtctgaactttccaggttatggaactattcaatgtttatttgtattaagcttttaagatgttaaaattgtgctagtttt

SEQ ID NO: 2790 - DNA, 2794 bp, Zea Mays
gtagctcatagctgctgaggtagatcttgagtggcgtgcagtggatgcggtattgacagccatgaactgcaagatttgtgccagcgccgtcaacgttgggagcaacatcatccgccacgctcgccctcttcctccactgcattccatcacaacccaccactgcttgccgtcaacagccttgcctgatcctccatggtggtgacagagtggtggcaagcaacaggagtctgaaaatttaatgcttgccgagaagcacaagactgagaaagagcagaataaccagctaagggatcagatttctcatcttttgaaagttgaacaagagcaaaacctaaagatgcaggaacgggatttaacaattcagtcactacagactaaactcaagtccattgagtctcagcttaatgaagccctcaatgctagcgatgctagatcaactattgggtctgaatctgcttcagtaatttcttccccaaagataacagaatcaactgctgactcatcttcagtgacgaaaaggcttgaggaggaattggcaaaaagggatgcccttattgagaaattacatgaagagaatgagaagctttttgacagacttacagagaagtcaggattaggaagtgctccacaggcttcaagcccttcagcaaacaagccagctaatggtcaaggaagggagataggcaggagtgacagcagcaaaagtcgatcaccagatgtgtttgcatcaccagtgtctcaggataaaactggaaacagtggagctattgtaaaatcaagcaatgagctagcaaaaactacacctgctggggagtaccttacgtctgcactaatggattttgatcctgaccagtttgagggatttgcagcaatagctgatggtgctaataagcttttgatgctggtcttggctgcagttatcaaagctggtgcagctagggagcatgagatacttgccgagatccgtgatgctgtgttttcattcattcgaaagatggaaccgaaaaaagttatggatactatgttagtttcaagagtcaagatattatacatcagatctttgcttgctaaatcacctgaactacagtccatcaaggtctctccagttgagcgtttcttggagaaatcaaatactggtcgaagtagaagttctagtaggggaagtagtcctggcagatctcctgttcaccaccatggtcatggttcccgaactgcgcttgttgatgaacatgtgcatggtttcaaggtgaacattaaacaggaaaagaaatcaaaattctcctcaattgttctgaagcttcgtggtatcgaggaggagacatggagacagcatgttactggagggaagctccgggaaattactgaggaagctaaggccttttcaattggaaacaaggctttagctgctctctttgttcacacgccagctggtgaattacagcgccaaattcgtgcatggcttgctgaaaactttgagtttctatctgtaactggtgcggatgctgctggaggagccgcaggacagcttgaactgctgtcaaccgctattatggatggctggatggctggtcttggtacagcgcagccccctaccactgatgctttaggccagcttttatcagaatacacaaagcgtgtttacacatctcaactacaacacttgaaggacatagctggcacattggcaacggaggaggctgatgatcctgcacatgtcagtaaactccgctctgctctggagtctgtggatcacaaaaggagaaagatcatgcaacaaatgcgaactgacactgccttgttaacaaaagaagaaggtggctcaccaattcgcaatcctcttactgctgcggaggatgcacgattagcatctctcatatctctagataacatcttgaagcaagtcaaggaagtaattagacaaagctctacaggacctatgagaaaatcaaagaggaaagctttgctagagttattggatgacctcttgacacagatgccctctcttcttgatatagatcatccatgtgctcagaagcagatcatggaggcacggaaagttgtcgagtcactgcaagaagaccctgatgatcctgccccacagtctaatgcattgggagagggcgaggtttcacagtggaatgtactgcagttcaacacgggaacgactgcgcctttcatcataaagtgcggagcaaattccagtggtgaactggtgattaaggctgatctgcgagtccaggagcctaaaggtggcgaggtgatccgtgttgttccaagaccaacagttcttgcggacttgagttttgaggaaataaaaggtgtgtttgagcaattgccagaggcagttagcttgcttgccttggcacgaacagcagatggtacaagggccaggtattcaagattgtacagaaccttagccagcaaagtgacggccttgaaagagactgttgcagagatggagagaggtggtgttttcaaagatgtacgataaatgctgtgttattgtagagttatttatgatattgatgttgtatatggatgccatttgtcggcatcccttgtaactgtatttgtttttactatgtggaaacctatgttgtaacactattctttggcaagagatgagccttgcctgccccaacccgtaatactatggttgtgcaaggcattaatgtaaattgtagctgcagctgataaatgtctgcagtgctgcaagtctgaactttccaggttatggaactattcaatgtttatttgtattaagcttttaagatgttaaaattgtgctagtttt

SEQ ID NO: 2791 - DNA, 1791 bp, Zea Mays
gtcgtggtttgggcctgcgcgcctttaaactgtattgggcttggcccatgtacaggaaccaaacacatggtacaaaatctaggtattgtgaaatacttctgccactgccactactgccagcctgccagggatctatttgtaaaaagacaatgacaaaattgacatcaaagcgaaaaagaaagaaaaaacaccctgtcctcaccagttcaacgcctcttctccgttcacccggcgtgtgctctgcctctctctctctctcgtgcagcgaccgccgacgcgcttcgccagaccttcgccggcgacgagcactcaccagggcgtgaaaatgtcaacaagctctttgaaagaacccaatgtttctcaatcaaaagacgtggagaatggaaatgacaattctgtgaaatcctgcattagcaagcctgtgttgaatggcaacaaatgtgccaacaaggaacaaaatgttccgtcttgttgccctggcgctgtgacaaatggaaacgaggctggaaatgcagacgtggagtacattgattctgagaatctagtggatctaccagatgttgatgcagctctatgtaccttagttaaaaggttggattcaaaggactgggttatgacatgtgaagctctcaacaatgttcgtcagttggcgatgtatcacaaggaaagattgcaggagctgctggagcctctagttcctcttatcgtgaaatctgtgaagaacccaagaagtgctgtatgcaaaacagcactgatgacttgtgctgacatctttaaggtctatggtgacctactggttgagtctattgatccactgctgctgaggcagctcttacatcgatgacaagttggatctccccattactactgttaccaagaatgcagccctacctcaagaacaggaatccgcgggttcgagcaaaagcatcagtgtgtttgagcaagagtgtaccttgcttagatgtgcagggaatcagagaatatggaatggataagctcgtccagattgcagcaacccaactcagtgaccagcttcctgaatcaagagaggctgctcgcaacctggcactggaactacaggtattatatgagaagtctcaggcctccacctctgacgaaaatgagggtgaaccttctgtctcacaagatgctgagtcatgggaggctttctgtcagtccaagctttctgccttaagcgcccaagccatccttcgcgtgacctctactactccaaaagagggtgtcgcctctacttcaaatgctacaaaagagggtgtcacggcggccccaaaagaaggtttggatgtggattgctagcatgaggcacacaagcccacaatgagtttgtagatgcgatcagagcgcgattgtccacccccttcggtttttttgatgtacatgcttatggctggtccttggttacatccagttgggaatcggttgattattggttcgggaattcaggtgtgaccgcggtgttaatattggttgggacatatatctgctatagttgattgtataatcattttgttccactacttggtatttgtttcgccaggtgaacgtagaatttgacccacggtcagtgttatatacagtcctctttctgccacatcgggtgcaggttatgttatttttgaaggagatgtcattggcattcgtgcgccacccttatgttgtactctctctccgttttaaatcataagtcgttttgacttttttttaagtatatagcttttgttatgcatctagatataagttgtctataaaaggcctataactttggaggga

SEQ ID NO: 2792 - DNA, 2063 bp, Zea Mays
gcgtcattgacaaaaggtttcgccagcgccgagcctcatcatcagccacccgtccaccaccacccagcccatttctcgtccccaaaatttcgagtttcgaaaccaaaccaaacgaagcgacactgcacgtgtacgaacctacgacagctctctacttccctcgcgtcctctccatcgagagctgctcctgctcgtctcctcccacaccgcgcaattcgtcgggattcgggaaccctagcgccggatctccgcggcagcggcggaaatggcgaatcccctagcggggctgcaggaccacctcaagctcgcgcgggactacgcgctcgagggcctctacgacacctccatcatcttcttcgacggcgccatcgcccagatcaacaaaaagcaatctctgaagaagtggaaattgtgaaacagttggatgctcaattaaagtcccttaaagaagctcctgggacaaggcggtcatcatcacctcctattcggtctaataaatcatttgttttccaaccgttggatgagtatccaacatcttcaccagcaccctttgatgatcctgatgtgtgggctccaccaagggatacaccaacccgaagaccaacaagaggtcaatctagtgcaaggaagtcctcccaagatggagcctgggcacgtggttcatcaaggactggaacacctagtcgaagcgcaaaacctaatgggattaaaggaggtgctgttaaatcaactgcctctaacagttctgtaaggaaagggaaacaaagttcaaacaaggctgattcaacgagtagtgatgctgaggaaggtaagtccaagaagggtcagtatgaagggccagatatggacttagctgcaatgcttgaaagggatgttctggattctactccaggagtaagatgggatgatgttgccggacttagtgaggccaaacgactcctcgaggaagcagttgtgcttcctctctggatgcctgaatattttcagggtattcgtcgaccttggaaaggagttcttatgtttggtccaccaggcacgggaaagactcttttggcaaaggcagtggccaccgaatgtggaacaacattctttaatgtttcctctgcaacactggcctctaaatggcgtggcgagagtgagcgcatggtccgttgcttatttgatcttgcgagggcctatgctccaagtacaattttcattgatgaaattgactccttatgcacgtcgcgcggtgcctccggcgaacatgagtcgtcaagaagggtgaagtctgaacttctagtgcaaattgatggtgtaaacaatagctccaccactgatgatggccagccaaaaattgttatggttctggctgctacaaattttccatgggatattgatgaggcactgaggcggaggctggagaagcgtatttatattccacttccagattttgaaagtagaaaggcacttatcaacattaatcttagaacagttcagatagccgcagatgttaacatcgacgaggttgctcggaggacagaaggctatagtggagatgatctgacaaacgtttgccgcgatgcctcaatgaatggcatgaggcgcaagatagcaggcaagacccgcgacgagatcaagaacatgtcaaaggacgagatagccaaggacccggtggccatgtgcgactttgtggaggctctggtgaaggttcagaagagtgtctcgccttcagacatagagaagcatgagaagtggatggctgagtttgggtctgcctgagacctcggccatctgcttgggtcctgttcaaacattcgttttgtgtgggttgacacggcattccgtagcaatgatacggtgttacccgccggtggtcttgcttcatatagaccagaggcacgagctatcttgtctgtttccagtgatgctaggaattgagttcacgatcgtttcagttcttggtatatgcactttctgctgtcaaacgtatctcatcaagtagccgtggccgcctctatttccagatgctccgtgtttggttgaaggaatatcacaggaaccaaagttttagcgtgtttcaa

SEQ ID NO: 2793 - DNA, 3301 bp, Zea Mays
cgtgtctcaaatcccgtgaagtgcctcgccgcgcagacaaaaaaaaaaaatccccaaatccccttgagaggcctgcaatttttagcctcctgaaccctgcgattggagccggcggtggcggcgccagcgcccgcggtcggatcgtcgcatggccgagattcgcaagtacgccatgtccaaccagcccccagatattcctcagatactactggaagctcagagtaggtggctgcggcccactgaaatctgccaaatattgtcaaactacaagaagttttccattgcgccagagccaccaaacagacctcaaagtggttcgctgtttctgtttgaccggaaaatattgagatacttccggaaggatggacacaactggagaaagaaaaaggacggaaagacagttaaagaagcacatgagaagctcaaagttggcagtgttgatgtacttcattgctattatgcccatggtgaagagaatgagaacttccaaagacgaacatattggctgcttgaagagggtttcatgaatattgttcttgttcactaccttgaaatcaagggtgccaaacaaagtttcaatcatgctaaagaagctgaagagactgcaggattatctaatgccgatagtcctgcatgctcaaactctttcgctagtcagagccaggtagcctcccgatctatggatgctgaaagcccaattagtggacagatttcggaatatgaagatgctgaaacagataattctcgagcaagctccagataccaccctttcactgagatgcagcagcctgtggatggtaccgtgatgggtaacttctttggcgcttcatctccaagtgtttctgtaaataatctagctgcaggttatcttggtgaaatgcaacctacgggagctaattttaccagtcattttgccactcgcaatgacatagctagtgtgttcaatgatactggctctgagttaggaggtggtcccaaaacttcaattgattcagtactgttgggtgaaccatttccagaatatccaggcggcttcatggagtcgacactctattcttctgttgcaacattgggtaacagtctggaagatggtttgcagacatttatgtctgaggctctctacaccaacaatctcactcaaaaggaagttgatgcacttggtgcagcaggcataacatcctcgaagagaatgatggttatacagatcaaagtgtcaggtatccacttttaaagcagtcatcatcagacctctttaagatggagccagatggtttgaaaaaattcgacagcttttcaaggtggatgagcaatgagcttccagaggttgttgatttggatatcaagtccagctctgatgctttctggagtactactgaaaccgtgaatgttgctgatggatctagtatacctattaatgagccattggatgtatttgtagtcagcccctcactttcccaagaccagctcttcagtattattgatgtatctccaagctgggcatacaatggcacaaaaaccaaggtcttaattactggtacattcttggcaaaaaaagaagatgtggaaaattgcagctggtcttgtatgtttggagactctgaagtctctgctgaagttttagtggatggctccctgcgttgctatacaccagtacaccattctggacgagtcccattttatgtgacatgttcaaatagagtagcttgtagtgaagtgcgagaatttgagttccgtgattctgagacccattatatggatatctcagataagcatactacaggcataaatgaaatgcatttacgtatccgccttgataagttactttccctggaaccagaagactatgaaaagatcagaatcttgagaaacaggtgaaagaaaagctatattactggcttatccataagatacatgatgatggaaaaggtccaaatgtcctaggcaaggaaggacaaggtgccattcatttagtagccgcacttggttatgattgggctatcaaaccaatagttgcggcaggagtaaatataaacttcagggatattcgtggatggactgcgcttcactgggctgcatgttgtggaagggagcggacagttggtgccctgatagcaagcggagctgcatctggtgctttaacagatccaacgcagcagtatccatctggaagaactcctgctgatttagcatcagaaaatggtcacaaaggcattgctggttttcttgcagagtctgctttgacaagtcacctctcagctcttacattaaaagagtcgccaagtggcaatgtggaagaaatatgtggattaacagcagctgaaggttttgcagcatcaagttcttcccagcttgcttgtgttaattctcaggaagagtccttaaaagattcacttggtgcagttcgtaaatcaactcaagcagcagccagaatatttcaagcttttagggtggaatcattccacagaaagaaggttattgaatatggagatgatgattgtggattgtctgatgaacgcacactttcacttgtttcccttagaaacccgaaatctggacacggtgattcacattctgctgctgttcgtattcaaaacaagttcagaggatggaaaggaagaaaagagtttatgcttatccggcagaaaattgtgaagatacaggcccatgtacgtggacatcaggtaaggaaaaactatcggaaggtagtctggtctgttggcatcgtggagaaagtcatactgaggtggaggagaaagggaaggggtctgcgaggtttccaacctgagaaacaacttgaaggtccatcatggcagatccaacctgcaaaggctgaggctgaggatgaatatgacttcttgaaggatggcaggaaacaggctacaggcaggttggatagagcactggctcgtgtgcgttccatgaatcagtatcctgaagcaagagaccagtaccgcaggctgcaagcctgtgttaacagcctacgagagtcccaggcgatgcaggacaggatgctggctgattcagctggcaccgatgggggtgatttcatgactgaattggaggagctatgccgggatgatggcgatgccccgatgtcgactatttcttgacatggagcttactatagatcagttaggcagtgacatgttctttaccagactagatgtaaattgttgttactaaatggtctctactcaccgttgaacaccataatataatgatatataccagctaatacatggacttctacagattatgataattgatcagtataatttgtggaattattatattttaaagc

SEQ ID NO: 2794 - DNA, 3380 bp, Zea Mays
gccgtgtctcaaatcccgtgaagtgcctcgccgcgcagacaaaaaaaaaaaatccccaaatccccttgagaggcctgcaatttttagcctcctgaaccctgcgattggagccggcggtggcggcgccagcgcccgcggtcggatcgtcgcatggccgagattcgcaagtacgccatgtccaaccagcccccagatattcctcagatactactggaagctcagagtaggtggctgcggcccactgaaatctgccaaatattgtcaaactacaagaagttttccattgcgccagagccaccaaacagacctcaaagtggttcgctgtttctgtttgaccggaaaatattgagatacttccggaaggatggacacaactggagaaagaaaaaggacggaaagacagttaaagaagcacatgagaagctcaaagttggcagtgttgatgtacttcattgctattatgcccatggtgaagagaatgagaacttccaaagacgaacatattggctgcttgaagagggtttcatgaatattgttcttgttcactaccttgaaatcaagggtgccaaacaaagtttcaatcatgctaaagaagctgaagagactgcaggattatctaatgccgatagtcctgcatgctcaaactctttcgctagtcagagccaggtagcctcccgatctatggatgctgaaagcccaattagtggacagatttcggaatatgaagatgctgaaacagataattctcgagcaagctccagataccaccctttcactgagatgcagcagcctgtggatggtaccgtgatggctgcaggttatcttggtgaaatgcaacctacgggagctaattttaccagtcattttgccactcgcaatgacatagctagtgtgttcaatgatactggctctgagttaggaggtggtcccaaaacttcaattgattcagtactgttgggtgaaccatttccagaatatccaggcggcttcatggagtcgacactctattcttctgttgcaacattgggtaacagtctggaagatggtttgcagacatttatgtctgaggctctctacaccaacaatctcactcaaaaggaagttgatgcacttggtgcagcaggcataacatcctcgaagacagagaatgatggttatacagatcaaagtgtcaggtatccacttttaaagcagtcatcatcagacctctttaagatggagccagatggtttgaaaaaattcgacagcttttcaaggtggatgagcaatgagcttccagaggttgttgatttggatatcaagtccagctctgatgctttctggagtactactgaaaccgtgaatgttgctgatggatctagtatacctattaatgagccattggatgtatttgtagtcagcccctcactttcccaagaccagctcttcagtattattgatgtatctccaagctgggcatacaatggcacaaaaaccaaggtcttaattactggtacattcttggcaaaaaaagaagatgtggaaaattgcagctggtcttgtatgtttggagactctgaagtctctgctgaagttttagtggatggctccctgcgttgctatacaccagtacaccattctggacgagtcccattttatgtgacatgttcaaatagagtagcttgtagtgaagtgcgagaatttgagttccgtgattctgagacccattatatggatatctcagataagcatactacaggcataaatgaaatgcatttacgtatccgccttgataagttactttccctggaaccagaagactatgaaaagtatgtcttgagtaatggaaataagtctgagctgatcaacactatcagttcattaatgcttgacaataatttgtctaatctggcattaccatctgatgagaaggaattgtgcactgtacaggatcagaatcttgagaaacaggtgaaagaaaagctatattactggcttatccataagatacatgatgatggaaaaggtccaaatgtcctaggcaaggaaggacaaggtgccattcatttagtagccgcacttggttatgattgggctatcaaaccaatagttgcggcaggagtaaatataaacttcagggatattcgtggatggactgcgcttcactgggctgcatgttgtggaagggagcggacagttggtgccctgatagcaagcggagctgcatctggtgctttaacagatccaacgcagcagtatccatctggaagaactcctgctgatttagcatcagaaaatggtcacaaaggcattgctggttttcttgcagagtctgctttgacaagtcacctctcagctcttacattaaaagagtcgccaagtggcaatgtggaagaaatatgtggattaacagcagctgaaggttttgcagcatcaagttcttcccagcttgcttgtgttaattctcaggaagagtccttaaaagattcacttggtgcagttcgtaaatcaactcaagcagcagccagaatatttcaagcttttagggtggaatcattccacagaaagaaggttattgaatatggagatgatgattgtggattgtctgatgaacgcacactttcacttgtttcccttagaaacccgaaatctggacacggtgattcacattctgctgctgttcgtattcaaaacaagttcagaggatggaaaggaagaaaagagtttatgcttatccggcagaaaattgtgaagatacaggcccatgtacgtggacatcaggtaaggaaaaactatcggaaggtagtctggtctgttggcatcgtggagaaagtcatactgaggtggaggagaaagggaaggggtctgcgaggtttccaacctgagaaacaacttgaaggtccatcatggcagatccaacctgcaaaggctgaggctgaggatgaatatgacttcttgaaggatggcaggaaacaggctacaggcaggttggatagagcactggctcgtgtgcgttccatgaatcagtatcctgaagcaagagaccagtaccgcaggctgcaagcctgtgttaacagcctacgagagtcccaggcgatgcaggacaggatgctggctgattcagctggcaccgatgggggtgatttcatgactgaattggaggagctatgccgggatgatggcgatgccccgatgtcgactatttcttgacatggagcttactatagatcagttaggcagtgacatgttctttaccagactagatgtaaattgttgttactaaatggtctctactcaccgttgaacaccataatataatgatatataccagctaatacatggacttctacagattatgataattgatcagtataatttgtggaattattatattttaaagc

SEQ ID NO: 2795 - DNA, 3420 bp, Zea Mays
cgtgtctcaaatcccgtgaagtgcctcgccgcgcagacaaaaaaaaaaaatccccaaatccccttgagaggcctgcaatttttagcctcctgaaccctgcgattggagccggcggtggcggcgccagcgcccgcggtcggatcgtcgcatggccgagattcgcaagtacgccatgtccaaccagcccccagatattcctcagatactactggaagctcagagtaggtggctgcggcccactgaaatctgccaaatattgtcaaactacaagaagttttccattgcgccagagccaccaaacagacctcaaagtggttcgctgtttctgtttgaccggaaaatattgagatacttccggaaggatggacacaactggagaaagaaaaaggacggaaagacagttaaagaagcacatgagaagctcaaagttggcagtgttgatgtacttcattgctattatgcccatggtgaagagaatgagaacttccaaagacgaacatattggctgcttgaagagggtttcatgaatattgttcttgttcactaccttgaaatcaagggtgccaaacaaagtttcaatcatgctaaagaagctgaagagactgcaggattatctaatgccgatagtcctgcatgctcaaactctttcgctagtcagagccaggtagcctcccgatctatggatgctgaaagcccaattagtggacagatttcggaatatgaagatgctgaaacagataattctcgagcaagctccagataccaccctttcactgagatgcagcagcctgtggatggtaccgtgatgggtaacttctttggcgcttcatctccaagtgtttctgtaaataatctaggttatcttggtgaaatgcaacctacgggagctaattttaccagtcattttgccactcgcaatgacatagctagtgtgttcaatgatactggctctgagttaggaggtggtcccaaaacttcaattgattcagtactgttgggtgaaccatttccagaatatccaggcggcttcatggagtcgacactctattcttctgttgcaacattgggtaacagtctggaagatggtttgcagacatttatgtctgaggctctctacaccaacaatctcactcaaaaggaagttgatgcacttggtgcagcaggcataacatcctcgaagacagagaatgatggttatacagatcaaagtgtcaggtatccacttttaaagcagtcatcatcagacctctttaagatggagccagatggtttgaaaaaattcgacagcttttcaaggtggatgagcaatgagcttccagaggttgttgatttggatatcaagtccagctctgatgctttctggagtactactgaaaccgtgaatgttgctgatggatctagtatacctattaatgagccattggatgtatttgtagtcagcccctcactttcccaagaccagctcttcagtattattgatgtatctccaagctgggcatacaatggcacaaaaaccaaggtcttaattactggtacattcttggcaaaaaaagaagatgtggaaaattgcagctggtcttgtatgtttggagactctgaagtctctgctgaagttttagtggatggctccctgcgttgctatacaccagtacaccattctggacgagtcccattttatgtgacatgttcaaatagagtagcttgtagtgaagtgcgagaatttgagttccgtgattctgagacccattatatggatatctcagataagcatactacaggcataaatgaaatgcatttacgtatccgccttgataagttactttccctggaaccagaagactatgaaaagtatgtcttgagtaatggaaataagtctgagctgatcaacactatcagttcattaatgcttgacaataatttgtctaatctggcattaccatctgatgagaaggaattgtgcactgtacaggatcagaatcttgagaaacaggtgaaagaaaagctatattactggcttatccataagatacatgatgatggaaaaggtccaaatgtcctaggcaaggaaggacaaggtgccattcatttagtagccgcacttggttatgattgggctatcaaaccaatagttgcggcaggagtaaatataaacttcagggatattcgtggatggactgcgcttcactgggctgcatgttgtggaagggagcggacagttggtgccctgatagcaagcggagctgcatctggtgctttaacagatccaacgcagcagtatccatctggaagaactcctgctgatttagcatcagaaaatggtcacaaaggcattgctggttttcttgcagagtctgctttgacaagtcacctctcagctcttacattaaaagagtcgccaagtggcaatgtggaagaaatatgtggattaacagcagctgaaggttttgcagcatcaagttcttcccagcttgcttgtgttaattctcaggaagagtccttaaaagattcacttggtgcagttcgtaaatcaactcaagcagcagccagaatatttcaagcttttagggtggaatcattccacagaaagaaggttattgaatatggagatgatgattgtggattgtctgatgaacgcacactttcacttgtttcccttagaaacccgaaatctggacacggtgattcacattctgctgctgttcgtattcaaaacaagttcagaggatggaaaggaagaaaagagtttatgcttatccggcagaaaattgtgaagatacaggcccatgtacgtggacatcaggtaaggaaaaactatcggaaggtagtctggtctgttggcatcgtggagaaagtcatactgaggtggaggagaaagggaaggggtctgcgaggtttccaacctgagaaacaacttgaaggtccatcatggcagatccaacctgcaaaggctgaggctgaggatgaatatgacttcttgaaggatggcaggaaacaggctacaggcaggttggatagagcactggctcgtgtgcgttccatgaatcagtatcctgaagcaagagaccagtaccgcaggctgcaagcctgtgttaacagcctacgagagtcccaggcgatgcaggacaggatgctggctgattcagctggcaccgatgggggtgatttcatgactgaattggaggagctatgccgggatgatggcgatgccccgatgtcgactatttcttgacatggagcttactatagatcagttaggcagtgacatgttctttaccagactagatgtaaattgttgttactaaatggtctctactcaccgttgaacaccataatataatgatatataccagctaatacatggacttctacagattatgataattgatcagtataatttgtggaattattatattttaaagc

SEQ ID NO: 2796 - DNA, 2107 bp, Zea Mays
cagagagcggagaagacttcatctgcacgtgctgctgatgtgcattagaggatccgtgctgataatatacagctgacacccacaagatcgactggataagttcgagcctgacggcatcatgggttccggcgatttgagctcggagatggagaggacggttcttggcctgacgctgtgggtctggattgccatcggcgtggtcgcgcttctcgtggcaatcctgctgatgatctgcatttgggtggcgtcccgcctgaggaccaagagaaccatggacagcctgaggcagacgcagatccccatctactccaaggagatccccatcgaccgggtcggcgggcgcagcctggcacagacaatgcatgagcgcgagcagccgagcttgccgccgccggacaagtacgcgaaccgggagccggccggggcggctgtggggcacctggcactcagcaagtcctcggatcatgacaacatgagccaggggagctcggtttgcaatgctgaccgtgctggcactggcagcatgcactccggtgaggatgggagctcaggacctcggaggaaacccaactctcctgcggcgttcgtgtcagcttcgcccttggttggccttccggagttctcgcatcttggttggggtcactggtttactcagcgtgaccttgaacttgctaccaaccgcttctctaaggagaatgtgctcggggagggtggttatggagttgtgtaccgtggacgtctggtgaatggaactgaagtcgcaataaaaaagatctttaacaacatggggcaggcagaaaaagaattcagagtggaagttgaggctattggccatgtccgacataagaatttggttcggctgttgggatattgtgttgagggcgtaaacaggatgctagtatatgagttcgtgaacaatggtaatttagagcagtggcttcatggagctatgcatcagcgtggtgtttttagctgggaaaatcgcatgaaggttgtaacaggcactgcaaaagcgcttgcttaccttcatgaagctattgagccaaaagttgtacatcgagatataaaatcaagcaacatattgattgatgatgaatttaatggcaaagtatctgactttggattggctaaacttttgggatcagacaaaagccacattactactagagtgatgggaacatttggatatgttgcacctgaatatgctaatactggaatgttaaatgaaaagagtgacgtttacagttttggcgttctcttgttagaaactgtgacaggaaggaatcctgttgactacagccgatcttccaatgaggtcaatcttgttgaatggcttaaaacaatggtggccaatcggagggcagaggaagtggctgatccaagcttagaggctagacccagtatccgggctctcaagcgggctcttttggtggcactgaggtgtgttgatcctgactctgaaaagagacctaagatgggccaggttgttaggatgcttgagtcagaagaagtaccataccgggaggatcggagaaatcgtagaagtcgcactggaagcatggatattgagtccattgcagagggttccaactctgcggagtttggaaagaaggtagaaaggactggaagctctatatctgacagatctcaaccatgaggcctggaaatctaagctatatcaggaactgtctcagaaacgatgttaatcaccaaggtgattgctgtcctgataggggatgctggtaggtgacagaggcaaggcaggcccaggtattactgcctaagtattaggctttagttttcaggtgcagtagaagcattcttggatgaggaacctcctggtctcctcttatttgtataggtatatgttggtgcctgaggaattcctcttggtttgggtgtttaacatttgttcggttcttttatttcttgcattgttgccttcttaaatcagtttcacttctccctgatgaaatgctgaacatgaggttgtggacttgtggtcttagcgatactgcttgtcattgtttttcatatgtttacctgcggcctgctctaccttatcccatgagttcgttggcgaaaggtttggcaacatacgctgatt

SEQ ID NO: 2797 - DNA, 2889 bp, Zea Mays
cctgaatccgagcgatcgctgcttttctcgtttctactttcttctacctcccgattcgctggcctctcccgaccctgccccgcctcatcactccccatcccaccgacacacggcgtgtcaggtgtcacgcgcctccgctaaaaccctagccccacccaggcctgatggctgctccgcggcagccgcacccaccggcagcggaggagggagccgcgccggcgggtcccctgcccgccgccgcgccaggtccgcgtccgtacgacgtgacggtcgcggcaacggagctccggccggtggactgcaatctcgccgcgctctgtgaccacgttcaggcggagggcttcggctccggggccttctccgacctcgtcgtggaggccatgggcgccacctaccgcctccatcgcctcatcctctcccgcagcgcctacttcaggaatatgctacatggtccttggagagagtcgggagcacccacagtggttttgcacatagatgatgccaatgtcgattcagatgcaattgcaattgcgctcgcatatctttatgggcaaccccccaagcttactgatagcaatgcattccgagtgcttgcagctgcatcatttctggatcttcaggacttatgtacaatatgtacagattttatcatttccgagctctggacatcaaactttttacaataccagttgtttgctgagagtcaagattatgggagccatggagaacgtgttaggaacgcttgctggggttatctttgtcaaagtgccacaatggaattacgagaggtgctaccaaagctttcttcacaaactttgcatgctcttcttacatctgacgaattatgggtacctaacgaggagaaaaggtttgaactagcattacttactctacttgcaaaggttgctatgtgtgagatacaagttagtggtaatgaaacaaatttaccaagtgctgatcgatccatgaggaaggggaagactccaatgaatgaatctggggaggaactgctaatggactctgaattgcagaacttgaagttgcatgataacttggggaatgaaatttcccataacattattgctatttcagatatgaatggtgaagctcccaagagaatggagattgattgttctaccggaggaccatcaggagaaagcacttcatatcaatttaatgaaaataactggatttctagtgagcaaactgcaaataattatttctcaagaacttccagtagtgttgttgttcctactgagtggggaaggcccaatgcaccactttggggtggcagggtcgttggacggcggcaaattagatacattagaggaagctcttgtctatctactgatgaatataatgcttttatgaatatatttgagagaggttctcttctctactgcaatatgtcctttgatgcactgctaagtgttcgaaagcaactcgaagaatttggattcccttgtaaagctgtcaatgatagtctatggctacagggtgcaagcgattgttgctgatacttgcaggaattgttgccttatgaatagttcttgtgcttgcaagcaagcatatgtgagctcgcatacacattacaggcaggagcatgacaggagcagtgcctccgacaacataggtaatgtctaccttgcggatggccagggtgatgggaatggtgtacttgggcctgtccgtgttaatgtaagaggagcagtcgatggacttgctggtattgggagagggaactcaaatgtgcctggtgcagcttgggctcctacacgatatgtcttctcccgtgtcccttatgggcttggttcaagaaatggccagcaatttgccattgatgaatcagaacctagaattgaccgcaatggagatatttcagcagatggtctgactgcattggttaaccttagccaagaaaacaatgctgctcatctgcaggatcaaagtctatttgagacagggatgcagacaagatatcgcagtgttccatctgtttccactccaggtggttcttctgtccagatgcaggagtcaaaggagcatgaacttggatcagattgggaaaccacaaaggatgcaactatatcattagacatgaaaacacctcttagccattttccacctttccgctttggggttgagttcgaggatgtgcacaggcttgctgatggtcaggtgaaacattcgactgaagtgttttatgcaggctctctatggaaggtgagtgtccagccattcaatgatgaggatcctcatgggcgacgcacccttggactatttctccaccgacgcaaggctgagttgttagatcccttgaggaaggctcacttgtacgttgacccccgggaaaaggtcactgctcggtatcagagagaggtcatgatatttggaagcctgaagcaggctgggacgctgctaccaaaagcgccgaagggctggggctggcgcactgctatactatttgatgagcttgctgatcttctccagggtggtgccctgcgaattgctgcagtggtccagcttgtctagattagttgcagaaaacaactgcttgcaaggatggtgatagcacagcagtttgtgtaattgatatactccctccgtcctaaaatatagttttttctggtccttttttccgtccacattcgaacaaatgataatgaatagacatacatacaaactacattcataaattaagttaagtagtcaatgcttgtttagtgtaaaacgaattatattttaggacggggtgagtatgtaagaactcaatctgtcatgtactcgttgtcatgtactcgtgctctgaaatattgtataatctatagcggtttgctgtttggtatataaaagagaatatatcagatgcaaaccaaccacttgtacaaa

SEQ ID NO: 2798 - DNA, 1738 bp, Zea Mays
ccatcctgtatccggccgccgcgctgcccatgaacggcggcgagtatggtcgtatggaggagatggcgaggcagctcgtcgctcgccttgccgccaccccggactctgctctgcggggcctccccttcctccaccgcgttctcaccctccccctcctctccgccgcgtccgccgtgctccgcctgtccctgctcctttcgcggctccgctcgcgccgcgcgctgcccgtgcccgtcgttagcgtcggcaacctcacttggggtggcaatggcaagacacccatggtagacttcttggcccgcagcttccaccgcctcggcgtctcgccactactactgacaaggggttatgcaggtggagatgagccaaagatgctccggaggcgcctttccgatacttcggccaagatcggggtcggtgcaaatagaacggcagtggcttcttccatgcttcaagaatatggcttcatccatcattttcagaacacatttgccgagaagaagctttcttcagtctgcaaactggaatctggtaataggattggagtagccatattagatgacggtatgcaggcagcactggagcttgctccgagatgtggagattgtgatggttaatgggttggctccgtggggaaactcacatttcattccgcgaggacccatgagagaacctctgagtgcactcggtcgagctgatattgtggtcattcataatgctgacatggtatgtggtaatagaggcttctgaaatgcaacttaaagcaataaggtccgcaatagaggataataatgcaacatgttcagtgttctacagcagattggctccatcacatttttttgaagttaagcaaccatcacagagactccctcttaatgtgttgaatgataagatcgtgctatgtgtttctgcaattggctgcccaaatgctttcattcatacagccagagagattggtccactcaaaatcgccaggttggatttcagtgaccatcatttcttcagtgctcatgacctagagaaaattcaagaaacagcgaggaatctcatggacgagcacagcaaagataccatagtcttagttactgagaaggattatgaccgtgatccagaggccctcaagacactggacgcaaacgtttgggtgctgtcttcttcactgcagattatgcatcacagcaaacaaggagaagatgaattcatgaggaaagtcaatgagattatcacagttacctggtgtgcgaagtcacatgcagcggaccgggccacgggttgctgagggtgtggtttgatatggttgtacctgaaagcaaccggtagtgaaacatttttgcctggagatatgaacattagcatgcaggatagagtttttccttgcagctgtggggttgtttgggtttatggattaatgtttagtctatctattttattcctattttagttcataaattgctaaacacgaaaactaaaatagagttttagtttctgtattgggcaaactagagactaaaaataaataaaatagagggactaaaaattagtccctaaaccccaaacaaccccagtcaaacctacaagatttaggatgtgtttgtttcccttctagattatataagttggacgatgctggaaagataggagactaaaggccggtttggttcactgcctaacttatatattttgtctaacttttctgtctaaattagttgattgactaaacttaggtaaaatatgacat

SEQ ID NO: 2799 - DNA, 3322 bp, Zea Mays
cgtctccgtactggtacggggacgtctctttctcgaaattctctgcccgcaagcctactactacaacttctgcagccgcccgtccgtctccctcccccaaccgagtatatttatcaggccccttcccccgccccggcgccctccttccccccgctcctgtgcgcgttgtttctcgtcgccgtcgtccgtcctccggcgtccggcaacctgcaaccggcgacgacgatggaggcggcgctgggggcgctgtgccgcgccggaggctggtcgtacgcggccgtctggcgcttccatccccaagaccctcgattgctcacattgggggactgctactgtgaagatgaggcaaaagcaatggttcagaagatgcttaatcttgttgaagttgttggagaaggcatcctaggacaagctctagtaagcggagagtgtcaatggatttacgacgatacttgccacgcgttgaatcagataagccatgctgataacggagatttacatcagggttatacttggtggcagcatcagtttctcagtgggatgaagactattgcagtgttacctcttcagttgcatggactggtgcaatttggttccacacggaaggttcccaggagctcagtttttttgaatcaggtcagagatatatttgatcggatgaagaatgcttcaagcgatggtccaatggagtatacccagaataactctcttgcatgcggtcagcaacctatccttacttcatcgagacctgtcaatgacatgctcgtacataacaaggtcaacccattgcaaactgagaaacttttggaggatatcgagagaacagaatctataaggagttcgatctgttctccaagcaattcacaaagatctttaaatgatctaacctcccatggtactggtaacagcagcatggatactaatatattagccatgcctgttaactccaagtctatatatgatctcaaacgatttgataacgtcacagagttgtttcatcgaagttctaatgacagaattggttttcaagtcagctctagtaaagagcctgattctaccattgctggtgtaatgtcagaatacaaaagtttgaacaatattcatatgacagaaaatgattcatgtggtcaaaacataggatataccccgtacctttacactaccaccaactcttcaaattctggccttgatgaactttcttattctggcgttgctttgtcgtcatcgtttacagcagtatcagggaaagttaaagattgcctgcaaactgagagtgacaagtttctatgtaaatctgtatcattcggcagcaacccttgtgcttctaaattccaagaaaatcgcctatcaccataccatgccctcatgcacgaacaatccctgatacctgaccctggagaatctgtgaggctcctctcacaagaagaatcctttattgttcaaggtgactcaagtcaattcaaggatactgccgactttacaggccagggtaacagtacatttcctgaattacctaacagatcacctgaagaagctactgctgaaactctagaaaacaacatgaaggactgtagtggaaacaacagtctgctggaaactatgatgcttgatcttagcaccaacagctttgtgcaagattggtgggacaacagtgttctactggcagaaaaccttccaaattcaagcgaaaaggacccagagcctgctatggaattggccaataggcattcattgccaactggggagagaggctcgcctttcatacctgtcatcgaacaattgctaggtgatgttgcacatccacctacacctaccggacatagttcacttgaggctgaagctactgctttagctggccgtgtttcagattatcagctgcctcagtttgctttccgagactgcctaacagtagacaacgcacaaatcccagcattggcctgcagtaattacacatgcagaactagaagtgcacaaaatggttcttcagaagtgccatcagcaaacgtatctgtggacgacacctgcagtttgaacacagcaaactccaatggcagtcagtcgagcaatcctgagggaacgaaggttgctaagagaagagctagagctggggagagtacccgacctagaccaaaagaccgacaactgatacaagatcgcgttaaagaattacgagagattgtccctaatggtgcaaagcattgatgctttgttggagcgaacaattaagcacatgctgtttctacaaagtgtaaacaaatatgcagagaaaattaagcaagctgatgaaccaaagataatcgacaaagggagcggtgttatcttgaaagacaacccagttgctggcacaaatggtggtgccacgtgggcctacgaggttgctggccaaactatggtttgcccaataatcattgaggatctttcgccacctggtcagatgcttgttgagatgctttgcgaggaacaagggctctttctggagatagctgacaacatacgtggaattggtctgacggtcttgaaaggacggatggagctctgtgatggcaagatatggtcgcggtttcttgtcgaggcaaacagagaggtcacaaggatggatatatttctgtcgcttgttcagttactggaacagaacagccttgttcgatctactgaccagatggccaaggtcatgaataatggggttccatcctttgcaaaccaccaacggtctccgctgctagttccagtgggcattcctgagagactacagtgacatgcagatgcttcaactagatagagttaggtaccacgactgttaacatatctggtagccggaactccatgcattagactgagcctagtgataacatctgaatgaagatagtctcactgctgctaaagatgactgtatcaagaacatgcatgactggtgcagacatgagcctctagcgcagaaattatgaactttccctgattattagtggtgtgatcagtgaaatggcattatctcctgcttagttggttgacaccttgctcctgagtaactgggtcttgatagtggtgtttcttatgcagcgatggcagtgtattagggtagtagtgctagcttgcagttcgttgcccctgagtcaaccttgggcagttcgtggtaggttcttcatgggcttgggcccaggaccgggccccatgcacgtgcaataagtgcgactgcacagggctcaaaattctgaggggccaatatgtatcaataagcagactaatattacaccatctaagttgaactcagttagcagctagactgttgctcttcaaacacatctattaatacatatgtttattt

SEQ ID NO: 2800 - DNA, 3325 bp, Zea Mays
gattaaacaattctgaaacacaaagtaggggcctcttcgcaaatcccaccagcaccaccgccttcgcctccgaccgcctcccagatccgctcgcccggccgccgtcgtcttcctggtccgcctctgcggcagtgagattcctcgccgccccgccctggattccgtcgagaggatcgtcgaggacttcgcgatggacctcgccatcaaccccttctcctccggcacccgccttcgggacatgatacgtgcgatacgcgcgtgcaagacggcagcggaggagcgtgccgtggtgcggcgggagtgcgcggcgatacgggccgccatcagcgagggcgaccaggactaccggcatcggaacatggccaagcttatgttcatccacatgctcggttaccccacacacttcgggcagatggagtgcctcaagcttattgctgcggcgggcttccccgagaagcgcatcggctatctaggactcatgcttctgctcgacgagcggcaggaggtcctcatgctcgtcaccaactctctcaagcaatcttaaccactcaaaccagttcattgttgggcttgcgctctgtgcccttggcaacatatgttctgctgaaatggcacgcgatctggctcctgaagtggagagactgttgcaaaatagggaccctaatacaaagaagaaggctgctttatgctctataaggattgtgcgaaaagttccagacttggcggaaaatttcatgagtgctgctgcatcattactgaaggaaaaacatcatggtgttctgatatctgccgttcagctttgcatggaactatgtaaagccagccatgaagcattggagtacttgaggaagaattgccttgaaggactggtccgaatactgagagatgtctccaacagttcatatgctcctgaatacgacatcggtggcatcacagatccattcttacatatccgagtgcttaaactcatgcgaatactgggtcaaggagatgcagattgcagcgagtatatcaatgatattcttgctcaggtttcaacaaaaactgagtcaaataagaatgctggaaatgctattttatatgaatgcgtggagacaataatgggcattgaagctacaagtggtttacgtgtgttggcaattaatattttgggtcgttttttgtccaaccgtgataacaacataagatatgttgccctaaacatgcttatgaaggccattgccgtggacacacaagcggtgcagaggcacagggcaacaattttagagtgcgtcaaggatgcagatgtctctattcgtaaaagagccctagaacttgtttatctacttgtcaatgatacaaatgtaaagccattgactaaggaacttgttgattaccttgaagtgagtgatcaagatttcaaggaagacctcactgctaaaatatgctcaatagttgaaaagttttccctggacaagctatggtacttagaccagatgttcagagttttgtctctggctggtaattatgtaaaggatgatgtatggcatgctcttatagttctaatgagtaatgcatctgaacttcaaggatattcaatcaggtcattatataaggcattgcaagcatctggtgaacaggaaagtttagttagggtggccatttggtgcattggtgaatatggagaaatgctggtcaacaatcttagtatgttagacatggaggaaccgatcacggtaactgaatctgatgctgtggatgccgtagagattgctcttcagcgttactcggcggatgttactaccagggctatgtgtcttgtctctcttttgaagctttcttcccggtttccaccaacatcagagagaataaaagaaatagttgcgcaaaataaagggaatactgtgcttgaattgcagcaaagatctattgaattcagttccattatacaaagacatcagtcgataaaatcatctttgcttgaacgtatgcctgcattggatgaagcaaattatttggtgaagagagctgcttctacacaggctgcagtttcatctgtaaattctgctcctgcagtcacttctggaggcccacttaagcttccaaatggcgtagcaaagccaccaccagctcctttagctgatttgcttgatttgggttctgatgatgctccagtgactacttcggcccctactacatcacctaatgattttctacaggatctgttgggcatcggtttgactgattcgtctcctataggtggagctccgtctacaagcactgacattctgatggatcttctatctattggttcatctcctgtacaaaatggcccaccaacgtcaaactttagccttcctggcatagagactaaacctccccctgttacacctcaagttgtggatcttcttgatggtttgtcctcaagcacatctcttcctgatgagaatgcagcttacccgacaatcacagcattccagagtgcaaccttgaggatcacattcagtttcaaaaagcaacctggaaaacctcaggagactacaattaatgcttctttcacaaatttagcaactactgcattaacagatttcgtcttccaggcagccgtgccaaagttcatccagttgcgtttggacccagctagcagcagcactcttcctgccagtggaaatgtgtcagtcacacaaagcctcagtgtcactaacaaccaacatgggcagaaaccacttgcaatgcgtatccggatgtcttacaaagtgaatggtgaagacaggctggagcaagggcaaatcagcaactttccttctgggttgtagtgccacctgtgtctatggggttggggttgctctttcagcgtgctacaggcaaggcgtttgtattcttgttcttgaacattttcacttctgcttgcctgctaatgagtttgtacactggtagttggttttggtcgcccattctctctttatatatagtgtacagtagatggcagcgattaatgatatatcctaccaaaattttcaaccttaggctatctccagcagcctccctgttcttctcacttcttatttcaaactccactcttgtaaacagtatcgcctacagtacaaaacagtgttttgcacgctcgtgagatggccttatgctcccatacacagaaggaatgtgttgtatcgcgattttcctgatgtaattatttatttttctaatcaagctcgtacaggcttattgtgcacagacaaattaattgtttttcatgtgcgttcctttaggttcagacatatttggaataccagactcccccaattcttgccaaaaaataggcagttatcaaatattttcatatggt

SEQ ID NO: 2801 - DNA, 1807 bp, Zea Mays
atgaccaccctcccactctctctctctgctagctacacccatccgcccatcaatctcacccatcgcatccttacaagctaaggaatgaagccccttctcctttgctcttctctctcccatatgtttcacatccattatatatgtattgtgaggcctccacgaacacccaagcaaacaaaaaaatagatacataaagggggaatgaacaaacccccattcccctttaattttattccacttgctttcgcgcgtcctcctcgtgatcccatcttttttcttcccttacctttagtttctcctcctcctctctccgggtggcagacccggccttctctcctccctcttcgtcttccagttcgaagctgtagcggcagctagagctagccacgtgtagagcggcacgactgcagcgtgcgaagaacaaacaaaagcagctagaaaagaagctctcactcactcacaagtagcaaaagatcaaagggaaatcaatcatataccatggtattttcttcggttcctgtctaccttgatccacccaattggaaccagcatcagcaccagccacagcatgagcaactgcaagctcaccatggccagcttccaagtgacgccggaggaggtggaggcggtggcgtcgacgtgcatgcgcaccatcatcagctaccgccgatgccaccttctgctcctggtggggctctcatggctcctcgccgtgacatggcggctgtggtcgccgcgagcggtggcagcacgagcggcggcggtgggccgactggcggtggttcccctatccgtccgggctccatgaccgagcgggctaggctcgccaagatcccgcagccagagccggggctcaagtgcccgcgttgcgagtccaccaacaccaagttttgctacttcaacaactactcgctctcccagccgcgccacttctgcaagacgtgtcgccggtactggacgcgcggcggcacgctccggaacgtccccgttggcggcgggtgccgccgcaacaagcgcaccaagtcgtccaagtccaactcgtcgtcagccgcctccgcttccagcgcgggtgggacgtcgtcgtccacctcgtccaccgcgaccggtggcagcggcagcgccgccagcatcatgccgcctcaccaggggcacgggggacagccgcagttcctagcctcgttgcaccaccctctcgtcggcggggaccactacagcaccggcgcgtcaagattagggttccccgggctgagctcgctggaccccatggactaccaccagttcggcgccggtgccggaggtgccatcgggctggagcagtggcgcctaccgcagatacaacagttcccattcctaagcagccgccccgacgccgtgcaaccgccaatgtctggcatttacccgttcgaagtggaaggccacggcggggaaggttccggcttcgctggtcacatgcttggtgaccccaaggtgtccggctcagccggactgatcacgcagctggcgtcagtgaagatggaggacaacccaacgtccgcagcgatggcaagcagctcaccgagggagttccttggtctccctaggaacctccaattatggggcgctagcggcaacggcggtgcaagtggcaacaatggaggaggcaccggcaacgctgccggtggcggcgacactattcctccgggtagcagctgggtagacctgtcaggattcaactcgtcttcgtccgggaacgtgctgtgacgtgacgcgccccctgaatctgatctgcatgataagctgggtgatcaaagagctagcatgtttctag

SEQ ID NO: 2802 - DNA, 3177 bp, Zea Mays
cagcataaatgtccggcctttagcggcgtccccgatccgatgctcccggccgcctccgcccctcctctccgccgcctccgcttcgtccgcgctgcgcggctgcctcgagctcgagaccgcgtcggctgtataggtgattttctcttccttttggggggatgctgcggagcgaacgctgaggagcgacgacgagttttgattcaggtgtagagggtttctagaatcgatggggtcggagaagggtggagcgaaggttattggcggcggcgggatcttcaacctatttgattggaagcgaaagtcgcgcaagaagctgttctccaactcgcccgaggggtccaagcttgttaagaggagcgaagaaaccttgctatcagggcgtctccacttggtggatgcatttgtgtagggtgatgatgatgaaggaattggtgtatcaagcttcaaggggagcagcgactacagctgtgcgtcttcagtgaccgatgaggaagtgcgtgagatgaaggcgccaggtgtggtggccaggctcatgggcttggacgccatgcccacctcgggcgttccagaaccgtactgcacacctttccgagacacaagattgttcagggacagccacagcctcaagaggagccctgagtactcaatgaatgaccagttcagtcatgttcctcaaagagtcgatggctatatcaggaagccattggatctccgagcaccaaagatgccaagcagcccgattgaaaggttccagatggaagcattgccaccaaggtccgcaaagcacctacccatgtctcaccatagattgttgtcccccatcaagaatccaggtttcagttcagcgaggaatgctgcccagatcatggaggaagcagccaagattcttcagccaagggcacaagccagctctagggagaaaatctgctcttttagcccggcacggattcctttgagagtttcggagccaagggagagcattcctccttctcagagaactgtgcctctgaagccgcaatcatccaggaccgctcctgagctgccagatgtgaggttctctagagcgcaacagatgaaccgaagctggaatagcgaggaagatattgtcatattcagaccttcaattgattcttatgagatcaataatccgagttgttcgaaaaacaagggaaagtctatttctttggcagtccaggcaaagaacaatgtccagaagagggaaggtgtaactggttctgggaggaattcaggagtacaaaaagagcatgatgagcaaagagcaaaccaaccatttaggactcagtctaatctccagagaaagaagccatcgtcgtctggcacttcttcccctgtccttcggcaaaataatcagaaacagaattcgttggtgaccagaggcaaggtgccagcaaacaagaccgtctcaacacaacaaggcagaaaactaatggcaggagattcctcttctgggaagatcaagagtggaagcaaggtatctaaagttggtggcagaaaagacattgtggaaagcataagtggtgatagagaaggatcgtcatcaaacaacaaggacttcccacagaagaaacggttgatagagaggaactccacaaacgagaagggtacatttgttcctgaaaaaccagtgggtaaacttaagaagcaggttcaacctaatgttgttatggatgagcacattaagtggaacaaggaaagtaaggatactacagatgtcgtgtcatttactttcacctcacccttggtcaaaccgtcggcaggactgtccagactggtgggtaagtgggatacaagaagcaaccttgatatggatgcaggatgtgataaagatgattcagataacaaggttgaaggtctgtcatcagtggggctgaactttgtaaatggtgatgcattgagccttctcctagaaaagaagctgaaggagctaacatcaaaaattgatccatcaatcacctttacgagaggtgacacatttgtgcctgctacttttaccttggaggaaccaccaacctcttcatgcagcaattggggctcggaaagtggagtatttgactgtagcccttctgaagtcaaaccttctcaatatgattactgcccttcagcaaaaggccaaattttccgaggcagtaaaataaaggtggaagaacaagaatgcagcagcataagtaatgcaaggaaggaacatgaaaatgaagagctaagtcccctatctgtgcttgaaccaacctctctaagtgagagttgctggtcttccgagtgttcaggcagcagcggtgggggtaagagttattcatcaatttttgatgttaagaatgccaaagggaatttcttgattgacccagcatcagttgatatcgaggcaaagacaacaacagactcagcctcttccgcatccgtagatacatcagatatttcagatgtcacccaatgttctaaaacatcaagacacacagagctggactacattgcagacgtgttaagcagtgtcaacttgacaacagatgaactgggaccactctttgtcgatcaggatagaccagctttggactcgtccctcttccagaaattggagaacatgcatgtgtacaacaaacaagggaaagagcccttttgccgtggagggtacaggcggctgttgttcgactgcgtaaatgagtgcctggagacaaggcgcacggcctacttccgggcaggatatgcagcatggagcaagggagcagcagcgctgatccggggcgttgaggcccaagtctgcagtgagatcaccagctggaagagcatgggagactggacggaggatgagcttgtcgacaaggacatgagcagcgggctgggcacatgggtcgacttcctggtggaggagttcgaggctggtgtggaggtggagaaccacgtactgggctcgctgcttgacgaggtcgtcgccgacatggtcgtgggacgccacggcaggagtgtaaatttgtagtttgagatgaatcgtgtggttgttggtctgtaattttgctgttacatatcccctatttattctgtcaccccagacatgttgttcagaacagtgataaatgttgtttacccaatgagatagatagttttcacttttcagctcgattgctgaatctgcttgccctgcttgacatggtttctgagtttttt

SEQ ID NO: 2803 - DNA, 1404 bp, Zea Mays
cgttcacactcaactccctcgattagtaataacaggaaaaccatccgccggaggccggagggcagattctccaccaccgcctccaccccgccctcacgacgcgaatctgcggcgaacccccctctcgtattccttctcgccgccctgccccgagcgcaccgtttagaggccgccaggctccggcacccccgcccgcccgggctcgcctggggtcgggatgccctgctgcccgccgtcgctgctcggagtcggcccacggctgcgctccttcctccgcgactacgacgcgctccagtccctcgccctcgtactcatctacctccagattggttgtgcactgatcggatcacttggggcattgttcaatggggttcttgtgatcaacctggtgattggtctatttgctgttgttgcaattgagagcagtagccagagacttggtcggacatatgctgtccttctcttctttgctgtcgtccttgacgttgcttggtttatactcttctcacatgctatctggactattaatcctgatgataagtatggtcaactgtttgttttctcactcagacttgcattgtggatgcaaatcattgggttttcagtcagatgatatattagggggttcaatctatgatccttcttactactcgtcactgttcgaggatgttcgaaacaatgcatgcaatcatcagggtgataaacaaagtggtagtaatgacagtggttcaacatccgcgggccagtcaccacgacttaaatcttttgcttgtagatctcttctggctaatgatgtggaaagtggactaagaagaccgttgaactcctaggataaaacagcgggctcatgttgaagcagttcatttctcggaccagtgggagggggctgtccagcgaaaggagcttggcaaatactgtaactgtgacttcatgtgggcatccacagcagtcttggcgccattttggagcaccgttcgtactcagcgagctttgagttaagccggatgtttctgcaaagagctgttcaatgttggtgttgcatatcggtttatgtcatgcgatatgtttactgctcatcacggtccaatttttctgacctgccttcctgtttcttttagctaccaaggaaaatgaagcaggtagttcattagttatttagtaaattggctattttttttctagccgtagcttgccagctgcttctcttcgagcattttggtcattgttcatagtgctgtcatgacaaggagcacatctctagatcagtaaaggaaagaaatgtaaatctcattcgtttctggaaagaggtgaaatgcatgagactcgtttaaaacgttgcagggttatcacatgaaactgttctggccccacgtatatagaaaaaataccaggagaagtcaacca

SEQ ID NO: 2804 - DNA, 1492 bp, Zea Mays
ctcacgctgtcgccgagaaaaactcaggaacccaatcagccgacggaatctcacctgctctgctcctcagccccagcccaggccttcgctctcgctgccctgagccctccgcgttccccgcccgccacgcgatgccggcgtgggccgaagcggcgctcgtgctcgcctcaccatcccccgccaccgcctcctcgaccacgtcatcatgtggcgccaggccgcgcgccgccgtggggtccgtcaggctcttctgcaagggattcccttgtagcattcgttccaaagctggattccagattcataattaccgtacaaggatgtttaagattaaagcaaaagcagaatctgttgatcagcaacttgaaaatcttcaatcagagaaatctgcccaaagtgaagaagcctcaaaagttccccaggacctcctctacaagagaattgcagaagtcaaagagaaggaaaggcaaaatgccttagaagagattatctactgttgggttacatataggttcatggaaaatgacatatatatgacacctgcattatcaccagggggtggccctgtacgtgacatatccgcattgcctaatcaagaagacaaattgcgaaacatacactccgcagacgcctttgagatgatacaaaaccatctcaatcttatcatgggagaaaagatagcatcaccgcccgatactgttgttgagatcagcaacttgaatcttggaaagctgtatgcagcatccatcatgtatggttactttctgaagagagtggatgagcgattccaacttgagaaaactatgaagactctcccaccaaagcccaaccagcagatagtatttgaaaacctacagcctaatccattctgggatatggagtccttagtacagattacacctgatggggaggagataagtttggacgatgaaaaatcaaatccaaacaagttgaggtcttatgtctcacaactggatgctgacacattgcaaagatatgctactatcagatcgaaggaagccgtctcactgatcgagaagcaaactcaggcgttgtttggacggccagacatcaaagtattggacgatggttcggtcaatgcaaaggatggcagaatgataacaatcacatttacagagctcaatcatctggtcttggaggcagttgctttcggttccttcctttgggaagctgagagttacgtagaatcaaaataccattttgtcaacagttgaatgtgccttttcttatttgaattttggaaatggtttgtgtacatgtgatagggtaggatccatatctgatctattttttcagtgtattcatggttcttgctcgctatcagtaacagccaaagcatcaccacccatgaaccatgcctgtaacaggtttgagatttttcatcaaaggaagcgggcctgatccatagtgtaatctaacaggcaagtggaaattaacaaacagttgatgttttccaaaatcactagatcgtgct

SEQ ID NO: 2805 - DNA, 1793 bp, Zea Mays
caaaaatatatctgcattttattcaacactgggattcccttgtagcattcgttccaaagctggattccagattcataattaccgtacaaggatgtttaagattaaagcaaaagcagaatctggtgatggctacacacggcttgctccacttagatttgaatctccaagtggccagcttctgattcaaatactacaatcacaccctcatcttatccctgcaacagttgatcagcaacttgaaaatcttcaatcagagaaatctgcccaaagtgaagaagcctcaaaagttccccaggacctcctctacaagtaagttctctcaattccttagaactgtttccttcaaatcagcagcaagcactcatatatcatacctgctattttgttcacaatgttttatgttaagatgtgaaatctggaaggcaattatccatgaaaaattatgcgcatttagtctcacgacattgaacaaaatggtttctgtatgcaaaaggcacagttcagacaatatataatttggaagaacagaaacagtgttggcagtagagatagggggaacaaggtggagctaagtagattgactgatgagatgatagcctaccataacttgcttgggactagaaggctttgatgttgttgttgtaccctccattgaatcatgtaaatatagtcatagtcacatcaatgaaacacttaacacttcactaattggtgataagctaattgaactacaggagaattgcagaagtcaaagagaaggaaaggcaaaatgccttagaagagattatctactgttgggttacatataggttcatggaaaatgacatatatatgacacctgcattatcaccagggggtggccctgtacgtgacatatccgcattgcctaatcaagaagacaaattgcgaaacatacactccgcagacgcctttgagatgatacaaaaccatctcaatcttatcatgggagaaaagatagcatcaccgcccgatactgttgttgagatcagcaacttgaatcttggaaagctgtatgcagcatccatcatgtatggttactttctgaagagagtggatgagcgattccaacttgagaaaactatgaagactctcccaccaaagcccaaccagcagatagtatttgaaaacctacagcctaatccattctgggatatggagtccttagtacagattacacctgatggggaggagataagtttggacgatgaaaaatcaaatccaaacaagttgaggtcttatgtctcacaactggatgctgacacattgcaaagatatgctactatcagatcgaaggaagccgtctcactgatcgagaagcaaactcaggcgttgtttggacggccagacatcaaagtattggacgatggttcggtcaatgcaaaggatggcagaatgataacaatcacatttacagagctcaatcatctggtcttggaggcagttgctttcggttccttcctttgggaagctgagagttacgtagaatcaaaataccattttgtcaacagttgaatgtgccttttcttatttgaattttggaaatggtttgtgtacatgtgatagggtaggatccatatctgatctattttttcagtgtattcatggttcttgctcgctatcagtaacagccaaagcatcaccacccatgaaccatgcctgtaacaggtttgagatttttcatcaaaggaagcgggcctgatccatagtgtaatctaacaggcaagtggaaattaacaaacagttgatgttttccaaaatcactagatcgtgct

SEQ ID NO: 2806 - DNA, 2490 bp, Zea Mays
gctactttggccagtcaaaccaaccacgggccaccaccacgaagcaaagcagccaaggcgagtcaccctgcccggctctccatcctccaggtccagggctccagcctccactctccaggccacgggggcgggcgcggggcgagtcgagtccactgtggcaggggtacacgggcctgaaaaggcggctgcggcggcgccaccaaaccgctgccgcgcgagcgccgccaccgaacgcgccccgccggccgggcctcccctctcgcccgcccgccccaggcgtcgcgatcgcccccgcgggcgctcgctcctcaaataggccgcgagggatcacggcccgagcggcgtcgggggaggttcgtcgggttgacttgggcttggatgggcgggaccagcgcgagcggccggcggaggtgggcgcggcggtcctgccggacgggaggacaagccggtggggttgtcaggcggacgatcgcggcgccaactgctccgagggtaaccgaagggtttgctcatgtggacaagcaacggcgtgttcatggagcattatcagatttcagatgcaacagtggatcaacagttcatctttctttggatatcgaggaattcaagcataagggctcccacaaatcttctgttagatgtcttcctagttcacagagaaatgtaacagaaattagtcacatgcaacctgttgcgaggggacttcaagtagataagagcttcagtgataaagggttgtgtcatgcgagcagaactgtttcaggaatgcccattcgacctaagtattatctcagcagtcccaacaacaatttgaagagtcctcccactgtaaagagttgtagtcagatgagtgatttcagttatcgactggtcagaagtgctaaaaggtcagcttctccaggaatgggtttaaccagcacaaactactccctttatgagaaaatgtctttgctacgtcaacgaaggcatggtgataatcatcagaaccaaaaccgtatcaatgccttgaatcgacgacacaaaatcatgaatcctaggggagcagctgatctgctaagtaaagataaggttcatgaacaccttaattcctcattggaaagacattcacaggctttgttaaataatgcattgattagagaaaagcaactgtgctgttcagatatactcaatcaaaaagcacctgaacagatatggagctccgtttccagtgaatctgagaagatattatgcttttcctctggtgacagcattgatgatctgcaaggatcgtattcaagtgaaactagtgatagctccaacttatcatctctgggtgcagtagctggtgatgaatggaatacagccttcaagaaggtatactaccctcagactgcatgcatggactctacatctgtcatgtacactaaagaagtaggtcaggctagcccaatatctgttcttaagcctctatctgaagattgctctgattctgaaaacatcaggcgagagcctgcagatccatatgatctccagctgagactggagcttggcacatttgcaccaacagaaactgctgcggaggcaagtagcattggcagaactagtgactgtttatcctctgaagtgcagccgagcgacgacaaacccatacagcttgttgaagacattctcgaagaactggaagacgatgaggaaagggagttctcttacttgctggacatactgattgcttctggaatccatggaactgtggaggatcaaatgtacaaggtgtgccagtctaccgagtaccctgctagcgacgatgtgttcgagaaggtggaaaagaagtacaccaaagttgtccagtggtcaagatcagacaggaagcttttattcgacatggtgaacacgatactgtcacagatcctcgccccatgcttgaacatgcgaccttgggtcaacactaccaggaacttggctccgctttggggcgcagagggtctcctagagaaagtcttgcaggtgctaactcagagacgggaacaactcgcgcccagtgagactaagccggagaagaaagggttagatccgaagtggccagatttagcagactggatcgacagggcaggaagggacattgagagaatgattaaagatgatatgttggaagagctggcccttgagctactgttcagttaggttagggttccacggccgtagtaggttttattacagcagtacagatcccttgttttcttatctgggttttttagtcagttatacttgttagtagtagggttccatggccgtagtaggttttatgggatgtctgtaggaaaattcttttctgcctcggaaaggagtggggtttgtaagaatagaagtctttcctgtcgagttttgtcggctgtgagagttaaagtctgtaaatgagggcaaattgtagtccccggggcatttgtatttggattggactgttcttgaaaggaagaataagcggcatgttctttttgtctaaaaaaaaaaaaa

SEQ ID NO: 2807 - DNA, 2492 bp, Zea Mays
gccaccaccacgaagcaaagcagccaaggcgagtcaccctgcccggctctccatcctccaggtccagggctccagcctccactctccaggccacgggggcgggcgcggggcgagtcgagtccactgtggcaggggtacacgggcctgaaaaggcggctgcggcggcgccaccaaaccgctgccgcgcgagcgccgccaccgaacgcgccccgccggccgggcctcccctctcgcccgcccgccccaggcgtcgcgatcgcccccgcgggcgctcgctcctcaaataggccgcgagggatcacggcccgagcggcgtcgggggaggttcgtcgggttgacttgggcttggatgggcgggaccagcgcgagcggccggcggaggtgggcgcggcggtcctgccggacgggaggacaagccggtggggttgtcaggcggacgatcgcggcgccaactgctccgagggtaaccgaagggtttgctcatgtggacaagcaacggcgtgttcatggagcattatcagatttcagatgcaacagtggatcaacagttcatctttctttggatatcgaggaattcaagcataagggctcccacaaatcttctgttagatgtcttcctagttcacagagaaatgtaacagaaattagtcacatgcaacctgttgcgaggggacttcaagtagataagagcttcagtgataaagggttgtgtcatgcgagcagaactgtttcaggaatgcccattcgacctaagtattatctcagcagtcccaacaacaatttgaagagtcctcccactgtaaagagttgtagtcagatgagtgatttcagttatcgactggtcagaagtgctaaaaggtcagcttctccaggaatgggtttaaccagcacaaactactccctttatgagaaaatgtctttgctacgtcaacgaaggcatggtgataatcatcagaaccaaaaccgtatcaatgccttgaatcgacgacacaaaatcatgaatcctaggggagcagctgatctgctaagtaaagataaggttcatgaacaccttaattcctcattggaaagacattcacaggctttgttaaataatgcattgattagagaaaagcaactgtgctgttcagatatactcaatcaaaaagcacctgaacagatatggagctccgtttccagtgaatctgagaagatattatgcttttcctctggtgacagcattgatgatctgcaaggatcgtattcaagtgaaactagtgatagctccaacttatcatctctgggtgcagtagctggtgatgaatggaatacagccttcaagaaggtatactaccctcagactgcatgcatggactctacatctgtcatgtacactaaagaagtaggtcaggctagcccaatatctgttcttaagcctctatctgaagattgctctgattctgaaaacatcaggcgagagcctgcagatccatatgatctccagctgagactggagcttggcacatttgcaccaacagaaactgctgcggaggcaagtagcattggcagaactagtgactgtttatcctctgaagtgcagccgagcgacgacaaacccatacagcttgttgaagacattctcgaagaactggaagacgatgaggaaagggagttctcttacttgctggacatactgattgcttctggaatccatggaactgtggaggatcaaatgtacaaggtgtgccagtctaccgagtaccctgctagcgacgatgtgttcgagaaggtggaaaagaagtacaccaaagttgtccagtggtcaagatcagacaggaagcttttattcgacatggtgaacacgatactgtcacagatcctcgccccatgcttgaacatgcgaccttgggtcaacactaccaggaacttggctccgctttggggcgcagagggtctcctagagaaagtcttgcaggtgctaactcagagacgggaacaactcgcgcccagtgagactaagccggagaagaaagggttagatccgaagtggccagatttagcagactggatcgacagggcaggaagggacattgagagaatgattaaagatgatatgttggaagagctggcccttgagctactgttcagttaggttagggttccacggccgtagtaggttttattacagcagtacagatcccttgttttcttatctgggttttttagtcagttatacttgttagtagtagggttccatggccgtagtaggttttatgggatgtctgtaggaaaattcttttctgcctcggaaaggagtggggtttgtaagaatagaagtctttcctgtcgagttttgtcggctgtgagagttaaagtctgtaaatgagggcaaattgtagtccccggggcatttgtatttggattggactgttcttgaaaggaagaataagcggcatgttctttttgtctgtttctgatgagtcgttctcagaaatttgataaaaaaaaaaaaa

SEQ ID NO: 2808 - DNA, 1813 bp, Zea Mays
cccaaatatgctactggattgaactaaagggcataagcccgtggatcatgtgaaagggctacatttcaatctctcagacactagacactacctatctactccaagatccgcggcggcgtgctggcctactctaagatccgccggcgcgtcgtggcggctcctccgcgtcccgcctccgaggccgcgggcggcgtcaggctgatcggggtggcgcgcggcgccggggagcgccccatcgtattcgtgcctctcaagaggttcgcggacgcaggtcggaccactgccgcgcccttcctcttcctgccggccgccgcactcccgccagcgccgtactacttactacctgcatactgtattctgtagtagtatgaaaaggtaaaggcggcgtactgctatagtatctctgcagaatgttcggaggaggagtacaccaactgaaagaggtttaggaaagttgcaccgtggatctagaattctagatgcattagtgtagcctacagtagccctgtacacacataaaggcatttttcttataaaattgtctcgcaaaatgggatttttttgtgctaattatagggtgctttagcgccacctgggatttttttgtgctaattatatgcagcttccatagaccaccacaggcattcccgcatgcagttcgctctgaatgcctcctttcattctattactatccctgaacgacgacccatctcagggaaatagccattaaatgatagcagccttttttaaagtatggcttggtttgcgatgttattatggttcgaaaagttgctctattttagtctcatttattttataaattgcagtactaaactgttttagtctatagttcctttttagatgactaaaagggattaaacaaaaaagacacccgtaaattaatcagtcgttaaacagtgctagtactatgcatttcatcgcgtaaattaatcaattgaatggtttcaattggtgattttgcagcctaggccatggagggggtatcatcagctccagaaatggacgaggctatctcaactgaccaatcaagcagatcaacaaaaagaagggctaaagtgtgggatcatgttgattcagagctaatagatgggaaagagaaggcggtttgcaaatactgtaaggcccacttatcttctgctgcgggtaaaggctaaggagttccttggtgcttccggtgacaagcgaaaggaagtcaattaactctgaatcagtggttctgctgcaaggttacacacaacattttattgaatggaaagaggacactcggtgaccacaagatcatcagatgatcatttgttgagctctggaactaaatcctctccgcaggtggtaaccaggcgggttcccatccgagttccgaggtcactgtaatgctaaattgtcaagttcagttatctgaattcagtttgagttataattctcatcaagcatcaatgtcaccaactgtgtagaaatactgaattttagcatggagcgtctttataaacattttagcatggagcagtttctcatcgatcatggctgtcaagttctatttctctacacagttgcactttgtggttgttttctatcatttgtttgtgagcccatggattttactaatttattagcttgtggtggtgcttgcttgtatatgaaggcccttggattggcccgtggatttttaaaaggatcgaggcggattaggatgtcggggcattaaaaaacggattgaattgagttgtatcaaatcaatttggatttaagtagggctgggttcactttttaaacttataggattggagtggggttg

SEQ ID NO: 2809 - DNA, 850 bp, Zea Mays
ttatctgtttccaccgtcccgctgaacccgcacccaacagaaacgcgcagctttcctaacgcgcgcagagccgccttctcaacctcctcccggacggcacgctctccgcagcttcctcgccatctcatccacccataccgcgtgcagcttcttcaacctctccctccctccgatatctcgtctcccatcctacggcggagccctcggggacaaccacgagtgcctaagatcccgtcctctgcgttgaccatcgagggatcgccatggcgttgagggcgtcccccgtgtcgcatcgcatggcgccgaccgccgagggccgaggcagcgccactgccgctgttcgcgcggaggaggatggcccgtggggtgtaagtggccatggcgtccaccaccatcaacaggtgagcacagtggatccctcgcctctcgctgtcttcctgacctacagttcgaggcaagtcgcggcgccgtcgaccccttcgcgggtgccagagttactggacttggattatgcctcagcagttagcaggatctgctgacagaaagcagttggcgatggagcaactgctgtaagagagaagtgatcaggatccatatggccggccttggattgtccagccgtcttccatgtcgccccgcacaccatctttagattgttttgccagtgctggtgcgcagggagccgtaactgcaggtcatttcggaagatgccattctttggacattgaaaagaagcatgttaatttgatagatgagtagtcacaaaagctaatatccagtgggtagtttgatggaaaggaactagacagggcatctgagttgggccaggaagctgaaatgtcttttactg

SEQ ID NO: 2810 - DNA, 1414 bp, Zea Mays
acccaacagaaacgcgcagctttcctaacgcgcgcagagccgccttctcaacctcctcccggacggcacgctctccgcagcttcctcgccatctcatccacccataccgcgtgcagcttcttcaacctctccctccctccgatatctcgtctcccatcctacggcggagccctcggggacaaccacgagtgcctaagatcccgtcctctgcgttgaccatcgagggatcgccatggcgttgagggcgtcccccgtgtcgcatcgcatggcgccgaccgccgagggccgaggcagcgccactgccgctgttcgcgcggaggaggatggcccgtggggtgtaagtggccatggcgtccaccaccatcaacaggtgagcacagtggatccctcgcctctcgctgtcttcctgacctacagttcgaggcaagtcgcggcgccgtcgaccccttcgcgggtgccagagttactggacttggattatgcctcagcagttagcaggatctgctgacagaaagcagttggcgatggagcaactgctgtaagagagaagtgatcaggatccatatggccggccttggattgtccagccgtcttccatgtcgccccgcacaccatctttagattgttttgccagggagccgtaactgcaggtcatttcggaagatgccattctttggacattgaaaagaagcatgttaatttgatagatgagtagtcacaaaagctaatatccagtgggtagtttgatggaaaggaactagacaggtaaccctatttttccaaccagtggtgcgctttcgtttccatataaccgttgtgcgttaatattttatcaaataatttatataccgtcgcaacgcatatatattctactagtataactttatttttcagctctgtttgtgaaggagttgacttggtcgcagacgttatggtagaagtgtttgacaaaagagcccggccaactgaatttcctaagcctgagggctgatactgagtttggaccggcgataactgggcattttcaaaaatgtttggaacaaaactcttgggtgaattgtgaaatcaaaattttgagtgtacaatttcagaaaagaaaaaattcgcccccagcgaaaaccagggaatttccgaaatgtcgggaattctagttcaaaagcaaatagggttttaaaaagcggtataattcatattaaaatgccaatttcggaaatatatatatttcggacccaccaaaactcaagaaaatttcggagatttctgcccgaaattgggaaccctgctctcgaaagcttggccttcaaaactcgaatttttaccaataggttccacaaatgaaacgtctactcaaatttttggagaagacaaaagtttgaacattccatcatgtatatttaatatctaaggttacatt

SEQ ID NO: 2811 - DNA, 1643 bp, Zea Mays
ttttcagttcatgctatcttattgagtttaagtacgctgttagatctattaattaacaatttcattagccaaattgtcaagatcccattaacaaaggtatgccatttgagtttgatggtatgtttgatcctttaccttctattgccttcgcaacataaattgcaacttttttggtacatatgatgttgcatacttccagtttccattggtttgaccttgacacgaaatagcaacttcccaattttctgcccccctttctctgaacacaatattaacgcagtggttggctttcatttagtcagttctactcccaagacgacttctagagcgccaagttgatgcttatgttctccgaatgggactaaatatctatgggtttcatcttcctgataatgaaagaggaagtgccttcttttctagggatgatttcagtggagaacaaactaaagaagagaacaagtatatggcattgtgctccacctggagaaccaaggaaaggcagaagcagaaaggacaagcaaccaaacgaatagtgttactgactagtgtgacaagccactgaaaaagaatcagatccatcagattcaagctggtagaatctccgacgcagctgctccattagctgtgcccgtctcagtggctacatggtgtcgaaggtttctatggtcacaatctacaatgttagattagatgcacctctcgccaggctgaaggacgtaccagttactgaattattttgtgtggatgtcgcgcttgtactcgagaagacgatgcatcaccgggcaccggacgcaccaattccaccgcccgaggcagatgcaagtgaaggcggctcaggactcatcctgtccgccttgctgtatccttcgcttgccatttgctgtacaaagaaaaaaaaaggcgtttctgacagtgactttgaaatcttgtcgcgagcttactagttggctggtgctgtcatgtcaggaaacggatgattgcagattaccgaacattacctgttgggaagggaaaaaacaaacggtgctcttgcatccgacgcgattacaagttggcagcatcttatgccttttggcgatcaagtccacaggagagtgctcattgcatctaaaacggtgaagtgatgggtgctgtggcattcaggctgaggcgaaacctgcgaacctactgtatattcaggtatgttttagccaaccttcagggctcagtgcctatcctatggtaccattcagaatcatagtgcctttagttagttgatggtgctggtggttggaacacaataattacctgatcgccaaggcctgcaactgagccctctcaagattgttaattccatgtaaagttctcctgtggatgttgcattgggtggggggctagttggagacaaaatcttctcctacctttttctcaagaaccctagaaagaaacatttctcaattgtgatttgttggcgcgcgcaaaggggaaagaaaagaataggcaagacgacggcaacttggcagaacagtggcggcaagtgcgctgcagcggtggctcagctgtggtgctccttgagttaatattatgggtcaattttctgtatgtcatcgaaaaatatattcgtcccatatgttatacaaacaaaaaaaaaatctatgtcactt

SEQ ID NO: 2812 - DNA, 1675 bp, Zea Mays
ggcgaaattcgcaatattcattcatcatcagtaaccaaaatttcgactttttttttaaaaaaaatacactataaccgagagcgtctgaaaaatgggaacaaactagcaactgaagcgtactaacaaaaagcgcccgattcgcctcgcaaaatcgccgccgccatcacctacctactcacagaagttccgccttcctttcctccggcgcgcgccgcgcctgtcgccatggtgaagcgatggcttcccctcgaggccaaccccgacgtcatgaaccagccggtgctcgcggtcctacttctctacccccaggaccggagcaaggagtcccaagcttcagctacctcgtcggtggagaccaaggagcccagcaagaacgtatatttcacaaagcaaactgttgggaatgcctgtggcacagttggtattattcatgcactggggaatgctacttccagaatcaagtgaggggtcatattttgatagattttataaacgaactgctgacatggatcctatccagcgtgctgcatttcttgaggaggacgaggaaatggagaatgctcattccattgccgctactgctggtgacacagaggtttataacatgtgcacagtacttagttctttgttcaagatttgtgggtgttattctttttgatgaaatgtatgcagttaattcttataatttttgttgtcagtgcttctcagaatcaaagtggtttccggttaccagtatctgagaactgactgctatcacttgtttactcatctggaaaagaacagtttgctgaccagctagagttacaggttcctagccagattgaaatctatatgctagtagtatatgcccctttactccttccgttgcatttgtgtgcctgaatatctgagattcatgttgaattttgttggtcatgtgtcattgtaagtgaggattggacgtgtcaattcacagtatcagctgtaacagtcgatattaaagaactgtatcagctgtaacaagtcaattagttgaaactatggtctgagcttatcttatctttgattaccatcagtgctcatggatcctatattattatgcaggccaaggacggtgtaattgaacattacatttgtttctcttgtgtcgatggagagctttatgagcttgatggggggacatcacagccaataccccatgggccttccactcctgataccttgttgcaggatgctgcagaagttataaaagcaagaatcgccatgtattcacagtcaaacaacttcaatgtcatggctctttcaggcaaagcgatatagcattatagcactttcagtcataggcactcgatatcccacatttgctttgcagcagccttagtccaacactgcagtatgttctattgttttcttgccttcgttttattatttaaacacgttaaaacaagataaataaaagcgtggctacagaaaagttcccgttggtagtatcacttctcttaagagctaatgtgccgtttcgttcacacaaaatgtaatgtaacgtaaatggattcacgctggaataccggtggtaaagtttaaataagccggtatctatttctagtgttatattaattactgttaggcttaaaaaaacataatttaatgttatcagttacacattacattaccaatatgtgaatcaaacgttgtt

SEQ ID NO: 2813 - DNA, 2495 bp, Zea Mays
acctcagctcagacgcttcgcgacggccctgctgctccgctctgcgttccccgttcctttcctcgtgtgctctcctttcctcgtgtgcggcacgccaaggcagcaagcgatccttccagaatgctcctccgcgtcggccgccgggccgcgctcctcctagccgcaaccgccgccttctcgcgcctccgcgatcccgacacagccgtctacgtttcggcctccccgccgcagccgccacgccaggccttttcctcctccgccgccgccgagggcctccgctccggcacctgcctcttctccccgtatctgctcccatatccgttccaagggttcccagtactgaataccttcacgtctgcatcggtttcacctgctaacaatggcgaccaaggttctgacggaagctctggtgatccaagatgctgcccagcgtgtctaggcaggaattcgattgccaaggcggcatctgcagttggtcctgctgttgtaaacatttcttctatgcatgatatgcatggatgggtaaacgagcagagcattggatctggaactataatagatccagatgggactatattgacatgtgcgcatgttgttgcagattttcaaagcacaaaagcaattgtgaggagaaaggttagtgtgactttacaagatggtcgtgaatttgaaggtgttgtccttaatgctgaccgcctgtctgacattgccgttgtgaagattaagtcgatgacccctttacctgctgccaggcttggatcatcatctcaacttcagccaggtgactgggttgttgctctgggctgtccactttctcttcagaacacagttacagctggtattgtcagctgtgttgaccggaaaagcagtgatctgggtcttggaggattacgaagggagtatcttcaaacagattgtgctattaatcagggaaattctggaggacctcttgttaaccttgatggtgagattattggagttaatgtgatgaaagttcgtaatgctgatggtttgagctttgcagtaccaattgactctgtcattaaaatagtagataactttaacaaaaatgggagagttgtaaggccatggcttggtttaaagatgcttgacctgaaccccatgatcattgcacagctcaaagaaaagtcaagtacttttccagacgtaagaaaaggggtgcttgttcctatggttacaccagcatctccagctgaacaagcagggtttcgtcctggggatgtggttgtcgaatttggtggcaaaccagttgagagcatcaaagagtgacattaactgtgataccggaggaggcagatgccagcagatagacctaaactatctgctgggaagctgatctaaagccaaaggggaggattttccatggaaactccaatttttctcaagatataatacaagatgccgtggacacctgtagacaaaattttatgttgagttctgtatgtggccaaaggatggttgacaggaccacccgaaaaaggggacgaagataaataggaaatatgtattattagctccatgctcagttaaggtacatgttggttttggttatctgcggcataatcaataacggtaggactgcattctacttcttcaaattggatgatgctgtcggttgaagaataccagctccttggttttctcgcaagaacgttttactatgttttgccattctatgcagtactgtgcttagttagtcgttgacacctggaagccagttgatttcatgtatagtaccaatcatatcttccttacccgtgcaaactccagtccagacggcatcgtaaagtgatcgatcgagcagcaaaccagtagataagatggcaactcgatttgcaagatgtaattttcaagtccactgtgtatgatgtcaaggttttgtggaatctatgaggtcatgaatcttgcactcgacactagcaaagacttcaacggcggaatgatcggcgtgtatgtctgtgctgtctgttcgggagcaatgctgtacggaagtaggtctgctaggattttcaggtcgatggatcattggagctgcgtgtgtgtgtgtgtgtgtagggcacactagtaagacggacagatccgctgtcttgtgcagcacccgaaaaccctaggtcaatttcccattggttgttggatgacaacatcatggcttttttgttgggacgtccctctcgtgttccatcattgggagggaaatatttgcccgtactactcctgtctacctgtagtcctcctgtaatagtatggtgtaccggtccgatcgatcggcttgcgtctcgcagggaatctttccacgcttttctgttttgtttttttttttctcgggggggctaataatgcagtgcgattggtggacttgctgcgtatttgtatttatgtatgtgggcctgtattgtaacgtgtgctgtacacgtaaacgagagatctgtagtgcagactgcaggatcaggaagtttatgttggttggttttttt

SEQ ID NO: 2814 - DNA, 2765 bp, Zea Mays
tttccttcctcctacctcagctcagacgcttcgcgacggccctgctgctccgctctgcgttccccgttcctttcctcgtgtgctctcctttcctcgtgtgcggcacgccaaggcagcaagcgatccttccagaatgctcctccgcgtcggccgccgggccgcgctcctcctagccgcaaccgccgccttctcgcgcctccgcgatcccgacacagccgtctacgtttcggcctccccgccgcagccgccacgccaggccttttcctcctccgccgccgccgagggcctccgctccggcacctgcctcttctccccgtatctgctcccatatccgttccaagggttcccagtactgaataccttcacgtctgcatcggtttcacctgctaacaatggcgaccaaggttctgacggaagctctggtgatccaagatgctgcccagcgtgtctaggcaggaattcgattgccaaggcggcatctgcagttggtcctgctgttgtaaacatttcttctatgcatgatatgcatggatgggtaaacgagcagagcattggatctggaactataatagatccagatgggactatattgacatgtgcgcatgttgttgcagattttcaaagcacaaaagcaattgtgaggagaaagattaagtcgatgacccctttacctgctgccaggcttggatcatcatctcaacttcagccaggtgactgggttgttgctctgggctgtccactttctcttcagaacacagttacagctggtattgtcagctgtgttgaccggaaaagcagtgatctgggtcttggaggattacgaagggagtatcttcaaacagattgtgctattaatcagggaaattctggaggacctcttgttaaccttgatggtgagattattggagttaatgtgatgaaagttcgtaatgctgatggtttgagctttgcagtaccaattgactctgtcattaaaatagtagataactttaacaaaaatgggagagttgtaaggccatggcttggtttaaagatgcttgacctgaaccccatgatcattgcacagctcaaagaaaagtcaagtacttttccagacgtaagaaaaggggtgcttgttcctatggttacaccagcatctccagctgaacaagcagggtttcgtcctggggatgtggttgtcgaatttggtggcaaaccagttgagagcatcaaagaggtaactaaagacaactactagtgatgtgtgctatatgacttattattactataccggcagaattccttatcttttccctgttataatatcatatttgaatatcgccatgaaaaagtagctggttagaaccaattgcagtagtggactcgtccttttttgttttttctaatttcaatattccttttctttcaaacccacaattcaagaggaagatcgtattctttttccttttagttgcacaaacacgataataaagtgttggctgcagataattgatatcatgggggacaaggtcgggataccatttaaagttcttgttaaaagagcgaacaatgtgacagtgacattaactgtgataccggaggaggcagatgccagcagatagacctaaactatctgctgggaagctgatctaaagccaaaggggaggattttccatggaaactccaatttttctcaagatataatacaagatgccgtggacacctgtagacaaaattttatgttgagttctgtatgtggccaaaggatggttgacaggaccacccgaaaaaggggacgaagataaataggaaatatgtattattagctccatgctcagttaaggtacatgttggttttggttatctgcggcataatcaataacggtaggactgcattctacttcttcaaattggatgatgctgtcggttgaagaataccagctccttggttttctcgcaagaacgttttactatgttttgccattctatgcagtactgtgcttagttagtcgttgacacctggaagccagttgatttcatgtatagtaccaatcatatcttccttacccgtgcaaactccagtccagacggcatcgtaaagtgatcgatcgagcagcaaaccagtagataagatggcaactcgatttgcaagatgtaattttcaagtccactgtgtatgatgtcaaggttttgtggaatctatgaggtcatgaatcttgcactcgacactagcaaagacttcaacggcggaatgatcggcgtgtatgtctgtgctgtctgttcgggagcaatgctgtacggaagtaggtctgctaggattttcaggtcgatggatcattggagctgcgtgtgtgtgtgtgtgtgtagggcacactagtaagacggacagatccgctgtcttgtgcagcacccgaaaaccctaggtcaatttcccattggttgttggatgacaacatcatggcttttttgttgggacgtccctctcgtgttccatcattgggagggaaatatttgcccgtactactcctgtctacctgtagtcctcctgtaatagtatggtgtaccggtccgatcgatcggcttgcgtctcgcagggaatctttccacgcttttctgttttgtttttttttttctcgggggggctaataatgcagtgcgattggtggacttgctgcgtatttgtatttatgtatgtgggcctgtattgtaacgtgtgctgtacacgtaaacgagagatctgtagtgcagactgcaggatcaggaagtttatgttggttggttttttt

SEQ ID NO: 2815 - DNA, 2826 bp, Zea Mays
ccttggtttcgtggcccgttaccccaccctgcttcctctccgtgggcacctgacgccgcgaccccggccccgagctggctttgccggccaatcggctcgcccgcgccgaccaccgcgcctcttcccctcgccgagatcgcctgaaaaggcaagcgaggccagcccgatccccctccccgcccccctcaagaaccaaaaaagggtgtcatttcgtcctaggatcgcagctcgagctcggtcgctctcgctcacctcgctccctactcgcctgctttccacttcctccgcgctcccgatttcctctccgattccttcgccgactcgtttcttcttggcaattcgttgcgcgggccatcgccccgacggcacctgggtacatcagctacaggacgggacaggtccctcttctaggagaggcttcgccagccgcctcccgcccccgtcactacgggcgccgtggagcggagatccatccggacttggatcggtctcgtcgcgtgaggctcaacccacaatatctcggaagagcagtatcacagcaggcctgcagaagacacagcatggaatgaaccctctagctctcctgttgtgactgacatcctttcagagtttaacaatgaggatattgaccgtgctatagcgctctctctatcggaagaggagcaaagaaaggaaaaggcaatagataaggatatgcatttggaggaggatgagcaacttgcaagagctatccaggaaagtttgaatgttgagtcaccccctcgcagaaatggcagtgccaatggtggtactatgtatcatccgcctcgcgaaactggcaatgcatatcagccacctcgtgaaaatggcagtgccaatggtggaaatgcatatcacccattaccatttatgttctcatctggattcagagcatgcgcaggatgtcacagagagattggtcacgggcgttttctcagttgcatgggagctgtttggcatccggaatgttttcgttgccatgcatgtagtcaacctatatatgactatgagttctccatgtccgggaatcatccataccataaaacttgctacaaggagcagtttcacccgaaatgtgatgtctgcaagcagttcattcctacaaatatgaatggccttattgaatatagggcacatcctttctgggtacaaaaatactgtccttcacatgaaatggatggtactccgaggtgctgtagttgtgaaagaatggagccaagggaatcaaaatatgtattactggatgatggtcgtaagctctgcctggagtgccttgattccgcagtgatggatacaaacgactgccagcctttgtatcttgaaattcaggaattttacgaaggactgaatatgaaagtggaacagcaggttcctctgcttctggtcgagcgacaagctttgaatgaagccatggaaggagagaaggctggtcaccaccatcttcctgaaacaagaggactatgcttatcagaagaacagactgttagcacgatactgagaccaagaatggctggaaacaaaattatgggaatgataacagagccatataggctgacacggcgatgtgaagtgactgcaattcttattctgtatggtctcccaagattgttgacaggttcaattttagctcatgagatgatgcatgcatggttgcggcttaaaggataccggacactgagcccagacgtagaagagggcatttgccaagttcttgctcacatgtggatcgagtcagagatcatggccggatcaggcagtagtgccgcatcgtcatcctcaggatcttcgtcatccacatcatcgaaaaagggcgggcggtcccagtttgagcacaggcttggggactttttcaagcatcagatcgagacggatacttccatggcctacggagatggtttcagaactgggaatcgagccgttcttcattacggcttgaagcgcacccttgagcatatccggctaactgggacctttccattttgaagtagcatggattcatattttgggaaagcttatattatatacatgattttcttccagagttccattacaaccaaagagataaattgtaaaaaaacattctttccagaatccagagatataatatctatgaaggccaaaatgaagtattaaatgattgagatcgatggtcagtctgcccaatcattttgtattctgatcaaactctggaatgaaacaatggcaatctttttatatggtgtcagtttcaataaataccagtaccattttacagtatatatacagttgctttcatgtgtgagcttatctcaaactacttcgtccgttccaaattataaggtgttttaggttgtgtttgttttccttttagattatataagttggattatagtcaaagtgtaggaggataaatatatcaatttgagatcacaaattgtaacacacaaaatcctaattttgggatttaaaaattaaaaaaatattatcctgaaatctaaataagagtattttcttataaaagattaaagtaaaagtatctcataaaagatattatatattagaaagtatttcctcgtaaaacaaaataagtagtaaatattgaagtttttgaatgaacttttaatttgactacatattcaaaatactttcgcagaatgaatatgatgtgtgttgcatattgaacattacctaaataaataaggtaataaataaatgaataaacttaagacatatattttgcatttatgttggagatttttttgtgcaaattagaattctatttgaatttaaacctaattggaattggaaaatatgaaataaaaaggaaaa

SEQ ID NO: 2816 - DNA, 1602 bp, Zea Mays
gccggccgaccaagaacggagtcgcatacacgtctgccgccggccgcgcgtccatcgaacttcgaagccaagattgccaagtcatttcccccaaattcctttccccttcgatcctcccctgcaaaccaagtctcaacgaccatggacgtcttcccctgaccgcgccccactgccccagacgccgtcgcctacatccatgagacttcccgatcttcctgcggccgaggatgtcccagcgcgacgtcgactacagttgcggattctgtggataccctctaaacctttcatcttctaaccgaagcacgtctgaagtggacaaggtatcttgctttcccctcacctggcgcagttacaggccaaaaactaagcttctctgccgaaaatgcggagcatcgatcggctatggatacggtgagccagctgctttgtgcagttttgatccagcaagttcatcttcctccagtacatcccagaagtatttaataaagatccaagcactccaaccttcagacgggacccaaaagcgagtcagagaggagtgcttttggtttgacctgcaagaattggttcaaggttcggaaccttggtcggaaatcactaacattccattgttgttttaaccctgcaatagacaaggagcatgccaagtgcatccctaagacgatggcctagcacaggtggcaattgggtgccctaatttggtggtggtggaactccaaagctgctttaaaattacagatgttggcttggaaagcctttcaaaaggctggcgtgcccgtgctttgaagagtctaaaaccttggttcttgcatgggcatttcggaccaagggatctctggagtctttagcaactgttcaatcatttgcacactaagcattacaggttgcaggcgtctgtctggtgctggattcaaaggctgttcgagttcgttttgttgccttgaagctgagtcttgcatgctttctccagatggtttattggtaaccttgcttttgctaaaagcctctgcgttctgaatctcaggatgtgtcgctacctcacagatgattagcaatagccagtgggtgcccactgcttgaggagtggaaccttgctgtttgccatggtgtccatttacctggctggtctgcaatcgggttgtactgcaataagctaagagtgctgcatatgaaccgcggccggcacatctgtgaccagagtttgctggccctcggcaatggctgtctgtgccttgaggttctgcattaaatggttgcgtcaagatcaccaacaatggcctggctgatgaagtcatatccattggcccttccattgagaacttgttccggctgcattgaggagaaactgtagttaggttttctaagcctggggctaaaagtttagtagccccgtcccattacagctgattatgtgcattgtgtttgctctagtgtatacataacaagacccaccctactcatgtgggaaacatgggcactgggccagccctttaacaatagtgaatcgtaatatacaaatgaactgagcttatgtaaggtgtatttttttcctaatatgctctggcttgctctggtttactggtgcagcagattacttacgaa

SEQ ID NO: 2817 - DNA, 1804 bp, Zea Mays
tgccaggggtccagtgctgtgttttgttggaccacctggtgttgggaagacttctttggcctcctccatagcaaaggccctgaacagaaaattcttaagaatctctcttggtggtgtaaaagatgaagctgatattaggggccaccgaaggacatacattggaagcatgccagggagacttattgatggactaaagagggtatctgtgagcaatccagtgatgcttctagatgaaattgacaagactggttctgatgtacgtggtgatccagcatcagcactactggaagttcttgatcctgagcagaacaaagcattcaacgatcactatttgaatgtgccgttcgacctgtcgaaagtcatatttgttgcaactgccaataagatgcaacctataccccctcctctgttagataggatggaagtcattgagctgccaggctacacacctgaagagaagttaaaaatagccatgaaacatctcataccaagggtattggagcagcatggcttgagtacggcaaatcttcagattcctgaggctatggtcaaactgatcatcgagaggtacactagagaagctggtgtgcgcaatcttgagcggaacctagctgcattggcccgtgcagctgctgttaaggttgcagagcaagttaaaactcttagacttggcaaggaaatacaaccaatcactacaactcttcttgattcgaggcttgctgatggtggtgaagttgaaatggaagttattcccatggggcatgatatgtcaaacacttatgaaaatccatctcctatgactgttgatgaggctatgctagaaaaagtacttgggcctcctagatttgatgatacagaagctgcagatcgtgtagcaagcccaggagtatcagttggccttgtctggacttcggttggtggggaagttcagtttgtggaggctacagccatggtgggcaagggtgacttgcatttgactgggcagcttggtgatgttattaaggagtcagcacagttagctttgacatgggtgagagcaagagctgctgacctcaatttgtcacctgcttctgatatcaacttattggagagccgtgatattcacatacattttccagctggtgctgtgccaaaggatggcccttctgcaggtacttgcggcacatcgttatggaatcaagagagtaattttacgtgaaaggaacatgaaggacttatcagaggttccatcaccgattctctctggcatggagattctgcttgtgaaacacatcgaggacgtactcgaccatgctttcgaaggcggatgtccacttaaatcacgctccaagttatagcatccaactcgcctttgctatggatatttgcttcggaggatcatcgtcaacagtaccacgaatggtcaacagtcagaataagagcctagctctcttgccagcacaggtcttgacacgcccatttttgttaggcttcgcatctgaatgtgtatactggtcagaattcggagagcagtcagaagatctgctcgttcacctgctgggactcattgcatagtttctcgacaccagctgttgatgtttatgcacagatgcaacagaaatcagggaggaattacgctggttggtttctctgtcgtgggtgtatatatgtatgtatgcatgtaatctaatccagggaaatatagctacaacaaggttgtcaaaactaaagacatcgagaaacatcacacgtcctttgggcttgggtgactttattataaatgtatgtacatataacccaaaatgcgcacgtgcgtggtcctgca

SEQ ID NO: 2818 - DNA, 3110 bp, Zea Mays
ttgctggtgccatcagaatgaactgccgctttcagtgacatgcatgcgatgcatgcttttgcttttcttcaatggtgaatgctgagccatgctcgatgggtggaattatggattacggtgttggtgtgggcaccaaatcttcaccacgcagtatggccattgagaaagctcaggaggagctcaggcaggagtctgatgttcgcgatgaatggaggagagaattggaatttctagagaaagtatgcccgcaccaggttatctcttagattatatttctgccttcactgtacctacttactcctatttattgcagggaggcaacccattggatttcaattttgcacatctggaaacggtcggtgtacactctgcttctctcacaaatcaagtagaagcacaaactgtgataagtgacgcgaaaggtagtttttctgcatcacctcttggagattcggtcgagagtaccgacaaaccaggaggttccatgtgccgcgaaaccaacacagcagacaatcttatgcttttgggtggaggtaaaaatgacattgcagaagaaaaggttgtaaaaagaggaaccaaaagattaaatgcagcacaacccaaacattcattgcccagtgacggtcacaaaaacacaaaaaagcctgctgcttctggtttgtcacacctcggtgtcaaaagccaggcatatgttcggcgcaacaggtcaaagccaagtagggagagcgggaatgtcacatctattagatcttctatgatccctgctaaagtctatgagccaaatgatgaaaaggttacagcacagaaaaacaatgcagacgatcatggtgtattgtccgtttctagtataaaacagtctggacctaaccgtgacattgcaccaaagagtatagcttctgatgaccatgcagcaatggagctggatggcattcaaacaattctcgaaagtgaatgtgtggtgaacgacaaagtaaacaaagctggcaataataacaaagctaaacagttgtcatcaaatgacacaaatcatgatcgtttccttgttgggtgtggtgagatagctgctgaagtttcatctgcggaaacccctgatgccaatttaaaagttgttataaagccatgttattctagtgcatctacatatgatgagaaagagtcatgtgctgttcacgaaaaggctgatgatggacacctggatgaatgtatggcccatatccgtgaaggggaacttggtcacagcaggacacttccttgtgttgtagaagcttctacttcacacaatgatgtagtgggcccatcttgtgaaggcactgtgaatattgttgatgaacatgcagatggggacatcaatactgttgcagggaagattgattctcatgaagacctagatagtagtagacattctaacatgattctcaaggtaagtggcacatcgatagatttcagcaggcctgcttctttgaaggaaagttctgatcttgtacgacctgaagccagtaatatttctcatgtgaaagatgaaattgaagtttgtaacagtgcaatagttgcacagaaagacacagagtgcttgtcttctggccgcagcatgaacattgaggaaagtccagtttcggttaggaaaaatagctatgttgggaattcaaactctgcacatcctatatccgtaggcatcgatttgtctgatgccttgtctccaccaaaaaatgatgaatctaacgtggagagtgagattaaaaaatatgagaacctgaataagatggaaaagaaggcctatgaagattctattcttaaaaatgctcgcgttatagaggcaaatattaaaaaggctggtcaacgatctccctgtaacattgctttagagaagaggagaaagagtcactgggattttgtccttgaggagatgacttggatggctaatgatttcatgcaggaacgactttggaaaagtgtggctgcagctcaggtgtgccattggattgcctctgatgcccacgccaagtttgaaaaagcaagcattctgaaaaagcagaaagctgttataaagatcattgcaaagggtatcatgagtttctggcgttcagctgaggctttacagactgctgacaggacagctaaagtgatgccacacaattcaactatgctggaggagatagatccttcgggagtcaaagcaggaaaagaacagggtcacaattcactggaagcgaaagaatccagccagcaacggtcacagattcatgattatgcagttcgatttcttgaatataatagaacagctgatttgcacgtgttgcctgaagctccaccaactcctgacaggctgaatgactttggagtcttgaaagtgtctgatcatctctcagaagaaagtctcttttatacagtagcagcacctggtgcagtgctggcatacagggactctctggaatctcttttcatgtatcacaaggaagatggcaatgctgagctcaacgatgactatgaggcatctgcgtgtgattctgttgcagatttgccccaggagaatgcatacgaggaggatgaaggcgagacatgtacttttctttctcctaaagcatatgttggtggttccatatcgaatatggttcacaagaagaaacatgtaatgccacaaaggattagccttgctaggccatatgaaattggtacctatgtgccttatcaaccatgcatggaaagcaagtcaaggaaccaaccattgttatcaaatggcaaaagacctacttctttccttgcaattcctccaaagcgcacacgcacagctgcaaggcaacaagttgtaagcccgtttcatgctggtgctagtgtaccgccccaagatttctcaagtggcaacacaaactcctaccaagatgatcaaagttcattgcatagtgagtctttgccgtggaggaacatggattttgaatctacagttgattctgatagacaactgccttatgatgctggtgaaatgtgcactaaagtcaacaacaagaaaaaactgaagaactcaggatacaaaattgctcaaaatgcagccaatttgtatgtgccaacttctgcaaagggccatatttatgatccaagaaagcaaatgcaagttg

SEQ ID NO: 2819 - DNA, 1832 bp, Zea Mays
ctgaccccccgcacacaaaccctagtaacctccacctatatagtctcttcccactgcgtcaagcctccattcgcaccaccgccgcgccgcccaaatcacagccaccgccgccatggccgcctccagccgccctctcgtctccgtgaaagccctggagggcgacatggtcacggacgcccccggcatcgccttaccgcccgtcttcggggcaccgatccgcccggacgtggtccgcttcacccacaagctgctgtcctgcaacaagcgccagccttacgcagtctcccgccgcgctggccaccagacgtcggccgagtcctggggtacgggccgcgctgtgtcccgtatcccccgtgtccccggcggcggcacccaccgcgccggccagggagcattcggcaacatgtgccgcggcggacgcatgttcgcgcccaccaagatctggcgcaagtggcaccgccgcgtcaacgtcaacctccgccgcgtcgccgtcgcctcggcgctcgccgccaccgccgtcccggccctcgtccaggcgcgcggccaccgcatcgagaccgttcccgagatgcccctggttatctccgactcggcagagtccatcgagaagacctcccaggcgctcaagatcctgaagcaggtcggcgcctacgccgacgccgagaaggccaaggactccgtcggcatccgccccggcaagggtaagatgcgcaaccgccgctacattaaccgcaagggcccgctcgtcgtctacggcacagaaggctccaaggtcgtcaaggccttccgcaacctccccggcgtggacgtcgccaacgtcgagcgcctcaacctgctcgacctcgcccccggtggccacctcgggcgctttgtgatctggaccgagagcgcgttcaagaagctcgaggaggtgtatgggagcttcgacgcgccgtcgcagaagaagaagggctttgttctgccgaggcccaagatggccaacgctgacctgggcaggattatcaactctgacgaggtgcagtctgtggttaagccactcaacaaggaggtgaagcgcagggagaagaggaagaacccgctcaagaacatggctgctgtgctcaagctgaacccctacctcggcactgcccggaagatggccacccttgctgaggctgcccgagtcaaggcccggaaggagaagcttgattccaagaggaccaagcttacctcggagactgccaaggtcaaggctgccggcaaggcgtggtacaagaccatgatctcggacagtgactacaccgagtttgagaacttcaccaagtggctcggagtgacgcagtgaagcggcctttgagacctagttaagttttgattagttgtgtcgctgaactttgtattgagacgaaatagtattttatcaatctgtcttatcctgcatcttcacaacaagttacctatctgtggactttaaagcctgcatgttcgttttgtttgtccattgccgtgggagcatagtatttgcatgttcgaaccaattatctgaattatggtatggttttgtgcacataatgtctgttcatgatgcttgtggcgtggtgacgtttggccttgtagtagtagtacttccgtatccgtctcaaagataagtgatgttttaggtttgttgttgaacaatcgactaaatttataagaaagaatattcatatttatgatgttgaatggatagaatattggtgttgagttgtatttatgatgttgaatggatagaatattcatatttttgatggctttggttaggagggtactgaggagaattaaatctctttctatttaaaattaaatagaaaata

SEQ ID NO: 2820 - DNA, 2237 bp, Zea Mays
ctcatagagtcaaaagtcattgcagacttgcaagcttccctcccctactatcaggcgaatcatatccatccacttactacgctgctaggctgctacgaacaaaatcctcctaattaagacgggcgtcgttggcttcaaatactgggtctccccgtttctgtccggcggttctgccgttccactgcttttgatttcggagtgtgaacttacatcttgctggataataaagattggattttaagcgatttgggggtgcttgcctgatctccccctgcgaggtactgccgggggattggatttcggggaagttttggtggtttgagattcggcttggccggagcaggaatgacgatcgacatgtccattcccgggagctccgggctgctgaacgctgcggggaagagggacatgaagttcttcagcaacccctacgtgcttgcgctcacgggcgctgcaggaatcggtggattcctctttggctacgatacaggtgtcatatctggagcccttctgtatatccgcgatgattttccagcggtcaaggacaattacttcttacaggaaacgattgttagcatggccttagtcggagctatgattggagctgctgggggtggttggatcaatgatgcatacggtcgcaagaagtctactcttcttgctgatttgatgtttgctcttggctcacttgtcatgtgtgctgctgctggtccttacattctaattatcggaaggctcctcgttggtttgggtgtgggtgttgcatcagtcacagcaccggtatacattgctgaagctgctccttcagaaatcaggggaggtttggtgtcaactaatgtactcatgattaccggtggccaattcttctcctatcttatcaatcttggctttactgagtttgtgctgatgctattcctgccagaatctccgcgttggctttactggaaggatgagaaggcaaaagctattgccgtccttgagaggatctatgaatccgaccgcttggaggaagaggtagagctgcttgctacatcctccatgcatgaattccagtccaacaataccggaagctatctggatgtcttcaagtcgaaagaattgaggctagctttctttgctggggctggccttcaggccttccagcaatttaccgggatcaacaccgtgatgtattacagccccacgatagtccagatggctggtttctcctccaacaggctggccttgctcctctccctgatcgtcgcggccatgaacgccgccggaaccatcgtcgggatctacctaatcgaccgttgcggccgccgccgtctggccctcacaagcttggccggggtcgtggtctccctggccatcctcgccacggccttcatactgcagtcatcatccggcctctgcatgagcgccgccagcggcacgtgccagggcgcgctaggctggttcgcggtggccggcctcgctctgtacatcgccttcttctccccgggcatggggcccgtgccgtgggccgtgaactcggagatctaccccgaggcgtaccgtgggacgtgcggcggcatgtcggccaccgtgaactgggtctctaacctcgtcgtggcacagacgttcctgtcgatcgtggggctggtcgggaccggcccgacgttcctgatcgtcgccgggatcgcggtgctggccttcgtcttcgtggccacgtacgtgccggagacgaagggcctgacttttgagcaggtggagcagatgtggagggagagagcgtgggggaacagcggcggcaactgcgagagccttttggcgggtactgctgctgcgccgtaggctacccgttgccagcactggtcaagcgcgtcagttttagtatggccgctctgggcttgatcggctccgtcctggcattagttggaagaaagtaaaaacagattggagatgcagatgcaaactgttgtatgtggtggtgcttatattgctatcctgttgcctgattgtacgtgttgtcgtcgtggcaaatgttcagtgggtgtaaaatatgaggtcgtaccgtgacgtcaaactaaggcaaaaggccagttgtatgaccccagatgggtgattataattatttgtacagtttccggcatatgaatgaatgatgtcctggagagacagtagggcaggagtttttttttggttgtccttggtcaagtgagttggtgtttgggctctacatgcggaccatgacaaacgagcacgatcagtag

SEQ ID NO: 2821 - DNA, 3742 bp, Zea Mays
gtttccctaaccatttcactgctccacgctccagcgaaggcacacaaccgctgccgtttcttcatctcccaatcttcatcttcctcgcagcgtcccttgctcgcgttcggcacataggcgacggcggcggcgctcaggatcgggctctcggcgacggcgctcagggtcgggctcttagcgacggcgtcagcggcttcccctcccgcctcccgagcatgaatcactgacttgtgaaccattacctttatgggaaaagaaaaactccataagcagccctctggccgtctgattgaatctctcaaaatggagaggatgaggaacatcctgactcatagatatccatatccgcatgaacactcaagacattttatcattgctgtgtttgcttgttggcttttcttcatttcctcggataatttgcaaaaccttataatgaagttggacaagaattttaaatggtggtccatgtatgcttgtttgattggcttcttctatttcttctcatcgccttttatcaggaagaccatcaaaccaaactattcgaacttcaatcgatggtatattgcatggatattcttggcagcactataccatctgcccagttttcagtcaatgggcttggatttgcggatgaatctttccctcttcctcaccatttatatttcttctctaattttcttgatggtcttccatatcatatttcttggcctttggtatttgggttttgtttctcgtatggcagagaaaaaaccagagatgcttactataatacaaaactgtgcagttataagcatagcttgctgtgtgttttacagccactgtggtaacaggactgtttcaagagacaaatctattgatcgtagaactgctagctggattgtattctcactttggacaaagcatgatgacaacacactgatttcaaggctattgcgtatgcataaatttaaagaacagatttgctcctcctggtttgctccagttggttctgctagtgattaccctcttctctctaaatgggccatttatggagaattgtcttcaaatggatcaggttcctccaatgaaatttcaccagtctactctttgtgggctacattcatgggtctttacattgccaattatgtcatagagcgttcaacgggatgggttttaactcatcctttgacaatttcggagtatgagaaattgaagaaacagttgaaaccagattttgaggacatggttccctggtactctgggacatcaactgatttatttaaaactgtctttgacctcatgatatctgtgactctgtttgttggtcgatttgacatgcgtatgatgcaggctgctatgaataaaactcctgatgaagctaacagccatgaccttttgtatgatcatcttgatggaaaagatgagctttggtttgacttcattgcagatactggtgatggtggcaactctacatatgctgtagcacgattacttgctcaacccttgttagttataaactctgatgactcgaggctaacatttcctcgtgggcaactgcttctcgttggtggtgaccttgcgtatcccaatccatcctcattttcgtatgaacgacgttttttctgtccttttgagtacgctctccagcctcctgcttggtataagcctgaacatatagcactggagaagcctgaacttccccttggggtttctgagcttaggcggtacagaggaccacagtgtttcatgatacccggaaaccatgattggttcgatggattaaacacattcataaggtatatctgtcataagagttgggtgggtgggtggttcctacctcagaagaagagttattttgcattgaagcttcccaatggatggtgggtttttggtcttgaccaagctcttcatggtgacattgatgtttaccagttcaagttttttgctgagttgtgtcaacagaaggtcggagaaagtgattccgtaattattataactcatgaaccaaactggctccttgattggtattggggtgatagcactggcacaaatgttgcatatttgatacgggagtaccttaggggaagatgcaaactgcggatggctggggacctgcaccattatatgcgacattcttgcattgagtcaaaagaaccagttcatgtacaacacttactcgtaaatggctgtggtggggcctttttgcatccaacacatgtcttcgaaaacttcagggtattttatgggaacaagtatgaaacaaaatctacatatccttcttaccacgattctagcaagattgcacttggtaatattttgaagttccgaaggaaaaattggcaatttgatgtaattggtggttttgtgtactttgtcttggttttctcaatgtttccacagtgtgactcatttcacatcttacatgaagactcctgggctggtcgtatcaatggtttcttcactgcaatgtggaatgctgtttttgagattctagagagatcttatgtgtccctaggtggtgttgttactctattgatggtatcgtttttctttgtacccacgaaactgtcccgtaggagacgtgttttgcttggttttcttcatgccgctgctcatcttacttcggcagtgctactgatgctacttatggaattagctattgaaatctgcattcggaaccatctattagcaacatcaggttaccataccctttatgaatggtaccgaaaagtggaaagcgaacattttcctgatcccacaggacttcgcgctcgtctcgagcattggacctttggactttaccctgcatgtattaagtacctcatgtctgcattcgacatcccagaggttatggcagtaactagaagtacaatctgcaaaaaaggaatagagtcccttcccaggggaggtgccatcatctattatgtctgtgttttcctgtacttctgggtcttgtcaacacctgtcgtatcgctggtgtttgggagctacttatatttatgcataaactggttccatatccatttcgatgaggccttctcctcgctgcgcatagcaaactataaggcattcacacggctccacatcaagaaaaacggagaccttgaggtcttcaccctggctgtggacaaggtgccaaaggattggatgctggatccagactgggacatggaacccaagcagccattccagatgagctacaccaggaaattcccaagcaaatggagggctgcgtcgggccttgacccaatcaatgctgtgcgcattgttgaccggtttgtcatcccgcgaacgccctcaagtcctacaacaccaggaggctctgtttcaagtcctacaacaccaggaggctccgtttcaagtcctacaacaccaggaggctttatgagatgatgttcatgctgctgtgaaatataatgtaatgtacacaaggatatcttcgacttctcgggagaaattgtacagtacacaaggtcctctaacataccacgggagaaatagttgggaaaaaaaatagagggcaaatctccacaagatccaaatgttgtacatctggtgttatatcagttgtcctgatcaggtgtaatgataagtttttcaaacttagggtgtgattggtaggctgaatccggccctgcctggttgcatggatgcagcctgaacatgtttggttggttggctctgtgttgggccaagtactggagatacatttcctggccttgggcctgggaatttgtctccaccattgccactctgctgtccg

SEQ ID NO: 2822 - DNA, 5202 bp, Zea Mays
ccaccacacaaacggacaaacccctgcctcccaccagaaaagcaagcagaccacacccacccgcctctaaaccaaccagcctgtccccattccccgtccccggcgatgcacgccagcatccactccctcccgtcagcctcttcttctccccctgatgagcgctgagttctgtgctgccgctgctggtgctgtggccatggagctcggagtcggggatgtgatggggctgcagcaaggcatcgccgccgccaccgggccatcgtccggagacagcgacctgggtcttctcaagcgagcaggcctcgcccaggcagccacctcctacccctcccctttcctcgaccaacagaagatgctcaggttctccaaggcggcggcggctcacacgtcgccctcaggcctagacttcggaggaggcccgagcgagcaggctttcctgctgtccaggaccaagcggccgttcactccgtcgcagtggatggagctggagcaccaggctctcatatacaagtatctcaatgccaaggcccccataccttccagcctgctcgtttccatcagcaagagcttcaggtcatccaacagaggtatgcatgcatgttctcaaccacaagactaaaaaggaggttctctacttcaaagctgttatgctagcacctgcaataaataaaccaaacgagaagagagagaaagtacatatattattttgcacaaatgaataaagaataaccaaaccattatatatgccataaagattgaccactgtattgcctttttgagtataaatgtaatcagagcttgacagactctctaacgcagtgagctggaggcctctttaccaaggctacgcaaacgcagactccgacccagaacctgggaggtgccggcggacagacggaaagaagtggcggtgctccaaggaggcgatgcctgatcacaagtactgcgagcgccacatcaataggaaccgccaccgttcaagaaagcctgtggaaaaccaacctagaaaggccaccaaggaggtgactaccgctgctgctggctcgttgccgtgtgccgggccacaaggtagcttgaagaaggcaaaagttaatgactccaagccaggcactggcagctattggacagatagcttaaacaggacaatgctgagcagagagaaggcaaacaaaccgacggacgacgagtctttgctgcttagttcgacgaagaacagtcagcccaccttgtccctgctcactcaactgaagcagcagaacaaaccagataagttaggtcccacaccggaaaatgagccgaactcggacacgatgttgaaagcctggggtggcagccaccacaagagcatttcctccacacagcgccatgacgctgaatccctccaatcagtcctccaaaatttcagcctagcccagaatgacaggttggagtcagaaaagaacagatattctgattccgtgctagtctcatcggctttctattctgcagacggtccacaaactacctgccttacacctaacatgacacaagtgcagcaggactgcatatcaagctcctgggagatgcctcaaggtggacctctaggcgagatcttaacgaactccaagattagtgaggacttaagcaagtgtggatctaggtcatatggttggctattgaatcttgaccatgcaccatgattcctcaatccatggagagcttgacatagatatctcaccacggatgcaaacaatgagtcaggaaaaaagaaggtccaaatgaccgtactgtttaccccatgcatgctcgttatctacatttgtacttctatttttgtagtattcagctgttgaattatcagttcttctgaatctggctgtatcttaaacaaattctagtttccgtcaaatgatatcttgcttgctagatgcttaatgtttccttttcagcagaaacttcagtggtccattttaatcaaaagaaaactgtttcaagatcaagctctagtaagcaaagttccaaggaacttcttagttatccacatttttctcactttttccagacatgctgacaagccgcaccatcattatattaaataaatgtttagaagccctggttacatcccagatacacccttataattatatatttctcagactatggcctggataggatatatataggattcatatataggataattcaaaccatgataattcgaaccatggcctggataggaacagcagccacgtagccacaagtcatgtatgacaatctgatgaccacaaagaatccatgttcatgtattaaactcgataaaagaggacccatgacccctaatacagatatgatcatccagaaaagctatgatgacattttagaatgcacaagactgaagcagtgccagcaatctatccaacttgagaactcgccaaaaatcacaacagacaagtaaccagtagcatcattttggatattattgtcaccataactcaataaatgaataaagaaagcaaaaatgtgctaaacggaactcaaataagccatggacaacagaaaaaaaggcatactttacgtacaaagaataggtaatgcttatatctcatccagaaaatagtggttattatttctaacaccgcaacacagtcaatttcatgattcggacacgagcaacctgttccaatctgcaaagtctccaaatataacagtagacaaacagccaataccaacacttcaggccaagagaattcaaatataccatgggcatcaaaagaggttcatagttttcaagcaaaggtgaaggtgctggctcagacacacacagagctcatcaaaatatagtccttgaataattcaagtctcagcatcgagaaacaaacattttatcatcatagccacaaaggtcaaagggccataaccttgtaacaataaataaggaaaacttcaagttaaaaaaaaaggaaaacatactcatttgtactggctcagacacgcacaaaggtcatcaaagtttggtccttgaaaaaaaatcaagtatcaggatcgagaaacgtatgtttctgtcatcccagccaggccatacgaagacactacaaagaaatccaatcgacaacgtatgtttttgtcatcccagccaggtcatacatatgtttctgtcccaggccatccggatattatcctgtcaaagtgtcagctatagataaaaggatatttgtaccctgaattaattaccatcccatgaccagaataaataaacaatagtgcaaaacccttagtagacaaaaagtgtcaggaacacaaggatcagactagaaaccatcactgccaaaaagtaatcagcaggaataaaaatcgaaggtgataatgtcagcaggaaaaatagtaaacatggactctgcattgcatcggctcagacacgcacaaataaggtcatcacgttttgatccttatatggcattaagtaatcataatcaaccaaataacctttttgtcatcacagccatgcagcaatagcagcagagggagatctcatcaccaggcctcaactagcctgttcgctgcggctttaagacagctgttcagactgctgcagctgtaattcagagacaaaatactgtagcagaagccgtttcggaataagctgcagcgaactggctacattgattgaagagaaaaaatggctacagcctacagcataaagctgcagcaatcaaattgatgtgtgagggtgcgtaaccagaagcccattgtttactcgggctgcggctattagagccctagattgatctgggagcgactggaagaacgccatggccactgaatctggaaaccacagctccttgaatttgaccagcctcccattaataaataggcagagaaaaaattcaaccaagaaaagaaatcaagatcgattacacgacaaactcagtaagagtaaactctcagtctcagcaggtaaatatctattcaaatcgataaggatgagataactaactgaaagcaaagagggtggtgttgggaaagatatggccaacttgcgtctgttttgggtcaaattaagagcaactccaagagcatccataaaacttggacaaaagaacaactccaaaaaacaactgtcccacagcagctattttgaaacagcaatgtcattagccattttaatcaagtttcacctgacttcatcagattccaaggttcagaaccgtttccatcgtgctgcccatcccccagccatggagcagtcgtcaagacagccgaggtcagctacatctagctgcccagccaggagaggacacagggaggcagccatggtagctgccaactacagctgacggccgaccaggaaaattggctgccagccaggatctcaagtctcattggttaaaccagaattttcagcgtttcgacataacaacttgtagcagaatgaccaggaaaactaaaagctaccttgtcccggttattccacccctaactaaacaactctgtttaatgtaggggtagcatgatcagtgcctaaacataaactaaaaggcaatccatcatatatatatatatatatatatatatatatatatatatatatatattagaatcaacatatgaatggagaaaaacacatggtatagggacaacaaaataaataagacatgacacactcagattggaaacgtaggctatggtaaatgcgagaacattacagaatgtcaagtaaacctatggtactaggtagtagtacatgccaacattactacattaggcagtactacagtagtccacccattatctgaggatggaaactcaaaattacataaacctgctagccactggaagtcagaaaaaattggtctgggaaactcccagattttgctcctaaccttccgttctcttaatcagctcaatttgcacagccacaatgaacacgagaagaacagaaagcaccgccacaatgaacacgagaagagaacatgttaagacacctcataagaatgctaattagtacgtaatacaaacgcggaagaattccattgcgagtacagaaaaacattccaaactgcattgaagccattttcaacgcaaatgcaccatcattatctacactgaatgtcaaacacgcaaacacgggaaactcaccggaggaaatcaacgcagcagggtggcccccgtaaaacgtaggtgaggggagtacgtcattcttgggacatcgcatccagaggccag

SEQ ID NO: 2823 - DNA, 1894 bp, Zea Mays
tagagccaccggcgcgtatcagcctgtgcaggcccgtccatggaggggatggaggaggccaacaggacggcagtggagagctgccaccgggtgctggcgctcctctccaacccgcacggccagctcgtccccagcaaggagctcgtggccgccaccggggaggccgtcgccaagttcggctcactgacggccaagctctccaactccaacggcgatggcctactgcagggccacgctagggtcaggaaggtcaagaagcccctgcacatcttcgacagcaacctcttcctcgagagctctgcggtggccgccgccgctgctccggccaagacgcccagcccgagcccgatccttggcctccagctgttcccgaggtaccaccagtttgagggctcgtcgtctaaggatcctgtcaggatccctacccagttccccaagaggttgctgctagagaagccgactgccggtatggaggggtcgacgtcgcagtcccctccgatcgtccagatggtccagccggtgtccgttgcgccccccgcagggacgcccaccccggcattgccccccgctcaccttcatttcatccagcagcagcaaagctaccagaggtttcagctcatgcagcagatgaagatccagagcgagatgatgaagaggagcaatcttggtgatcagggtggtagcttaagtggcggcggcggcggcggtcgtaagggtgtgaatctcaagtttgacagctctaattgcacggcgtcatcgtctcgctcgttcctttcgtctctgagcatggaagggagtcttgcgagtttggatggaagccggaccagcaggccgttccagctacttagtggctctcagacagctagcacgccggagctgggcctggtgcaaaggagaaggtgcgctggcagggaggatgggactggtcggtgtgcaaccgggagccggtgccattgttcaaagaaaaggaagctaaggataaggaggtccatcaaagtccctgcaataagcaacaaggttgcagacatcccagctgatgaattctcatggaggaagtatgggcagaagccaattaagggatccccacatcctaggggttattacaagtgtagcagtgtgagaggctgccccgcgaggaagcatgtcgagaggtgcgtggacgacccctcgatgctgattgttacctatgaaggtgaccacaaccacaaccgagttctagcccagccagcctgatctttcaggctatcaattcaagatcgcttctacagtcaccctccctccctccctagagaagggatgacaacgacgacagtagcaataacaagagcctagtgcctgtacatatgttctgcttctaacagttggaggagagagtcagttagctagctctttcagaaaaatcaatggtgacaggggggaaacttgtcatgtcgatggagaaagggggaggagggttcctcatcaaatactctagttttgtagttttggtttctcttttgtgttcgtcctgtgctagggcccatcttgtggttgcagtgtgacattgagccgcagttgtatgtctggtaatggtgttaggggattggatcgagaagaagagcacaaggcaggaaaagtgcctgtaaaagtggctacacctaggaacagaatgtacaatcgtcttcagtccagtggtacaatcttgttgacgcagtggtttgggtctgtggcgtgttgtttgttagcgccagtgatgctgcgaggcatgggggttgccggctccggctctcagcgtgccgcatccgtgcagtggcatttgtactggggcgtctgccgtttgagaggccggtttgctgcggtctgcgtgtcgccactgtctgaactctgacgctgcttttgacagtttggcatcttc

SEQ ID NO: 2824 - DNA, 2953 bp, Zea Mays
ctttgttgtcggaggctacaagtggcgaatcttgattttcccaaggggaaataatgttgaattcttatctatgtatttggatgtggctgattctggggtattgccctatgggtggactagatatgcacaattcagcctctctgtggttaatcaaattcacaacaaattcacaataagaaaagaaacacaacatcagttctctgctcgagaaagtgattggggtttcacttcatttatgccgttgggtgaactctacaaccacagtagaggttatcttgtaaatgatacttgtatagtggaagctgaagttgctgtatgtaaagttgttgactattggagttatgactctaaaaaggaaactggctatgttggtcttaaaaatcaaggtgctacctgctatatgaattctcttcttcagacgctgtaccacatcccatatttcagaaaggctgtttatcacatgcccaccactgagaatgatatgccctcaggaagcatccctttagctctacagtcactcttctataagttgcagtataatgacagcagtgtctctacaaaggagctcacaaaatcattcgggtgggacatgcatgattcatttatgcaacatgatgttcaagaattgaacagagttctttctgagaagttggaagataagatgaagggaactgttgtagagggcacaatacaacaattgtttgaagggcaccacatgaactacattgagtgcatcaatgtagatttcaaatcaacaagaaaggaatccttctatgatctccagcttgatgtcaaaggttgtcaggatgtctacgcttcatttgacaagtacgtagaagtggagcaattggaaggtgacaacaagtatcatgccgataagcatggtctgcaggatgcaaagaaaggagttctttttatcgacttccctcctgttctgcagcttcagctaaaacgttttgaatatgatttcatgcgtgacacgatggtgaagataaatgatcgctatgaattcccacttcaattggaccttgatagagatgatggaaaatatttatctcctgatgctgacaggaatgtgcgtaacctttatacccttcacagcgttcttgtccatagcggtggtgttcatggtggacattattatgctttcatacgacctaccctttctgatcaatggttcaagtttgatgatgagcgtgtgacaaaagaagatgcaaagagggcactggaagaacaatatggtggtgaggaggagctacctcagacaaatcctggcttgaacaacactcccttcaagtttactaaatattcaaatgcatacatgcttgtgtacattcgtgaaagcgacaaggacaaaattatttgtaatgtggatgagaaagatatagcagagcatcttcggattagattggaaaaggaccgtgaagagaaggaacgtcggaagaaggaaaaagctgaggcacacctctataccataatcaaggttgcaagggatgatgacttaaaaactcagatagggaaagacatatattttgatcttgttgaccatgataaagtcccaagcttccgtatccaaaagcagatggcctttgctcaattcaaggaggaggtagcaaaagagtttggtattcccacacagttccaacgattttggctgtgggccaagcgacaaaaccatacttaccgacctaacaggccattgtgtcctcaagacgaagcgcatactgttggacagctaaaggaattggtgaacaaggcccacaacgctgaattgaaattgttcttggaagttgaacttggactggaccttaaacctcttcctcttccagacaagactagagaagatatatttcttctcttcaaactctatgaacctgaaaaggaacagctacggtatgttggtaggctctttgtaaaggcttcaggaagaccacaggacattctgccgaagctaaagatgttggcaggtttttcacaagatgatgatattgaactttatgaggaaattaagttcgaacccaatgtgatgtgtgaatacattgataacaggcttctgttccgatcttgccagcttgaagatggggacataatctgttttcaaaaatcttcaaaggcagatagtgctgaccgatatcgatttcctgacgtaccatcctttttgacgtatatacgtaaccgacaggtggtccactttcgttcactggagaagcccaaggaggacgattttttcctcgagatgtcaaagattttcacatatgatcaagtcgtggaaaaagtagctgaaaaacttggcgtggatgacccatcgaaaattcggcttacatcacataattgttattcgcagcagcctaagcctcagccaataaagtacagaggcgttgaacgtctactggacatgctgattcattataaccagacttctgatattctgtactatgaagtattggacataccacttccagaattacaagcgctgaagacattaaaagttacataccatcatgccacaaaagatgaggtgtcagttcacagtataagattgccaaaaaacagcactgttggcgatgtgctaaacgatatcaaaacaaaggttgagttatctcatcccaatgctgaactgagattacttgaggtcttttatcacaagatatacaaggtgtttgcaccaaatgaaaagattgaaaacattaatgatcagtactggacactgcgtgcggaggaggttccagatgaggaaaaaaaccttggtccctttgatcgattgattcatgtatatcattttacaaaagatactcaaaaccaaacgcaagttcagaactttggagaacctttttttatggttattcgtgaggatgagaccctatcttctatcaaagagcgtatacagagaaagcttaaggttccagatgaggatttctcaaagatttcggcactgaatttgccctcagcgttc

SEQ ID NO: 2825 - DNA, 3452 bp, Zea Mays
ccttcatcctagccgtccaccagcgcaccgttcttgccccgcaagcctccgcacgaggcctggaactttccacgggtccaaaaccttctctctctctcctctcctcttccctttctctctcctccgcctcccccgactcgcgagtcgcgatctccacctccctcgaccaccactcccgtaacccacttccgggtgggccccacgtcgccgccggcgaccagcacctcccctccttgactccctcgctacccgccgcccgcgtcccgccggccatgacgacctcgccgccgcccgccgagcagcatgaggaagaggaggtgctggtgccgtatggcccgcacctggagttgcccaatggagcgcagccaatggaagttgtgcctgctgagccagctgctactgtggaaaaccaacagatagaggatccaccaatatcgagatttacttggaccattgagaacctatcaagagttagcacgaagaagctgtactccgaaatctttgttgtcggaggctacaagtggcgaatcttgattttcccaaggggaaataatgttgaattcttatctatgtatttggatgtggctgattctggggtattgccctatgggtggactagatatgcacaattcagcctctctgtggttaatcaaattcacaacaaattcacaataagaaaagaaacacaacatcagttctctgctcgagaaagtgattggggtttcacttcatttatgccgttgggtgaactctacaaccacagtagaggttatcttgtaaatgatacttgtatagtggaagctgaagttgctgtatgtaaagttgttgactattggagttatgactctaaaaaggaaactggctatgttggtcttaaaaatcaaggtgctacctgctatatgaattctcttcttcagacgctgtaccacatcccatatttcagaaaggctgtttatcacatgcccaccactgagaatgatatgccctcaggaagcatccctttagctctacagtcactcttctataagttgcagtataatgacagcagtgtctctacaaaggagctcacaaaatcattcgggtgggacatgcatgattcatttatgcaacatgatgttcaagaattgaacagagttctttctgagaagttggaagataagatgaagggaactgttgtagagggcacaatacaacaattgtttgaagggcaccacatgaactacattgagtgcatcaatgtagatttcaaatcaacaagaaaggaatccttctatgatctccagcttgatgtcaaaggttgtcaggatgtctacgcttcatttgacaagtacgtagaagtggagcaattggaaggtgacaacaagtatcatgccgataagcatggtctgcaggatgcaaagaaaggagttctttttatcgacttccctcctgttctgcagcttcagctaaaacgttttgaatatgatttcatgcgtgacacgatggtgaagataaatgatcgctatgaattcccacttcaattggaccttgatagagatgatggaaaatatttatctcctgatgctgacaggaatgtgcgtaacctttatacccttcacagcgttcttgtccatagcggtggtgttcatggtggacattattatgctttcatacgacctaccctttctgatcaatggttcaagtttgatgatgagcgtgtgacaaaagaagatgcaaagagggcactggaagaacaatatggtggtgaggaggagctacctcagacaaatcctggcttgaacaacactcccttcaagtttactaaatattcaaatgcatacatgcttgtgtacattcgtgaaagcgacaaggacaaaattatttgtaatgtggatgagaaagatatagcagagcatcttcggattagattggaaaaggaccgtgaagagaaggaacgtcggaagaaggaaaaagctgaggcacacctctataccataatcaaggttgcaagggatgatgacttaaaaactcagatagggaaagacatatattttgatcttgttgaccatgataaagtcccaagcttccgtatccaaaagcagatggcctttgctcaattcaaggaggaggtagcaaaagagtttggtattcccacacagttccaacgattttggctgtgggccaagcgacaaaaccatacttaccgacctaacaggccattgtgtcctcaagacgaagcgcatactgttggacagctaaaggaattggtgaacaaggcccacaacgctgaattgaaattgttcttggaagttgaacttggactggaccttaaacctcttcctcttccagacaagactagagaagatatatttcttctcttcaaactctatgaacctgaaaaggaacagctacggtatgttggtaggctctttgtaaaggcttcaggaagaccacaggacattctgccgaagctaaagatgttggcaggtttttcacaagatgatgatattgaactttatgaggaaattaagttcgaacccaatgtgatgtgtgaatacattgataacaggcttctgttccgatcttgccagcttgaagatggggacataatctgttttcaaaaatcttcaaaggcagatagtgctgaccgatatcgatttcctgacgtaccatcctttttgacgtatatacgtaaccgacaggtggtccactttcgttcactggagaagcccaaggaggacgattttttcctcgagatgtcaaagattttcacatatgatcaagtcgtggaaaaagtagctgaaaaacttggcgtggatgacccatcgaaaattcggcttacatcacataattgttattcgcagcagcctaagcctcagccaataaagtacagaggcgttgaacgtctactggacatgctgattcattataaccagacttctgatattctgtactatgaagtattggacataccacttccagaattacaagcgctgaagacattaaaagttacataccatcatgccacaaaagatgaggtgtcagttcacagtataagattgccaaaaaacagcactgttggcgatgtgctaaacgatatcaaaacaaaggttgagttatctcatcccaatgctgaactgagattacttgaggtcttttatcacaagatatacaaggtgtttgcaccaaatgaaaagattgaaaacattaatgatcagtactggacactgcgtgcggaggaggttccagatgaggaaaaaaaccttggtccctttgatcgattgattcatgtatatcattttacaaaagatactcaaaaccaaacgcaagttcagaactttggagaacctttttttatggttattcgtgaggatgagaccctatcttctatcaaagagcgtatacagagaaagcttaaggttccagatgaggatttctcaaaggttcctgacttccaaatgttttgttcttaa

SEQ ID NO: 2826 - DNA, 1135 bp, Zea Mays
gtgcattgccctagcaagctcttcctcggaccctttaatgcactacggaccaccaccaccaccccaccgcgcgcgcgtgtgctcgcctcacttcgcttggcccggctgtctccacgccacgctgcccacaatcccctttcccctccagtaggtagagtggcgagaaggatggtggccgtgtccacggcgacgatggcgagctcgctgctcctccggccgcgcgcgctcctgccaccccatccgattcctagctccagccgccggccattgccagctccgcgtgtacaactacaggggagcatccaggagaagccgggccttccggcgaaaagcgacggcgagcggaggcggccggctgggacgcggctctactcgctggcgccctaccctctgctgctggccgcgctgctgccgggagctgagccggtgacggccgtgttcgcgccgttcgtggagctggtgaagacgtgggatctccccggctggctcgtgcactggggccacccgggtaacatggaagagaaggccaaggctaaagatctccacccgaaactcctcgccgggatgttctttttcttcgccctgggcgcgaccggtgggatcacagctcttctcacctcagacaaacccatctttgaaagccctcatgccgtgactggagtcatcggccttgcgctcctgaccattcagtctgtcctgccaaaactgttcgagggaaacccagggcttaggactacacatggtctgctcggcagtggcatcatgactctgtttctaatccacgcggcactaggcctgcagcttgggatcagtttctaacttgtggctacaatatcttggggtttgcttctctttttctttaactcactctaagtattatcacacgaagcatccccttaaatgaaaataatgtaagagaaagcaaaattattttccttggctttgttggcaactgcagtccatgttatatgataatatgatattgccatacgacactagaatatccatgtagagacaactagacatggatacatgtctgtcacctaaacgaagaacagatcacacaaaaagaagaggaaagagcaagaaaatgttgtgatcttaaacgcagaaagtaacatgctgttatcaatca

SEQ ID NO: 2827 - DNA, 824 bp, Zea Mays
tgccacagtgccgcggcccacgcggtgaaaacggaaaccaaactaaccaaaatcccccacccccccactgctctctctcgccccaaaaccagatcgccacgacaagggcagagggccccggaggggcgcgtagcaatggcggcaggctaccgggccgaggacgattacgattacctcttcaaggtggtcctgatcggcgactccggcgtcggcaagtccaacttgctctcacgcttcacgcgcaacgagttcagcctcgagtccaagtccaccatcggcgtcgagttcgccacccgctctctccaggtcgacggcaaggtcgtcaaggcccagatttgggacaccgccggccaggaacgttcaaaccgacgaaggaaaagcattcgcagagagggaatcgttgtacttcatggagacctctgcgcttgagtcgaccaacgttgagaatgcatttgcagaagtcctagctcagatctaccgtattgtggacaagagagccgttgaagcaggtgaagatgcagcatctgggcctggcaggggcgagaagataaacataaaggatgacgtctcggcagtgaagaagggtggctgctgctctagctgagctgccgtgctgtaatttttttggggagttgtgggatgtagcttatgttatggcattttcagcgactggaaattggtagtggcatttagcagcctctattacctagagaggttattgtcaaactgaaaaaaactgaaggttagatcagtttagagctctgttactgtattgtgtatccggcaataggcatagtattttttatttttttatttttgctgtg

SEQ ID NO: 2828 - DNA, 3903 bp, Zea Mays
aaatttttcttgaagttaatggagccgagctacatcacgtccgccctccccctctctctccctctccctctctcgacgacacaccaggccaccacgcacatgctttgtcccatggatgccgaccacctcatggtgttcaagaccatgctcgccgtcaggtggtagtcccggcgagcgagatctccccactccaggctctctcccatcgctcgctgccgcctcatgttgtttgcggccgtgctcgccaaccgcggcacggaggcgtcgatccgaccgggagcccttcgcaatggacaaagccttcctcctctccggcaatgagggcatcgtcggctcgtcgctaacatggggaagaggtaggagtagctcagcagtaggatggagtggccaggacagctcggtgcccacccgtcttcatcgatcgggaccctcttcccctctagcgagctattcccagtttcgagaacaagattaaaatagcttcgtaggcttttatgtggtttagatttgcatatctatctctcaccattaaagcacaaccagatctggtagcttcagctccaaacaacaagaaacactgagagctgtgaagagtctgagatggcttatgtaagccccgcgactgatgatacatcaacagatctagatactgacgagaagaaccaaatgggactcccttctggaaggtcatcagcttcaagtgcggcttcgctgcatcagcgccaaccgcaatcagacattcatagtcatgagtaccatcagctttctcttttgcttatgttagccagcctgacttctattttccacccccttgtatgtctggtggacacgcagatggccaaaccagagtaccaggctatggagaccggacgagcctccaaaagaaggtgcatgatagggtattttaacagaaacaataaatttcctcgaagcatcaaagtctccagcaacctgcacaggaaaacaaatatttataattatgtcatgttcccaacaatttagtgcaaggtaaatctgattcaagaattatatttacctcaaaactaacagccgtcatttgaatcttggcaatgtcatgttcagggtgacttggtaagccaagatagtagacaggagcaatctgggaacaagggataatacagtagctaaaacaataggaacatagagtaccactaatttgtaaacatacatcaataaaagaaacatgtgtgttactgttaataaagctttgaattttaggtgtggactttgtttatgtgtctcagagtccaaggagaccaccccgcgattcgtcaacgtctccgggatggcgaagccgcaacccgacgcctccctgtcctttttgttacctccggacgccgctgccgaggggctgcatgacatgattctgaatgctcgcgacgaccttgatgttttatctccgtggtcggtgggggcgtcggcgtgtggtgtaggcagatgagggaggcgacgatgttcttctgtggtgacccatcgacgccgcagtgggtcgaccaacaccatcaccacatggagattcacagggctctcttctgaagcagctagcaaacaagagtatcagtggtggtgtagctgttgttctagctgaaacgaacaagtaagagatggagatggacatagcaaagctagaagttggcttcatgggaacatctgtaatatgtaggagtgacgctcctctaattctagcagacttgaggaaggtataatattcataaattattgttatccttgttccatgtaatacacagtggtctttgatttcatctcattccatattaagatctcaaataattgacccttttccaggtttctgtttcgaaagcacgggccattattgtgttaacatctgataaaaatgcagaccaagttagtatttttgttctacacacatcacctgaatagatgtaacatgggaacccataagcttagaccttacaacaatgactattactaatattgtattcaatcgaaacctagcatataaaagcatcgggaagaatatgatggagtaaaagaagtatggctactcggctagcatctaaagcatgtcaaacaactaactttcatatttgttcccacaaggcaagcagatacaaggaaaaaaggaaacatttatatttttggtctctaaataattaacatcagtctattctttggatgttgaaggggtctcagagaagtctatgtcgttatcagactttaccaactggtgcattctgttgccatcattgaggaaattctttggaaatttgtttatgccccttgatttaggtctgtccaattcgtgtcgtcctgttagtatttctaagcaacatttctgttatttttaaaataaaactgttgccatcattgaggaaattccttggaaatttgtttatgccccctgattcaggtctgtccaattcgtgtcgttctgttagtatttctaagcaacatttatgttatttttaaaataaaataactagatccatctgatgttgtaggagttgggctgatatttttttgtcaaattgttcctcattggtcctcacatttaggaattcagaccatgatgtctaggtgaaggttttgcgctattctttcaaaagagtttatgcactttccctaaagctggagtgttagtaataggctcataaacttgtacagaaggatgtagatgtgatctcacaccgaagaagtttgtcatgaacattactatgtgaaaaatacaaagatatagagttgaagacctctaagaatggtaacttgtgctacaacataaaacaacttcactgaattatgtttagcctctctatgtgtttggtatgatcattgttttgttgttctgtacgtctcgcactaaccagttttgtggtagattcaatttttgaagtatcaattgtgctgaataatttatgaaacccttcactgaatttgaatatggcatggataattgtttagtctggttttcccttcactgaatttgtggtagattcaatttttgaagtagcaatctgtacgaaaacttattttgtttctgatgaagttgtgtgtacttctttaggactattacaagcgtagagctatagaccttgttttgattttgtgaggagataagctctaccgtatggattacatggatcttgtgctttggatggttatagttcttttttgggaggaaggacaaaagtaacaggtttagtaggccttctgatttgataatagaaatatagataataaataaatttgtgataaatatgcttaaaaggaagttgcgaatcaaaatactaggcgattcaggccttctaaccaaattagcgtcagtgtaagggatacagctcgaatacaacttgcacaaatgaaccgtatcaaattcttttgggttgacaaaacatgccacatgggatatttatgaattttatactcacattcttgtatctatttgcagcctcgacaaacctgaagtttgaacgtatgacagatgacatcttggttacttttgtggatggacatcttggtcgcttttgtggttggcttttgtggatgcgtgaagctacaattgtagttgtgtaagatttatgtgcataactatgtgggttgcatcagctctccgtactatgtatatacctcccgcgtagctgcctacctatccctaacttgcgacccataaacgtagacttcgatcctataatcttatttgggatcagtttcaggctgtaatagccctgaccgtcttactatggaacacgttaaagtatggtctaaaactttaatgcggattatgttcggtctatctatgtttggtctcatagttgctttgttgctccccgcgctaaacggttttattggagacttaatcatcctttgctgaattttaatatagcatatataattgtttgctca

SEQ ID NO: 2829 - DNA, 1668 bp, Zea Mays
gtcagctcgttcgtgtcatcgatggatgatggagactgacgaaatagaagagatgtgattattatttttatttttcttcttgtttcccccatgcatgcctagtaaaaacacttgatccatgacctagctaggatgaggtagataggagttgttgttgcgttaaacgatcgagaaatcgatcggtagaatgaattaatgggccagccagcagagtgtgatctcactatctgagtgatagctaggatgtacgtactccctctgtccggagatccagtattaaattaaatccacccagtgaaacaataaatactacatcaacgagctagagagtcaccacacaagcgaatctgctgctgagatcgtcggcgacgtgtaccttagctagcagtgtgttggccttgccctgaactaatagctaggacccatggccggtgccggcggcgactggcccttcacggccgacgacgacgcgtacggcgccgactcctcggcgatgttcgcggagctcgccgcagggtgctgggccgccgccggcgggacggcggcggaggagctgatgatgtcgatgctgctgccgccgcctgaggatcatcatcaccaggcggcggtactggcgacggcgccggccgccgtgtcgtccaggtccagctccaccgacgacgacgacggggcgccggcggccgcagccaccaccgaagcagcgtaagtgcctgtgctcagtagccttcgtctccatctcagtcgtccttccttcccttgccagattaattaagcccggcccatatcctatatactagtaattaattagatactaatacatggagtggagtagcattgcacggtgcatctagctagccaggtactgtaattaagagcagctatatatatatgtatatggtatcatcggtacacgtacattgtgggcttgtttgcttgtttgcatgcaggagcaagccaccggcggcggggaagacgacgatgacgaagtcgtcgtcggcggggcagaagcgggcgcggcagccgcggttcgccttcatgaccaagagcgacgtggaccacctggaggacgggtaccgctggaggaagtacgggcagaaggccgtcaagaacagccccttccccaggagctactaccgctgcaccaacagcaagtgcacggtgaagaagcgcgtggagcgctcctccgacgacccctccgtcgtcatcaccacctacgagggccagcactgccaccacaccgccgtcgcctgcttcccgcgcgccaaccacgccgccgacggccgccaccacctgccgttcgtcgaattctctgctgcctcctccgcgcaccaccactaccacagcaacccctacagcggcaccgccagctgcgtcaacgaccaccacctgccgcccctcctcccgacgacgacgacactcgcgcctcggcacaacgctctcgacaacggccagcaggagctgcaggcggcgatgtcgatgccagtggcttccgtgccaacgacgtcgttgttgccgccgcctactactgctctggcggcgccgccagtggcttccgtgtcaatgacgtcgtcgtcatcgttgccacctgctagcagtagcgctgctccggccgccgtcgacaagggacttcttgacgacatggtgccgccggcgatgaggcacgggtag

SEQ ID NO: 2830 - DNA, 1994 bp, Zea Mays
cgctgcgcccggctttaaaaggcgcaaaagcgaacgaggcaggcgctcctccgcaccaccgtacaccggacccggagcagctcgccgccgaacccagcgctgaaccgacggggagaggcgaggccgcgctttaccccgggaactacgaagcaacgacggcgggactgagcaggcggggatatgactgtgatcaaggcagctggagcggagccgtgcggagacggcggcgcgtacggcgcgaggcggcggcagtcgctgcgggcgcggtacgcgtacgggttcgtcttcttcgccaccaacctgctggcctggttcgtcagggactacggggcaagggcgctccgcggcttgcatcatgtgccggtctgcggagcaggggactccaagtgcttccagtccggaggagtgcttcgagtaagcttgggctgcttcgtatccttcatctaacaagcacggtgtgtgttcgtttcagctcatgtaactgatgggcccgttcactgtatatacgaggcatgcagctagaagcctagaatgttttcaattacaaccgtgtttcggagtccttaaccaaactatgggcccgtttggaatggggttttctggatccagttgctagtatgttgtacaaatttgaactaaaatcctaaaatctgttggaacaacctgtctaaaacgctaaaagggcatggtcaaggattcaggatagtagatgcactagttccagaatccagagctactaaacatttgacattgtggaccgtgctgtgtttccttgggttcacttccttacagaatgttaagatatttttctgggtgatgtttgccacaacatttggaactcgcaagctccatgaagctcgtaattcgtggcattctggatgttggattctgaagtctcttgtgtatgccatgtcgatcggcatcccatttatcatccctaacatcttcatccaattttatggtgaagttgctcgactgggtgccgggatatttctcctcctccagctcataagcatgctccacttcatatcatggtgcaataaacgatggatgccagatcctggatcaaatcaatggtaaggattgagctagttgtgttggaacttgtggcatcgcagttacttcagtcttcaggtcctgaagctagaactgaccatggcgtgtcacccttatgtgattctcagtgggttgtttgggttattcttgtcaaccatctcctacattgcttcgtttgttggaattggcgtgctgtatgttctgtatgtccccaactcctcttgtgcgttcaacatcttcactattacatggacggcaatcttggtgactataatgatggcagtatcattgcactccaaggttaacgagggtcttctctcttctgggatcatgagttcatatattgttttcctttgttggtctgcactccacagtgagccgcaaactgggaagtgccactctcatatgaaaattgcccaggatggcgattcagctactatcgttagcttcattatcgcaatttgttccattgtaatggccacgttttctactggaatcgacaccaaatccttccagtttcggaatgataaagtacaattggatgaggacatcccctacagctacgagattttccacattgtgtttgcgatgggggctatgtacttcgcaatgctgttcattagctgggagcttaatcacccaacaagaaagtggagcatagatgttggatgggcaagtacatgggtgaagatcatcaacgagtggttcgcggctagcatatacctctggaggttgatctccccagtcgtattgaggaaccaacttgccaatgaagagttgatgccacacaggcctacagtatagttttgatgatatagagaaaacgagttctataacccgctgattctttccttctaaaaagatcgctatatgctttattcttttaatacacttgtacatcgaaactcgaaaccacacgaaaaaaagactaggaattc

SEQ ID NO: 2831 - DNA, 4023 bp, Zea Mays
tgtttttttataatgacaaaaagttaaatttctccgtcgccgagggagtccaatcccaacacggcgacgacgacaaacaaacaaggaaatcgcctcctcctcctcctcctcctcttcctctttccctcgctctgccatctgcccccaaattcccctccccactcgctcgcgtcgcgatagcaagcaacgcgcagaataatgaacttgaagaccagcttcgtaagtccgcacaatccaaagtcccatcagatcccaacatatggcttcagatgcgtgacaactttgagaagataattctcatagatcacgacctctctgaacagagagatgtagagtatctcctatggcagttgcattacaaaagaattgaggacttcaggaggaacattagtgcagctagctcacttgcatctcagagtgggaagagcaacactaacccagatcgagtcaagagaattaaatcagccttcaaaagcttcctttcagaagcaactggcttctatcatgacttgatgttaaagatcaaatcaaattggggccttccactcaattactttccagacagccttgacaatgcaaacaactctgtgcgagatgacatgaaaacagttcaattgaagaaaggtttgatttcatgccatcggtgtctgatatatttgggagatcttgctcgttacaagagtttgaatggtgatggtgattctgctagtcgtgaatacacagcggcttctagttactacaaggaggcagcttctatctatccttccagtggcaaccctcatcatcagcttgctatactagcttcttactccggcaacgaggtggtggctgtttataggtacttccgaagcttagctgcagacactccttttgccactgcacgggacaacttgattattctttttgaaaagaatcgccaaagctatggacagctgccagacaacagcaaagttcctagcactaagacattacccccacggccatctgggtggggccgaggacggggagaagtaaggtttcaaccaaaagatgttaatgcagaaacagctgaaagggaacgcgagtgcaataatggtgatacattgaagaccttctatataagattcgtcaggctcaatggaattcttttcacgaggaccagtttggaaacattcggggagctgttttcttcagttagcaatgatttgcagattcttctttcttctggtcttgaagaggaccttaatttcggttctgatgctgcagaaaatgcattggctgctgttagacttactgtcatccttatattcacagtgcacaatgtaaataaagagcctgataggcagtcttatgctgaaattgtgcaacgcagagtactgctccaaagtgcgtttacggctgcttttgactttgttggacgaattctcagaaggtgttcagagctccatgatattgcatcaagcttctatctgccagccattttggtctatattgaatggctggcgtcccatccagagttggctgttgattcagagatggaggaaaagcatgcaaatgccaggtctttcttctggagccaatgcatctcatttatgaataagttgatccttaccaaccttgcatctgtgaatgatgatgatgacgaggcttgcttttctaatatgagcatttatgaggagggtgaaactggcaacaggtttgccctttgggaagatcttgaattgagaggttttctgcccttgcttcctgcacataccattttggatttctcaagcaaacacacatttggaagcaccaaggagaagaaagcacgggttcagcgaatttttgctgcaggaaagtcactgcttaactttgttcagattgatcagttgagaatttattttgattcatcatcgaagaagtttgttatggccaagaaccctcctgtttctaaaactaacacccctcttcacgaatctcctgatgcacttaaaacaagtggcactgaaatggattatgaggctgctagaagatttgattcagtttcttctaatatgggcacactgcagtctaaagtgcagttttgtcctgatggtgacgatgatgaagaaattgttttcaagccaacagcttccgaaaagtttccgaaagctccttcagatctgttggttaatggatacactcatcctgtacctatgtctactgctggctggccaaccaatgctagtttagtgcctgttcagagcactggatcaatgactgcaactggttggccacccaatggtgggtcaaatgcttttccaagtactgcatctctatcagctgctggtaattacaacattaaccagtcgcttcccaggtcttccgttggttgggctgtcaatggtgagcaaagtgttattcctagcattgctccaagatttgaactcgtgcagcctgttgaagagcctgtttccagctggacaagcagtggtgcacagcatgttggtactcagcacaagcacacaggtttaactttcccagatgttgtgtctgaaccacttgtatctgcatcaatggttcaacgtttcagtagcactgattattcgaaatttctcagtgaacaagaaatgctcttagtgaatggactgaatactgtcaacttaactggaaatggctatttaaagcagagactgcagcctggattgagtggtttacagtctatggggtattcatctcagacacctattgaacctggtggtaccactgcaaactcgatgcataatcatctgaaaattactggagagaatgtgccctctacacttgattcagttgtaccttcaatagctccattaggtggcatgccaatgaaattcacagaagcgccactaactgcttcaaagaagaaccctgttagtcgtccatcaaagcctgttgggccacctccaggatttgatcatgtagccccaaagcgccaagatgattctattccagttgaaaaactgcagatcccacaggttgatgattacagctggctagatggttatcagcaatcgattgatcatgttcacaacttaagaactgtttattctggtgtcagtgacagcactgcatttgccactccattccccttccctgggaaacaacagttatctgggatgcatgcacaaggggctacaaatgaaaagacatggcaagatttccgtctttttgagccttcaaaacagaacatgctccaaaattaccaccaaagaaatcagcaaaatggtcaaatagctgaacaagagccagcaaattctgtctggtctagcagttaccatgtgtgattcagtaacttgtaccaggatgattgctggagttgctggggactattggattaagtggcacagcctgatctattgagcttggcccgtacctgcagcactctgttaaatttcttttgagcatggtggtctttgaagcatgacaatggctgctcttaggtttgggattgccaccatcttctgggacaaagagggagtggaggatgattgatctgtcggcagtctgatggggatgaattatacgaggtcttcaacgctgacacaaagggttaatgaaacaaactcgaatccagtgattataggcgctccgcacggaccatatgattcatctctcgttggacatgtagctacaagaatggtgtcagtgggcggttgctgccgcaactaaaagtccattcagtgtggatgtcagttgggctacgctatctaagaataaaaagtttgaggaacaacgagcatgttgccaagtagtttcttaagtataagttactgcgtctagttatattgttcctttcctttcggaaacaatgtgtcatgttgctgtcgcgctagttgcaagttgcaattaaacgtttggaacagtttgtcatgttatttgtgtggcttctatatggctatatgtttgctggaactgtatggaccaaccctcggtgctacctacaaaagtctatgatttgactgaatatcttgtatgtttctattatgctcattgattttggaacaatagtcaatttagcctaccccaacttgcaaattggca

SEQ ID NO: 2832 - DNA, 4101 bp, Zea Mays
caaaaagttaaatttctccgtcgccgagggagtccaatcccaacacggcgacgacgacaaacaaacaaggaaatcgcctcctcctcctcctcctcctcttcctctttccctcgctctgccatctgcccccaaattcccctccccactcgctcgcgtcgcgatagcaagcaacgcgcaggtgctgaaactcgtgtactgttgatggatgatgactgttcccatggatagtgctagcgcagccccatcctccacgcgggaccttgccgagcgtctccttactaggaataatgaacttgaagaccagcttcgtaagtccgcacaatccaaagtcccatcagatcccaacatatggcttcagatgcgtgacaactttgagaagataattctcatagatcacgacctctctgaacagagagatgtagagtatctcctatggcagttgcattacaaaagaattgaggacttcaggaggaacattagtgcagctagctcacttgcatctcagagtgggaagagcaacactaacccagatcgagtcaagagaattaaatcagccttcaaaagcttcctttcagaagcaactggcttctatcatgacttgatgttaaagatcaaatcaaattggggccttccactcaattactttccagacagccttgacaatgcaaacaactctgtgcgagatgacatgaaaacagttcaattgaagaaaggtttgatttcatgccatcggtgtctgatatatttgggagatcttgctcgttacaagagtttgaatggtgatggtgattctgctagtcgtgaatacacagcggcttctagttactacaaggaggcagcttctatctatccttccagtggcaaccctcatcatcagcttgctatactagcttcttactccggcaacgaggtggtggctgtttataggtacttccgaagcttagctgcagacactccttttgccactgcacgggacaacttgattattctttttgaaaagctatggacagctgccagacaacagcaaagttcctagcactaagacattacccccacggccatctgggtggggccgaggacggggagaagtaaggtttcaaccaaaagatgttaatgcagaaacagctgaaagggaacgcgagtgcaataatggtgatacattgaagaccttctatataagattcgtcaggctcaatggaattcttttcacgaggaccagtttggaaacattcggggagctgttttcttcagttagcaatgatttgcagattcttctttcttctggtcttgaagaggaccttaatttcggttctgatgctgcagaaaatgcattggctgctgttagacttactgtcatccttatattcacagtgcacaatgtaaataaagagcctgataggcagtcttatgctgaaattgtgcaacgcagagtactgctccaaagtgcgtttacggctgcttttgactttgttggacgaattctcagaaggtgttcagagctccatgatattgcatcaagcttctatctgccagccattttggtctatattgaatggctggcgtcccatccagagttggctgttgattcagagatggaggaaaagcatgcaaatgccaggtctttcttctggagccaatgcatctcatttatgaataagttgatccttaccaaccttgcatctgtgaatgatgatgatgacgaggcttgcttttctaatatgagcatttatgaggagggtgaaactggcaacaggtttgccctttgggaagatcttgaattgagaggttttctgcccttgcttcctgcacataccattttggatttctcaagcaaacacacatttggaagcaccaaggagaagaaagcacgggttcagcgaatttttgctgcaggaaagtcactgcttaactttgttcagattgatcagttgagaatttattttgattcatcatcgaagaagtttgttatggccaagaaccctcctgtttctaaaactaacacccctcttcacgaatctcctgatgcacttaaaacaagtggcactgaaatggattatgaggctgctagaagatttgattcagtttcttctaatatgggcacactgcagtctaaagtgcagttttgtcctgatggtgacgatgatgaagaaattgttttcaagccaacagcttccgaaaagtttccgaaagctccttcagatctgttggttaatggatacactcatcctgtacctatgtctactgctggctggccaaccaatgctagtttagtgcctgttcagagcactggatcaatgactgcaactggttggccacccaatggtgggtcaaatgcttttccaagtactgcatctctatcagctgctggtaattacaacattaaccagtcgcttcccaggtcttccgttggttgggctgtcaatggtgagcaaagtgttattcctagcattgctccaagatttgaactcgtgcagcctgttgaagagcctgtttccagctggacaagcagtggtgcacagcatgttggtactcagcacaagcacacaggtttaactttcccagatgttgtgtctgaaccacttgtatctgcatcaatggttcaacgtttcagtagcactgattattcgaaatttctcagtgaacaagaaatgctcttagtgaatggactgaatactgtcaacttaactggaaatggctatttaaagcagagactgcagcctggattgagtggtttacagtctatggggtattcatctcagacacctattgaacctggtggtaccactgcaaactcgatgcataatcatctgaaaattactggagagaatgtgccctctacacttgattcagttgtaccttcaatagctccattaggtggcatgccaatgaaattcacagaagcgccactaactgcttcaaagaagaaccctgttagtcgtccatcaaagcctgttgggccacctccaggatttgatcatgtagccccaaagcgccaagatgattctattccagttgaaaaactgcagatcccacaggttgatgattacagctggctagatggttatcagcaatcgattgatcatgttcacaacttaagaactgtttattctggtgtcagtgacagcactgcatttgccactccattccccttccctgggaaacaacagttatctgggatgcatgcacaaggggctacaaatgaaaagacatggcaagatttccgtctttttgagccttcaaaacagaacatgctccaaaattaccaccaaagaaatcagcaaaatggtcaaatagctgaacaagagccagcaaattctgtctggtctagcagttaccatgtgtgattcagtaacttgtaccaggatgattgctggagttgctggggactattggattaagtggcacagcctgatctattgagcttggcccgtacctgcagcactctgttaaatttcttttgagcatggtggtctttgaagcatgacaatggctgctcttaggtttgggattgccaccatcttctgggacaaagagggagtggaggatgattgatctgtcggcagtctgatggggatgaattatacgaggtcttcaacgctgacacaaagggttaatgaaacaaactcgaatccagtgattataggcgctccgcacggaccatatgattcatctctcgttggacatgtagctacaagaatggtgtcagtgggcggttgctgccgcaactaaaagtccattcagtgtggatgtcagttgggctacgctatctaagaataaaaagtttgaggaacaacgagcatgttgccaagtagtttcttaagtataagttactgcgtctagttatattgttcctttcctttcggaaacaatgtgtcatgttgctgtcgcgctagttgcaagttgcaattaaacgtttggaacagtttgtcatgttatttgtgtggcttctatatggctatatgtttgctggaactgtatggaccaaccctcggtgctacctacaaaagtctatgatttgactgaatatcttgtatgtttctattatgctcattgattttggaacaatagtcaatttagcctaccccaacttgcaaattggca

SEQ ID NO: 2833 - DNA, 1739 bp, Zea Mays
aaccacataccaaccattgaacatcttctgtggccagccggcatccgtgcagccgccagcaccagcaggccatgacatggcaccatgtttgagctgacagctgactagctgagcgtgccgccttgccgtgtcggggagctgagctgagcctagagacgccaaacggaatggcgaaagcgaccggccgcgcggcgggcagcaggagctgcatcgagaggctgcctgcgccccgcgcccaatcctcttcctaaatcctaatcccctccgcctcatccccttcaaccccacgtctctctcgccgaaggctccggcctcgtcgggatccggtgctggattgacgcaatggcgccgctccacgccgcgctgccgccgccctcctccgccgccgctcaccaccacgcggcagccccgcctgtcttcctcgcccgctcgccgtaccacccccgcagggcggcggcctcctgcccgctcgccgtcgctgccgctccctcgtcgagaaaagcgttcttgtcgtgcccgctgctgggccactggaccacggccgcgcctcttccgcctcaacgagctccagctgtcggacgccgagaaggcccggatataccacttctacatccccgtcttcctctggtgcgaggacgaggtcatggtgcacagagccaggtacaacgacggcgatgacatcccgccattggtgatcggggtcagcgctccccaaggaagtgggaagacgactcttgtgttcgcacttgattatctttttcgggttgctggtaggaattctgccacattgtctatagacgacttctatctgacagcaaaagaacagaatgaattgagggacagaaatcctgcaaatgctcttttagagttccgcgggaatgctggaagccacgatctccaactctcagtggaaacactcgagtcactgatcaagctaacgaaggaaggtatgaagatgaaggttccacggtatgacaagtctgcgtttgggggaaggggtgaccgggctgatccttctgtatggccagaggttgaagggcccttagaggttgttctgttcgaaggatggatgcttggatttaaacctcttccaaatgaagttgtgaaagaagtggatccacagctggaggtggttaacaagaaccttgaagcatactctgatgcttgggacaggttcatccagtcatggattgttattaaaataagagaacccggtagcgtttaccagtggagactgcaggcagaggtcgctatgagagcagatggaaagcctggaatgtctgatgaggaggtgtgttctctgacaaagctactcactattttagaacaatccctctgttatcctagtaaccttggagccttactgatggttctgtcatgtggtttcttcggttatggattttgtatcacgctacctaccggcataccatgcatatctgccaacactgtacaaagaggggccgaatggttcgaatccagatcatctgctggtcatcgacatagacgaaaataggaaccctatctgtggtggatcatgggacatctcatgtttgtgaaactacttttatgatgggccgtcaaacaccactggcctcttgttgccctacactctggtagtgtaaatctgtgaattccatgtaaatatgaatttcgcttcttaaggcactttttaatctggcatggtctttagcttgaacatcggccataagtttcttatgatatatgtcggtacccactcc

SEQ ID NO: 2834 - DNA, 1777 bp, Zea Mays
aaccacataccaaccattgaacatcttctgtggccagccggcatccgtgcagccgccagcaccagcaggccatgacatggcaccatgtttgagctgacagctgactagctgagcgtgccgccttgccgtgtcggggagctgagctgagcctagagacgccaaacggaatggcgaaagcgaccggccgcgcggcgggcagcaggagctgcatcgagaggctgcctgcgccccgcgcccaatcctcttcctaaatcctaatcccctccgcctcatccccttcaaccccacgtctctctcgccgaaggctccggcctcgtcgggatccggtgctggattgacgcaatggcgccgctccacgccgcgctgccgccgccctcctccgccgccgctcaccaccacgcggcagccccgcctgtcttcctcgcccgctcgccgtaccacccccgcagggcggcggcctcctgcccgctcgccgtcgctgccgctccctcgtcgagaaaagcgttcttgtcgtgcccgctgctgggccactggaccacggccgcgccgccgcgcgccatcccctcctcgtcgtcgtcgtcgaccccggcgctcatcgcgtccgtgcaggacctgtatgacttcatctgctgcggcccgctggtggacaggatcggctacaccagtgagaagatcaccgagtccatcgaccgctggcttctcgccggggctagggtggcgcgcctcttccgcctcaacgagctccagctgtcggacgccgagaaggcccggatataccacttctacatccccgtcttcctctggtgcgaggacgaggtcatggtgcacagagccagatcggggtcagcgctccccaaggaagtgggaagacgactcttgtgttcgcacttgattatctttttcgggttgctggtaggaattctgccacattgtctatagacgacttctatctgacagcaaaagaacagaatgaattgagggacagaaatcctgcaaatgctcttttagagttccgcgggaatgctggaagccacgatctccaactctcagtggaaacactcgagtcactgatcaagctaacgaaggaaggtatgaagatgaaggttccacggtatgacaagtctgcgtttgggggaaggggtgaccgggctgatccttctgtatggccagaggttgaagggcccttagaggttgttctgttcgaaggatggatgcttggatttaaacctcttccaaatgaagttgtgaaagaagtggatccacagctggaggtggttaacaagaaccttgaagcatactctgatgcttgggacaggttcatccagtcatggattgttattaaaataagagaacccggtagcgtttaccagtggagactgcagaggtcgctatgagagcagatggaaagcctggaatgtctgatgaggaggttatggattttgtatcacgctacctaccggcataccatgcatatctgccaacactgtacaaagaggggccgaatggttcgaatccagatcatctgctggtcatcgacatagacgaaaataggaaccctatctgtggtggatcatgggacatctcatgtttgtgaaactacttttatgatgggccgtcaaacaccactggcctcttgttgccctacactctggtagtgtaaatctgtgaattccatgtaaatatgaatttcgcttcttaaggcactttttaatctggcatggtctttagcttgaacatcggccataagtttcttatgatatatgtcggtacccactcc

SEQ ID NO: 2835 - DNA, 523 bp, Zea Mays
gtaatttcctcaccttaattagcttgtttcctagaactcgagactccttgcaccctggaacggagcgaagattacagtgcctgtgaagttcatagctggcgataaggacatcggtgcccagtcctttggaactggggagtacatcaagagcgcggagttcaagtccaccgttccagatcttgaagtcaccgtcatcgaaggccaccattttctccagcaggagcaggccgagagggtgaactcggagatggtttcctacctcgtcagctggtggctgtgacccgttcggtgatttaggagaagcaatctctcgttctttcagcagctaggtgtggtgtggacagaagcaagcttcgcgtgggaaacttgctcgatgccaggactaccgcctacgctctagtctccagtggcgctcgtcgctcaagggcgtcgcgtccattgttcgttgatgtcaattgtcaagaatgactgctctccagctctccctcctcctctccattgttctgttctgtttcgttcagcg

SEQ ID NO: 2836 - DNA, 2106 bp, Zea Mays
cgacgtcctcctcctcctcctcctctcccttccctattctttctctcacacgctaaatggatgggcacgctacgccgtattcctcccccgcagccgcttccttcgcccacacgcccccgcgctcggaatactccgaggagggtgctcgaggcgaaccaagggcgatggttcatctcgctttcgtctcgctgcgtgcgctctctgtcactccccctctctctcctcatcagatccggccacttcctgctcgcctcgccaccggtcccgcgccccggaaccctagagctctccccgcggcagggccgccggagtccccgggcgcgtggagaaaatggaggcggcgctagaggcggcgtgtcaaggacaccaaggagcgtctggccggggtcaagcggctgcacgaggcgcttgacgccgcggcgcggcgcgcggcggccgaggtcaccacgctggtggacacctgcatggatctgacgcgggatgccaacttccgcatcgcccagggcggcctccaggcgctctccgtcgccgccgtcgtcgccgacgaccacttcaagatccacctcaacgccctcgtccccgccgccgtcgagcgcctcgacgacggcaagcaacccgtccgcgacgccgcgcgacagctcctcatcacgctcatggagttgaaagagctggtagttatgcatggactcataagatttggagggtgagggacgagtttgtacgtacggtggcatctgcagttgggctatttgcttctacggagatttccttgcaacgagttttgctttcacctgtcctgcaactaatgaatgattcgaaccaaagtgttcgagatgctgctatctcttgtattgaggttagttgattccatattcgatactgtatagacctgtttcagccgacatttttcttttttcccttacacccatgatgactggtatgatctctatttctattgatcttgttcaatttcccattagttccatcccacatttacaagctggagagactgaatcattttgtatgacaacattcattgtagctccaagcccctttgcttctagttgaattgttttagtcccttgtgctcagattcatcttttctttcatctaaactattcagtgttcacagttattggctgggacacacacctgctatctaggcagcataaagtttttctagtaagccttcatttgtttttcactacaggagatgtacaagcacatgggatcacaatttcatgaagagttgcagcgccataatctgccttcatatatgctaaaagaaataaattcaaggttggataaaatagaaccaaaggttcgatcatctgatacagcaatgcagtataaggctgtagagtctagaggcaatgctgggatgtagcctgttggtagtgggacaccttcaggttctgttattgatctggaaaatgaggaatcaggttcaaaaggtaaaaggccattaggatgggactccatgaaagcatcaaggaagaaggcaatgtccagttcctcccagtctactgactaccttttaagaattcatgacattcaaatagcaagactgaagcaaagtgaagaaaaatcaggtaagaaacaacagaatattgagttcttgaaggaagttgaactgaaaaagttggaggtccaaaccaaggaactagaaatgcagcaaaccaaaatgatgattgaagaaaggatccgaaaggacgcagagctgaaggaactcctagctatggaatgttttaccagaggatgtgagacctgtatacatcgcgaggagaaaaggtttaatcgagtttttcatcaacaatcctgtctgaagagtactattgtatttcataatttgttgcgaacctagtgtcggcgtaacgtggtccggtgtgttcggacatatgtcatttcgagatttttgaacatttgcttaattgtttgagaacagtagcttggtttttgaactcgtgtcgtgtactagaagattgcgaaatttttattattaaaaaacatataattccaactatttatgactaacgtatttatattaattacgaagtttgctaattaattgtatactaagtgacggtcgcgcactgttcatagagc

SEQ ID NO: 2837 - DNA, 2245 bp, Zea Mays
cgcctcgcctcgcctcggcccaccggacctcgtagccgccctctgtcgtgtttgttccttgctagttctcgtcggcgccgtctctcccacgccgccctctgtcaccagcccaccacctcctgcgccggcgctcctccgagacgcagttcgcctccggaattcgatcacttcgccgccgctctcgcctccgcccccagggcaggccgcgaagtggcgagaagccttcccactgagcaaaggtcctaggttcgatgcagcctctcggcaaaatgcaggctggctaaatacaacaatgatggagaacaggatgactttgaatccaactgatcttgatgattttgacaagctaggaaggatttgatgtcaagaggtgtaacgggaggcagtagaatgaatctggggaaggcaagaggtggtgtgtttactacatgtggtgctctgttgcttcttcacagctggtagtaacacttgaacttgttcattctgtctatggtggcggtggcgagggacgcgtacgaagccgccgacggtgcgcatgcacaggcctcctctgcgtgctgacgagttcaggacgctcgactaccgccggcgttcatcttcgacggccgcgacgtccgggagcacctttgcatgctgtcccttgtcgacggcggccggagcagcgctactgctagcaggtggcaacgatgacgacgacgtcattgacacggaagccactggcggcgccgccagagcagtagtaggcggcggcaacaacgacgtcgttggcacggaagccactggcatcgacatcgccgcctgcagctcctgctggccgttgtcgagagcgttgtgccgaggcgcgagtgtcgtcgtcgtcgggaggaggggcggcaggtggtggtcgttgacgcagctggcggtgccgctgtaggggttgctgtggtagtggtggtgcgcggaggaggcagcagagaattcgacgaacggcaggtggtggcggccgtcggcggcgtggttggcgcgcgggaagcaggcgacggcggtgtggtggcagtgctggccctcgtaggtggtgatgacgacggaggggtcgtcggaggagcgctccacgcgcttcttcaccgtgcacttgctgttggtgcagcggtagtagctcctgctacgtacactcatccgtgactcgatgattctagagctagctagctagcttgaggggtttaattttcagagctagttccagatgccatgcgtgcagtagccagtaggtacctggggaaggggctgttcttgacggccttctgcccgtacttcctccagcggtacccgtcctccaggtggtccacgtcgctcttggtcatgaaggcgaaccgcggctgccgcgcccgcttctgccccgccgacgacgacttcgtcatcgtcgtcttccccgccgccggtggcttgctcctgcatgcaaacaagcaaacaagcccacaatgatatgggccgggcttaattaatctggcaagggaaggaaggacgactgagatggagacgaaggctactgagcacaggcacttacgctgcttcggtggtggctgcggccgccggcgccccgtcgtcgtcgtcggtggagctggacctggacgacacggcggccggcgccgtcgccagtaccgccgcctggtgatgatgatcctcaggcggcggcagcagcatcgacatcatcagctcctccgccgccgtcccgccggcggcggcccagcaccctgcggcgagctccgcgaacatcgccgaggagtcggcgccgtacgcgtcgtcgtcggccgtgaagggccagtcgccgccggcaccggccatgggtcctagctattagttcagggcaaggccaacacactgctagctaaggtacacgtcgccgacgatctcagcagcagattcgcttgtgtggtgactctctagctcgttgatgtagtatttattgtttcactgggtggatttaatttaatactggatctccggacagagggagtacgtacatcctagctatcactcagatagtgagatcacactctgctggctggcccattaattcattctaccgatcgatttctcgatcgtttaacgcaacaacaactcctatctacctcatcctagctaggtcatggatcaagtgtttttactaggcatgcatgggggaaacaagaagaaaaataaaaataataatcacatctcttctatttcgtcagtctccatcatccatcgatgacacgaacgagctgac

SEQ ID NO: 2838 - DNA, 3371 bp, Zea Mays
cgcctcgcctcgcctcggcccaccggacctcgtagccgccctctgtcgtgtttgttccttgctagttctcgtcggcgccgtctctcccacgccgccctctgtcaccagcccaccacctcctgcgccggcgctcctccgagacgcagttcgcctccggaattcgatcacttcgccgccgctctcgcctccgcccccagctggctaaatacaacaatgatggagaacaggatgactttgaatccaactgatcttgatgattttgacaagagaaaattgccatcacctaggttccaggttgaggttgtcctggtagattacgatggctcgcaaccaccaaaaccagccgctggagcagttgataataaatctgatgccgattcctcggctagcacggctgtgaaagaaaatagtgttgcgcctgcagaatccaacaaggggactggaagcaatgataaagatgaagtattctcggacagtgacgacggggaggatggatcatctaaggaaagaaaggagaggactgctggcgcggtggtcaaggcagtgtaaatgctgctaaaccatctcaaacaagcaacgtggagaaggaggcatcggccgctgctagcagacttgataaagtatagctgtaaccaggaaccagcgaacaaggaaccacgaaggcacctgatgtcacatctctcaaaactgaagtcagcagcaagggcagctccaccgcagctgctgactcttccagcatgagcgaattcaaggcgatcgcagcagatgcctcggtgtttatgttcggagatgaagacgatgattatgaaagtgaatagtgcttctatgtgtgttccgttgtacagtttggttccctctagtccccctctcggcctctcccacccacccaaaaaaaaacacagcagctgagaaagagaagtcgaaagaagttatgcctgtttgattgctaaatatgccacatattggctaaaattgaagaactaacattagatagaaaaagttaggcaaagtgtgtcaagttagacagagaaccaaaagcgtcatcagtctgatattgtacccagatgaaacttgctgtaactcaaccagggctgaaccttgttgataactctcctacttcttaacagaaaggaaatcaaatagagcaatcactgctaagagttgaagtgcgcgtgtacaggagtattctgtacttgaacttgtgcgattcatttcttggcttgtttgtatagctaggaaggatttgatgtcaagaggtgtaacgggaggcagtagaatgaatctggggaaggcaagaggtggtgtgtttactacatgtggtgctctgttgcttcttcacagctggtagtaacacttgaacttgttcattctgtctatggtggcggtggcgagggacgcgtacgaagccgccgacggtgcgcatgcacaggcctcctctgcgtgctgacgagttcaggacgctcgactaccgccggcgttcatcttcgacggccgcgacgtccgggagcacctttgcatgctggtaagtgcttgccgattgctattatttgcttgacagttggtaccgtagctatatatataattaatatgtatgtatatgcatatgttacaatcaattcttcctgtctctgtccaattaatcagaaatcaaataaactgatgggcagctccatcgtatgcttcatcattgtactaattagctagccgagtaattaatcaactacccgtgcctcatcgccggcggcaccatgtcgtcaagaagtcccttgtcgacggcggccggagcagcgctactgctagcaggtggcaacgatgacgacgacgtcattgacacggaagccactggcggcgccgccagagcagtagtaggcggcggcaacaacgacgtcgttggcacggaagccactggcatcgacatcgccgcctgcagctcctgctggccgttgtcgagagcgttgtgccgaggcgcgagtgtcgtcgtcgtcgggaggaggggcggcaggtggtggtcgttgacgcagctggcggtgccgctgtaggggttgctgtggtagtggtggtgcgcggaggaggcagcagagaattcgacgaacggcaggtggtggcggccgtcggcggcgtggttggcgcgcgggaagcaggcgacggcggtgtggtggcagtgctggccctcgtaggtggtgatgacgacggaggggtcgtcggaggagcgctccacgcgcttcttcaccgtgcacttgctgttggtgcagcggtagtagctcctgctacgtacactcatccgtgactcgatgattctagagctagctagctagcttgaggggtttaattttcagagctagttccagatgccatgcgtgcagtagccagtaggtacctggggaaggggctgttcttgacggccttctgcccgtacttcctccagcggtacccgtcctccaggtggtccacgtcgctcttggtcatgaaggcgaaccgcggctgccgcgcccgcttctgccccgccgacgacgacttcgtcatcgtcgtcttccccgccgccggtggcttgctcctgcatgcaaacaagcaaacaagcccacaatgatatgggccgggcttaattaatctggcaagggaaggaaggacgactgagatggagacgaaggctactgagcacaggcacttacgctgcttcggtggtggctgcggccgccggcgccccgtcgtcgtcgtcggtggagctggacctggacgacacggcggccggcgccgtcgccagtaccgccgcctggtgatgatgatcctcaggcggcggcagcagcatcgacatcatcagctcctccgccgccgtcccgccggcggcggcccagcaccctgcggcgagctccgcgaacatcgccgaggagtcggcgccgtacgcgtcgtcgtcggccgtgaagggccagtcgccgccggcaccggccatgggtcctagctattagttcagggcaaggccaacacactgctagctaaggtacacgtcgccgacgatctcagcagcagattcgcttgtgtggtgactctctagctcgttgatgtagtatttattgtttcactgggtggatttaatttaatactggatctccggacagagggagtacgtacatcctagctatcactcagatagtgagatcacactctgctggctggcccattaattcattctaccgatcgatttctcgatcgtttaacgcaacaacaactcctatctacctcatcctagctaggtcatggatcaagtgtttttactaggcatgcatgggggaaacaagaagaaaaataaaaataataatcacatctcttctatttcgtcagtctccatcatccatcgatgacacgaacgagctgac

SEQ ID NO: 2839 - DNA, 2408 bp, Zea Mays
gtttgtactgccttcgaatggcatgcagtgcagcatacagcagtgtaccgtgtgacgctgtggatatctgacccactctcgtcgcacgcaacgcaagtagcaaagcaggacccatcctctcccatctctcggtctccccatcccaacccgccgccgccgccgccgcttctcccgtctccagcgcccacagcgccattgtatccgcggggcgagctgagtcaccaagctggtctagggcccatccatttggaaccctcgcgagaagcaaagcggacggagcgccagcgttcttagatcgattgctcgccaggctgttggcgaggagtcgtcaaccctcacggcagccatgtctgtggagctcatcctgtggcttttctccttcgtctccgtcatggtcctcatcggcctcaccgcataccagcttatctgtctgtcagatttggagtatgattatatcaacccatatgattcatcgtctcgcatcaacgctgtggtgctgatagaatactcactccaaggggccctgtgtgcttctttcctcttgacattgcattggttcccgtttctagtcatgacaccagtaacatactaccatgtcaaactgtatgtattacttgctttgggttgatgttaattctggcagaatactcatgatattcagcattggatatcatgctgttcatacttttggctgtattcacatctttaaataatatttaaaatgatctacaactctcaatggctcaatgaaacagctaagtaagaatatatatattttagaatttagagattgtgatgttatgcttctagagtgataatttgtagttatctgcttgttctgggccatggtgtattgtctggtcctggagcaattccttctctgaaaatgggagaatattgatcatggtattaacaaatgggagaaggtagtgcacctgttctagtattatacctgtccagattttgtaggcctcactaccaaaatttgttagctatttaacttttattattgctggaatatgacaactctgaatcatgctatgtgcactttatttgctgagatatatatattttttatttttactagtatgtgctagagaagaaccataagtaatatttttgttgtaattatttagtattcagcagttcagcatgaactgttgattccacatatagttggcttaacaatgattaatgaaagtggttcttagtttgttctggtagggtacagctataatttagctggactattctctgggtgacaactgattttagtccatcagatatgagcaagcacccaattttttattgttacatgtggaaagaaaatctcccttgaccctgttcttgaaattttacagtcatgacaatagtttctaagcactctgcttgagttttcagttgatttagagttcttttttccactgttgaggattaagtataatgccccctggcattggaactagttttgatctcatgaactagtgaacttattttggtatttggctcggaaacatcttgtagatgtcactgaaatttttagacaattaagtgacgagaagaagtacaggatgatcaagcttgccttctacttctgcctatttattataactatttacaggcttgtaatgacagctgtgatgttgtttattgatgaggacataaatttggcagaaactaggagtatctagacttcgccaccaacttgtcatggggatggagcagagttgtagcttgaaccagggagaccacaactcaatgccttgacttagttgtgagaaacaagatcagtttgtgccctgtagctggaggagctaacctggtactccttttaccctaaatcgtaagttgttttagttttttctagatgcatagcttttacgatgtatcctccagatgcatagtaaaagttatatatttagaaaaaacagaacaacttataatttggaatggagtattcatttcatccatcagattgtgatgtacaatgaattcccatagtttggtccatcggtaccatgtttgtaaattgggcagtcaatgatgtgcatcactgcaggatgaacgcacgtttggtaattgttgtgcaattctttgtacttgtggacaagtgctgtattctacacattgtttgcatacagacgatgtgtggttggtgtcataatttaccactaaacctttggtaaactgagcctgtcataactgcgagaaaagattggtaaaaaaactaagttgggatagaatgctaataaagtccggcaccctgtggttatggcaacacctgcaaaaaaaggtgctatagaatgactaacatgtggttactgaagattacgaacctagatattgagttgaactaaaacacgccaaataaaaattttgaactaaaagacgacaaataagaaaacacg

SEQ ID NO: 2840 - DNA, 5644 bp, Zea Mays
aattggagccctcctccccccgcatctagggtttcgcccatggaccccgccgccggcgggggccggggccgggaccgggcgggcttcgagcgggcgtgccggctgcccaacaccgtccactccgaggtcctgccgtcgctgccgctccccaccctcccgcgcgagctcggcttcgacgcgctccgcgacgacgagcccctcgccgcgcccgaccgccccgacacgatcatgcaggccgccaacatcgcccgcgtcctcgccgacaccgacgtctcccacctgggcttcaccgctgcggacaacgtcgacgtggaccccatccgctgctcctggctctggagggaggtgctcaagcacaaccccgacgctttcaaggtcaaggcgccaagtccgtcttcgcaaggtccatttggaggcccaggatatcaaaatcaagaacatgagaagcactttgagcattttacacctaatacgagcaaagcacgaaatgaatctgcatttcctcaggatgaaattgactcacatagagagcatttttatattcaattgcttcaaagaagccaaaaataaggaagagagaaaataacaattctgtttcaagttctgctcccagcattcctaatactcaagatgttatcactaccttctgtgaggtggtggaggatttctgtggaaaaaccgaaattcctgatgatggagatggcggtgactggttgtcaatcccacttggtgatgttaaggttctcgtgaatgaaattacatctgttcgatccaaaaggatattgcatgaggttcctatggatacagttacaaggttattggatgtgattgaccgtcagattcgatattctcaaggtttgtcgatagatgtgaaagaaaattctgatgtcgttgatgctgaacctctggttttctctgctttggaggccagtcatgctgcgttggcaattatgacccaccatgatatgccaaagcaactgtaccgagaagaacttattgagcggattattgatttctcaaggcatcagatcacagattgtatggcagcaagtaacccaaccttccgagctctctacaaaccagctgaaaatgttgcaaatgatggagatgatgatgaagatgatttggaaaatggacaagttagcaagaggagacgtactgctactaatttgagcatgagaaaatcttcaaacaaactttctgcttctgtttattctgctgtgcagaaactatgcttgatattgggctttcttaaggaactgctcacaacagtgcgcttgtcagatggttgtattctgcagttagcgaaaacatgctttactacattcttggtggataatatgcagctattacaattaaaagcaatcggggttatttgcacggtgttttcgtcatacacacagcacaggagttacttggttgatgaaatacttcaccttcttcgcaagttgcagttttccaaaaatgccgtcagaacctaccatctagcagatgaagaccaaaagcaaatccagatgataacagcactgttagttcacctggttcagtttagtgcaattgttcccaatagcttaaaaggaacagttgattggaccactattgttgatgcctccggagatgctgattattatccaattaaatgccatgaagcggcaacagaggcttgttgccgtttttggactgatgtccttcaacgttttactgctgctaaatctcaagatatgtcggaaaccaaaggaataatagataatcttgttcaggatttcctaatgatactaaacttgccggagtatccagctgctgcttctatccttgaggttctctgtgtgttgctccttcagaatgctggattgaaatctaaggacactaatgttcggtgctttgctattgatcttcttggtggtattgcatcaagattgaagcatgattcggtcatctgtagtgaagagaagctttggatattgcaagatctcactgatgcaggtagcgatggctcaaaaatcttgaaaaacaagtgctgtgtttgtcttggtggaagagctcaatgtgctacagacgtactgtcagtcacaaattaaagaaaatggcaaaaaaactgctgcgtctactagtaagaaatctgctaaaccagctgaggtgccagcagtggatattattcaacaaatactactgagttatctccaagaatctggtccacaagatgatgggaacctgtttactcgatggttctatctgtgcatctggaacaaagaaaaccaacattctcaggaggagatcatctactatctcgctagattaaaatcaaaagagattctgcgagattctggcaatggtctggcaatttccagagattcagcaaagaaaatttgcttggcacttggtcagaagaactcattttgcaggggttttgataaaattcttgctcttcttttggctagcttgagagaaaattctcctgtaataagagcaaaagccttgcgtgcggtcagcagtatagttgaagctgaccctgaggtcttgggtgacaaacgtgtccaatctgctgtcgaagggaggttttgtgattcggctatttctgttcgtgaagctgcccttgaacttgttgggaggcatattgcttcacatcctgatgtgggcctgaagtatatagaaaaagttgctgagcgaataaaggacactggagtcagcgttcgcaagcgtgcaatcaaaattataagggatctatgtgcttctaatccaaacacagacacaacacatgcctttgtggagataatttctcgtgttaatgatgaggaatccagtgtacaggatcttgtatgtaaaacattttatgaactatggtttgaagaaccaactgggagccataagcacttggttgctgatggaagttcagttccaatggagatagctaaaaagactgagcaaattgttgacatgttgaggaagatgaccaatcaccaacctctgattaccatcataaaacgtaacttgactcttgatttcctccctcagtcaaccaaggctgcagggattaactcatacatggtggcatcaattcagaagcgttgcgaattaatatgcaaacgcttattagaaagaatattgcaggttgaggagggagctgctaaggagatggaaatccacatgcttccttatattgttgctttgcaagcattttgtattgttgatcccacgctctgcattccagtaactgatccttctaagtttgttgtgacactacaaccataccttaatattcaggttgacagtaaatcagctgcccagttgcttgaaagtattatttttgtgattgatgctgttcttccactcataaggaagccaacacaaaatgttgttgaagaacttgagaaagatctgaaacatatgatagttcgccattcgtatttgacagttgtacatgcctgtatcaagtgcctttgtgctctgagcgagtcagcaggtagaggtccaggattagtggaaaaccttgtcaatattttctacaagcatctgtctggagctaattcagatagtcagttattgggtcgatcactgttttgtcttggactcctccttcggtatggttatcaattgatgcaaacatctgaaaatcagcttgattttcccaagattatcaacttgctccagagaaaatatcttctcagggatgattttagcttgaaggttcgagctttgcagactttgggatacatacttattgcgaagcctgaatttatgctacaaaaggatatgttgaaactcatagagacagcactatcttctgaggttgattatagattaaagattcaaggacttcaaaacctctatgagtatctcagagatgctgaaagccaacttactgccgagagcactgtgaaacctcctgtccggtgtgaaataaatggcagaagtaaagtgcctgttgctgctggtgctggagacaccaacatatgtggtggtattattcaattgtattggagttctattcttgaaaggtgcttggatacaaatgatcaagttcgccagagtgcacttaagattgttgaagttgtactccgccagggtttagttcaccctattacctgtgttcctcaccttatagcacttgaaatggacccactggaggggaactcaaagttggctcatcatctgctgatgaatatgaatgaaaagtaccctttattttttgaaagccgtttgggtgatggactacaaatgtcatttaaattctttgaatccatagtcagcaaccataagatggcagcaaacataaaatcaaatccaattgcatttgtcaaacctggcatatctagaatataccgtcttatccgttcaaatcgaaattccagaaacaaatttgtccactcgatagttcggaaattcgagtctgatagccggagtcgcagcacagttagctttcttgtatactgtgccgaagttcttgcctccctgcctttcacatgctccgatgaaccactttacttgatctatgatataaatcgaattattcaccttaaagctggaggagttgagagcaatttgaaaaggtggacttctatgtctcagtctcaaaatacagtggatatgccaacgttgccaggagagaggcatgttgtcatgcaagagcctggcggatattatgataacgtgggctatgcccatgaaagggtgaatgccaatccttgcagtacttcagacgtggacatggccaaagtgcaggttgacgtggatatggccaaagtgcagggagattgccttgatgcaatagcccttcagctactgctgaaattgaagagacatttgaaagttgtctatagtttagatgatgcccgctgtcagtcattttctctaaaggagcctccgaaatctggagaaacattctccaggcagaatattccttttaatgttagcagcactaacatcagtctgccgagctgcctgcaggacgtagcttctgtttaccaggatttcaagacagtgctccacgaagattccatggactttgctgtgttcatcccttcagtccagattaggaagcgcccaaccccgagaaatacgacaaacccaaccccaagaagtacgacgagggtcaggagaacggctgcctcgagtgttacaaaagcccgtggtggcgcacgtggcgatgactccgacgactccgatgatgacgactggaccgggggcccaagagtgcttgacttcagtgggggtggccgtgtgacaaggcagagggtccaagtatgatgactggtcttggtgcttttgtacattctagggaaacctatagcgggtagcagctgacacgaggagagttagggttgagttttaggtttaaagtcgtttagggtacatagaagcagaaaaggaaaggaagatagcctttttacttagatgccattgatttggagcactccttttcttgctctgcccctgtcctgtttgtaattccggtcgggctttggcaaaactgacaaacagggttgtgctccggcttctgatctgattcaatgggaatgaaattattccttttgctttgcctgtataataacagttaagcctatgtttcgtgtaattgtctgccttgctaatgttatatatctgtacgtgtgctgagccttttttgttgaagttcatagaaattgcc

SEQ ID NO: 2841 - DNA, 5842 bp, Zea Mays
tcctagtcggctagtcctctactctccattcatccccaccacctccacttgtcgaaattgaaactcaaatcaaatcgaaccacctccacctcggcaacgagcgaattccggtgcgaattggagccctcctccccccgcatctagggtttcgcccatggaccccgccgccggcgggggccggggccgggaccgggcgggcttcgagcgggcgtgccggctgcccaacaccgtccactccgaggtcctgccgtcgctgccgctccccaccctcccgcgcgagctcggcttcgacgcgctccgcgacgacgagcccctcgccgcgcccgaccgccccgacacgatcatgcaggccgccaacatcgcccgcgtcctcgccgacaccgacgtctcccacctgggcttcaccgctgcggacaacgtcgacgtggaccccatccgctgctcctggctctggagggaggtgctcaagcacaaccccgacgctttcaaggtcaaggcgccaagtccgtcttcgcaaggtccatttggaggcccaggatatcaaaatcaagaacatgagaagcactttgagcattttacacctaatacgagcaaagcacgaaatgaatctgcatttcctcaggatgaaattgactcacatagagagcatttttataatgaactgacctcagattcaattgcttcaaagaagccaaaaataaggaagagagaaaataacaattctgtttcaagttctgctcccagcattcctaatactcaagatgttatcactaccttctgtgaggtggtggaggatttctgtggaaaaaccgaaattcctgatgatggagatggcggtgactggttgtcaatcccacttggtgatgttaaggttctcgtgaatgaaattacatctgttcgatccaaaaggatattgcatgaggttcctatggatacagttacaaggttattggatgtgattgaccgtcagattcgatattctcaaggtttgtcgatagatgtgaaagaaaattctgatgtcgttgatgctgaacctctggttttctctgctttggaggccagtcatgctgcgttggcaattatgacccaccatgatatgccaaagcaactgtaccgagaagaacttattgagcggattattgatttctcaaggcatcagatcacagattgtatggcagcaagtaacccaaccttccgagctctctacaaaccagctgaaaatgttgcaaatgatggagatgatgatgaagatgatttggaaaatggacaagttagcaagaggagacgtactgctactaatttgagcatgagaaaatcttcaaacaagtacatgatcaatgcaattcaaatattttcttgtttctgaaactatgcttgatattgggctttcttaaggaactgctcacaacagtgcgcttgtcagatggttgtattctgcagttagcgaaaacatgctttactacattcttggtggataatatgcagctattacaattaaaagcaatcggggttatttgcacggtgttttcgtcatacacacagcacaggagttacttggttgatgaaatacttcaccttcttcgcaagttgcagttttccaaaaatgccgtcagaacctaccatctagcagatgaagaccaaaagcaaatccagatgataacagcactgttagttcacctggttcagtttagtgcaattgttcccaatagcttaaaaggaacagttgattggaccactattgttgatgcctccggagatgctgattattatccaattaaatgccatgaagcggcaacagaggcttgttgccgtttttggactgatgtccttcaacgttttactgctgctaaatctcaagatatgtcggaaaccaaaggaataatagataatcttgttcaggatttcctaatgatactaaacttgccggagtatccagctgctgcttctatccttgaggttctctgtgtgttgctccttcagaatgctggattgaaatctaaggacactaatgttcggtgctttgctattgatcttcttggtggtattgcatcaagattgaagcatgattcggtcatctgtagtgaagagaagctttggatattgcaagatctcactgatgcaggtagcgatggctcaaaaatcttgaaaaacaagtgctgtgtttgtcttggtggaagagattgtatgggggctgctagccaggataacttagagcgtgatagtgtttgccccttgtgtttttgcaaacaacagctcaatgtgctacagacgtactgtcagtcacaaattaaagaaaatggcaaaaaaactgctgcgtctactagtaagaaatctgctaaaccagctgaggtgccagcagtggatattattcaacaaatactactgagttatctccaagaatctggtccacaagatgatgggaacctgtttactcgatggttctatctgtgcatctggaacaaagaaaaccaacattctcaggaggagatcatctactatctcgctagattaaaatcaaaagagattctgcgagattctggcaatggtctggcaatttccagagattcagcaaagaaaatttgcttggcacttggtcagaagaactcattttgcaggggttttgataaaattcttgctcttcttttggctagcttgagagaaaattctcctgtaataagagcaaaagccttgcgtgcggtcagcagtatagttgaagctgaccctgaggtcttgggtgacaaacgtgtccaatctgctgtcgaagggaggttttgtgattcggctatttctgttcgtgaagctgcccttgaacttgttgggaggcatattgcttcacatcctgatgtgggcctgaagtatatagaaaaagttgctgagcgaataaaggacactggagtcagcgttcgcaagcgtgcaatcaaaattataagggatctatgtgcttctaatccaaacacagacacaacacatgcctttgtggagataatttctcgtgttaatgatgaggaatccagtgtacaggatcttgtatgtaaaacattttatgaactatggtttgaagaaccaactgggagccataagcacttggttgctgatggaagttcagttccaatggagatagctaaaaagactgagcaaattgttgacatgttgaggaagatgaccaatcaccaacctctgattaccatcataaaacgtaacttgactcttgatttcctccctcagtcaaccaaggctgcagggattaactcatacatggtggcatcaattcagaagcgttgcgaattaatatgcaaacgcttattagaaagaatattgcaggttgaggagggagctgctaaggagatggaaatccacatgcttccttatattgttgctttgcaagcattttgtattgttgatcccacgctctgcattccagtaactgatccttctaagtttgttgtgacactacaaccataccttaatattcaggttgacagtaaatcagctgcccagttgcttgaaagtattatttttgtgattgatgctgttcttccactcataaggaagccaacacaaaatgttgttgaagaacttgagaaagatctgaaacatatgatagttcgccattcgtatttgacagttgtacatgcctgtatcaagtgcctttgtgctctgagcgagtcagcaggtagaggtccaggattagtggaaaaccttgtcaatattttctacaagcatctgtctggagctaattcagatagtcagttattgggtcgatcactgttttgtcttggactcctccttcggtatggttatcaattgatgcaaacatctgaaaatcagcttgattttcccaagattatcaacttgctccagagaaaatatcttctcagggatgattttagcttgaaggttcgagctttgcagactttgggatacatacttattgcgaagcctgaatttatgctacaaaaggatatgttgaaactcatagagacagcactatcttctgaggttgattatagattaaagattcaaggacttcaaaacctctatgagtatctcagagatgctgaaagccaacttactgccgagagcactgtgaaacctcctgtccggtgtgaaataaatggcagaagtaaagtgcctgttgctgctggtgctggagacaccaacatatgtggtggtattattcaattgtattggagttctattcttgaaaggtgcttggatacaaatgatcaagttcgccagagtgcacttaagattgttgaagttgtactccgccagggtttagttcaccctattacctgtgttcctcaccttatagcacttgaaatggacccactggaggggaactcaaagttggctcatcatctgctgatgaatatgaatgaaaagtaccctttattttttgaaagccgtttgggtgatggactacaaatgtcatttaaattctttgaatccatagtcagcaaccataagatggcagcaaacataaaatcaaatccaattgcatttgtcaaacctggcatatctagaatataccgtcttatccgttcaaatcgaaattccagaaacaaatttgtccactcgatagttcggaaattcgagtctgatagccggagtcgcagcacagttagctttcttgtatactgtgccgaagttcttgcctccctgcctttcacatgctccgatgaaccactttacttgatctatgatataaatcgaattattcaccttaaagctggaggagttgagagcaatttgaaaaggtggacttctatgtctcagtctcaaaatacagtggatatgccaacgttgccaggagagaggcatgttgtcatgcaagagcctggcggatattatgataacgtgggctatgcccatgaaagggtgaatgccaatccttgcagtacttcagacgtggacatggccaaagtgcaggttgacgtggatatggccaaagtgcagggagattgccttgatgcaatagcccttcagctactgctgaaattgaagagacatttgaaagttgtctatagtttagatgatgcccgctgtcaggagcctccgaaatctggagaaacattctccaggcagaatattccttttaatgttagcagcactaacatcagtctgccgagctgcctgcaggacgtagcttctgtttaccaggatttcaagacagtgctccacgaagattccatggactttgctgtgttcatcccttcagtccagattaggaagcgcccaaccccgagaaatacgacaaacccaaccccaagaagtacgacgagggtcaggagaacggctgcctcgagtgttacaaaagcccgtggtggcgcacgtggcgatgactccgacgactccgatgatgacgactggaccgggggcccaagagtgcttgacttcagtgggggtggccgtgtgacaaggcagagggtccaagtatgatgactggtcttggtgcttttgtacattctagggaaacctatagcgggtagcagctgacacgaggagagttagggttgagttttaggtttaaagtcgtttagggtacatagaagcagaaaaggaaaggaagatagcctttttacttagatgccattgatttggagcactccttttcttgctctgcccctgtcctgtttgtaattccggtcgggctttggcaaaactgacaaacagggttgtgctccggcttctgatctgattcaatgggaatgaaattattccttttgctttgcctgtataataacagttaagcctatgtttcgtgtaattgtctgccttgctaatgttatatatctgtacgtgtgctgagccttttttgttgaagttcatagaaattgcc

SEQ ID NO: 2842 - DNA, 1824 bp, Zea Mays
ttcgcagaaaacccctcaaattctccgttcccttcgatccaccccgcatcccagggagtcctccactacagttcttgcccacctacggcgatggccggccgcctcccgggcgccgccgcgtcctcaccgttaccccgcgccctcctcctcatcgccgcgcttgttctcttctccatctctttcctctcactccgctccctgcgccccgcggcggaccccgcgcttgcgtccgccgccgacaagtaccgtcctcttctccggctccagtcctcctcgtcggtgtaccattctccggaggcgttcacagcggggtacgcggatatggagcggagcttcaaggtgtacatttacccggacggcgaccccaagacattctatcagacgcctcgcaagctcacggggaagtacgccagcgagggctacttcttccagaacatccgagagagccggttccgcaccgacgacccggaccaggcgcatctcttcttcgtgcccatctcgccccacaagatgcgcggcaagggtacttcatacgagaatatgacggtgatagttaaggattacgtagaaggtttgataaacaagtatccttactggaacaggacactaggagcagaccacttctttgtcacctgccatgatgtgggtgtgagagcatttgaaggacttccattcatggtgaagaactctattagagttgtatgttcgccaagctataatgttgactttataccacataaggatattgcgcttcctcaagtactacagccatttgccctacctgaaggaggaaatgatattgagaacaggacaactcttggcttttgggctggccatcgcaattccaaaataagggttatcctagcacgagtttgggagaatgacacagagcttgctatcagcaacaaccggatcagtagagctattggagagctagtttatcagaagcagttttaccgtaccaagttctgtatctgtcctggcggctctcaagttaacagtgcccgtatatctgattcaatacactatggttgtgttcctgttattctgtcagattactatgacctgcctttcaatgacgcccttgactggagaaagtttgcggttatacttagggagagagatgtatatcaactgaagaatatcttgaaatctatatcacaggaggagtttgtttcattgcataaatctctagttcagaaacactttgtgtggcattcacctcctgtatcctacgatgcattccacatgattatgtatgaactgtggctgcggcataatgtaataaagtactaagcttctcagcctctgagttttgatttctaacctaaatgactgatccatcggaaagatactacaaagtctgatagcctgctgttactgccttgaaaatgggcttctggttctttgttctttgaatcaccagatggatgattattgaatataatgttagctatgcatggtgcaatggagagcatttccatcgaagagttgaccgttgttcagcatatatggcaaaactgtagtcctggttaattgatggattacttgattcttttaacaatagttagctttcccatattgcaatctttccctctagatattacttatattccgtggatctgcttggttgattgcatgtattttctcgcgtaatttttttctgttcaatggtttcaggcatgtaagtaatgtacaatattattgatgtgaaacatagtccattttcttctgacagaacatgtaactgtgagttgtgacaaaaaacaatcatttgattttcggtctccttgaagtttcaagtaaaaaagaagccaatttcga

SEQ ID NO: 2843 - DNA, 1969 bp, Zea Mays
gtcctggtctccttcctggcttccaaacgaccaaaccccacggtgcggcacggcaaaaccacgcgaccaaccatgcccacacacctccatacccacagggcacgagcacaggcgccggcgcggcgtgtccaagcctccaaggccaagaaacacaaacacccacgcctcgcggacccggccgccccctcgccccgcccgcatcctgtcgacgacgacgacgtcgtcgtcgtcgtcgtcgtcgccctctttcctttcccgcacagccgcggctccatacgaccatacggcagccagctagtctagcttctccgccacagctcatcagggcgcagcaaccgcaaaccccacgcaggcgacgaaaagctgccgagccaccaccaggcaccagcagaggggagcaagcgaccacgcgggggaccgcgcgaccgagccactcccctcccctccctccctctctcttcgcctccggatctcgcatgcgcggtggccgccgccgccgccgcgcccgacggaggagggcgaggagtcagtgagggcgctggccggcggcgtgatggggggagcgcagctggtggggagatgggtggagtcgtacacggggatgtcgccggacaacatcaagggcctgctgctcgcgctctcctgcagcctcttcatcggcgccagcttcatcgtcaagaagaaggggctcaagaaggctggcgcgtccggcgtccgagcaggtgttggtggctactcatacttgcttgagccattgtggtgggcaggaatggtaacaatgattgttggcgaaatcgctaactttgcagcttatgcttttgctcctgctatcctggtcactccacttggtgcacttagcataattatcagtgctgttcttgcccatattatgttgcgggagaaacttcatatatttggtatacttggctgtattctttgtgtggtgggttcaacaacaattgtgcttcatgcccctccagagcgtcaaattgagtctgtggcagaagtgtgggatctcgctactgaaccggcattcctattctatgcagctgttgtatttgcagcagcttttgtgctcatatgccattttgtccctcagtatgggcagacacatatcatggtatatattggcatatgttctcttgttggatctttatcggtcatgagtgtcaaagctcttgggatagccttgaaggtgacattttcagggatgaaccagcttgtctattcacaaacatgggtgttctcatttgttgtaatcttgtgcatcgtaacacagatgaactatctaaacaaggccctcgacacattcaatactgcagttgtttcacccatatattacacaatgtttacatccttgaccatcttggctagtgtaataatgttcaaggattgggatcgtcaaaatccaacgcaaattgttacagagatgtgtggcttcgttacaatcctttccgggacttttcttcttcacaagacaaaggatatggtggatggtctcccaccaaatttaccaattcggcttcctaaacatgcggatgaggatggctatgcagacgacataattcctctcagatctgctgctgacgattccaggctcatacccagcagccgtcagtctatatacatgggaagcggaaaatatcccccaattcactcggttggagaccacaacgtaggttaactgtaggattcaacaggtaacaactcggctaaccccccaaccctaatttgagtcattggtacagaattttgacgattatatcagttgtatacttatccgggtaacatcatcaccaagatgaccaagaatatatgttttgggctatatgtatatcgcggtgagccatataggttattatgttatattgaattgttgtattctttcaacacaaacactctgaatacaggaagagttgaacaagcacatcatgccgttaaccatttaccacttttatctgaacacttg

SEQ ID NO: 2844 - DNA, 2158 bp, Zea Mays
agacagggacaaacccgtcacttgtctccgcgcccacggagttctccgtccccctcccaacaacggcaacaacaccgtgacccaccgcccgggtccacctgtcaacgtcgtccttgccccgtccccacaccgcctacacccactacgccacgtactctgtgggcccaccaaccgtccacgtcacccacccccctccgtcgtacaaacagcactctcctccctcttttaagaccttgccgggcacctcagtagtcactacctcactgtcccactcctccgtcctcgtcgactccgaagaggagaagagagcacgaatcgccggaggtggacgccaccggcgagtctcctttgggccacacgtaaggcggcgtagactgtagaggttgtttggttgtaataagcagcgcacgccgcacgcgccattcccgttttggttgccaagtgaagagaggacggtggttgtagttgtggttgtgttgagtggggaaggggacggtgcagctgtggaaagtagcggccgtcgatgacgtttctgttcccggcgaagaaccagcagggtacgatggagggcaggccgtctgcgccggcgagggtgtcgatgttccggaggctgatggtgcgggtgaccccggctgagcggctggctggtgacggcaaggagagggacaaggacgagaggccgccggcgtccggcgccggagcggacgcggaggtcgggtcggtggggctggacaagatggtgctcagcttcatggaggactcctccgcggccgcggagcggccaccgcgtgggcgatgcagcagctgctttaacggcaacaaccaggacggcagcgacgacgaggacttcgacttcctgccgtccgcctccgcccccgccgcggcgccagccgcggccggcgacgccttggagctgctgaagtgcgcgagcacgccggagcggaacctgctcgcggacgcgtcccggatcgcggagcgctgcggctccgggtccggctccggccggaagaaggcggacgtccggcgcgccgtggcggacgggctgcgcgcgctcgggtacgacgcggcggtgtgcacgtcgcggtgggacaggaccccctcccacccggccggcgagcaccagtacatcgacgcgaacgtggagcccggggccggggcggcggcccgcgtccgcgtccgcgtggtggtggaggtggacttccggtcggagttcgaggtggcgcggcccaccaaggcgtaccgcgccgcgctgcaggcgctgccgccgctgttcgtgggcagcccggagcggctgggccgtgtcgtgggcgtggtggcggacgcggcgcggcagagcctccgcaagcgcgggctccacttcccgccgtggcgcaagcgcgagtacatgcgcgccaagtggctgtccccgcacgcccgcagcagcagcagcgcggacaggacgccggcgcccgccacgccggtttccgccgccgccgccgccttctccggcgagttcgagctgtggttcgacgagaaggagaaaccgaaggcggcggactacgacggcggcattcctggcggagaagacgacggggcgggcaagaaggtcacggtcatggtgtcgccgacgccgacgccgtggcgtgcggaagagcccggggcggctagcaagctgtgcccgcaggccaagcggaaggtggtgaccgggctggcgtccctgctgccgctcgcaagctgatcaacatcaaaccaagaggagagactccgtccggctccaaaaaagttttcccttttcccacctctacctccagaagatttccattccccccgcgttcgtcgatccgtccgagggccggctccaggtgttttagcggttttccggcgcctcggaacagagagtgaaaaaaaagagagagagagaaacgcctccctttttccgtcgaatttttttcctttgttttgttcctgcgaaagaacaaaattttcagttgtccgccgccgggggaacgggaggaatccgggcagatttgggttccctgtcctctgttcttgggagggagagaaattatgaagcatcactgctgctatgatctataaaagcgggttgagtactctatcgtattcatcatgtcatgtcaggcctgtgacttcaattgaaagtaccataattactctgcaa

SEQ ID NO: 2845 - DNA, 1912 bp, Zea Mays
atgccttcagctgtgctgaagttgtttcacgtaggagccccacaggatggtacaggcaggaggatcaggccaccgtcgaggaacgcgctcttcgctgtgttccagcgagaagatgagggatcgagggcggcgcaggtggcgagctcgtgggcggaacagactggtgagagcaagaggatggatcaggagcttgagccccagagacatgccagtgaggagcagtttagtcggttcttgctttatgaagtggatgcaattagaaagacgtacgagcgggccaacatctcgcggtggctcgccttgggcaaccggacctgcccgaccacgatgcaggagctctaggacgacgccctcacccccaacgccactctccgacaactcatcgccgcctggttctcccgcctgtttatcttagatattgtttgaacgtatgggatgttggaggacagaagacaatcatgtcttactggagaaattactttgagcagactaatgggttagtttggtttgctgatagttcagacataaggaggcttgatgattgccgtgctgaactccacaatctcttgaaagaagaggataaaggtttacctatctaggcagtgttctattgttgatttttgcaaataagcaagacatgcaaggagctctaaaaccaactggaatcgcgaagattttacttagttcgatgtgggagcaaaaggatatgccaaattgaatgtagtttcatcagttatgctctattatggatgttcagaggcatccaatttcagtgtgtactgcaatacttgggtccacctagtcactctccgacagctcatcgccgcttggttctcctgtcggtacacaaggtttaagaagcgctacgcggacttccacggccgcgctgccgatctcgtccacggcctccggggcacggcgatgcccaggagacaggccctcgaggaagagcaatgtacagaagagaaaggtatctcgactattccaaagcacaagtatgcatccaaagcctgttccccaaaaggaacctttatctgcagctctctctgcgcttactcttgttgtgcaatttaatgggtggctatcatttttcctcttgctttattataaacttcctctgcggccagaaactcacaagacatactatgaatacactggcttgtggcacatctatgggctccttgccatgaattcatggttctggagtgccatatatcacagttgtgacacaatttggacagaaaaagctatatttttcatcagatgctgcctttctagggtattccctcattttgacgatagttgattaatcattctggaacttgtactaacaattgaagcaagtggaggcatagcaccaattgtgtctgtgctgcagctctggatgtcagtagacaagaggtgtatcagagagaagcacttcaaggttaatttgttgagcaaattggagatgctggattttgtattttggttgctcatgggtggtgaatgatctgacgacttcagaagaggatagatctgagattacctttcatgcatgtcaaggaagttaagtagctgatgccatcaaagcaatggagaaacgtcaggtgaaccgcgagcagaattctgtggcgcatttgttagcgcagttagttaggactctgttcatacaactgttcgattaagccaaatacctaatttagttttatattggttgttgtcaaagaatttgtgaaatattgaggttgataatatatgtggcgttcgtttttatgtaatcattgttcactaatattttgtcgaatattttatattatatagacattactaagaacgtaaggggtcgctcgtgctctgtaaaggtacaaacaatcatgattgtggaggagcgtgacggcgagggtcgattggcgtccgaccacgatttgca

SEQ ID NO: 2846 - DNA, 2261 bp, Zea Mays
atgccttcagctgtgctgaagttgtttcacgtaggagccccacaggatggtacaggcaggaggatcaggccaccgtcgaggaacgcgctcttcgctgtgttccagcgagaagatgagggatcgagggcggcgcaggtggcgagctcgtgggcggaacagactggtgagagcaagaggatggatcaggagcttgagccccaggaggggagctgtttgagcggatgcccaccaggaacaatgtttcctagatcacgatgtttgggccacttttggaagaggtcagggatgacatgttttcaagcttggaggacatcaccaacgcaccatatgcagatctgctctctattaattcaatgaggaaaggaaaggggtcatagaaattagtcttggcagatggaggggaacgtctcaatgactgaggcacatttttactaaattatccctaaattatttgtatttttaaaataacatgtaatcttgttgatctggtttactcaagatgcatcaagtttgtacttggagaagaatcctggagttattttacttgtttccttgatttgtagagacatgccagtgaggagcagtttagtcggttcttgctttatgaagtggatgcaattagaaagacgtacgagcgggccaacatctcgcggtggctcgccttgggcaaccggacctgcccgaccacgatgcaggagctctaggacgacgccctcacccccaacgccactctccgacaactcatcgccgcctgtttatcttagatattgtttgaacgtatgggatgttggaggacagaagacaatcatgtcttactggagaaattactttgagcagactaatgggttagtttggtttgctgatagttcagacataaggaggcttgatgattgccgtgctgaactccacaatctcttgaaagaagaggataaaggtttacctatctaggcagtgttctattgttgatttttgcaaataagcaagacatgcaaggagctctaaaaccaactggaatcgcgaagattttacttagttcgatgtgggagcaaaaggatatgccaaattgaatgtagtttcatcagttatgctctattatggatgttcagaggcatccaatttcagtgtgtactgcaatacttgggtccacctagtcactctccgacagctcatcgccgcttggttctcctgtcggtacacaaggtttaagaagcgctacgcggacttccacggccgcgctgccgatctcgtccacggcctccggggcacggcgatgcccaggagacaggccctcgaggaagagcaatgtacagaagagaaaggtatctcgactattccaaagcacaagtatgcatccaaagcctgttccccaaaaggaacctttatctgcagctctctctgcgcttactcttgttgtgcaatttaatgggtggctatcatttttcctcttgctttattataaacttcctctgcggccagaaactcacaagacatactatgaatacactggcttgtggcacatctatgggctccttgccatgaattcatggttctggagtgccatatatcacagttgtgacacaatttggacagaaaaagctatatttttcatcagatgctgcctttctagggtattccctcattttgacgatagttgattaatcattctggaacttgtactaacaattgaagcaagtggaggcatagcaccaattgtgtctgtgctgcagctctggatgtcagtagacaagaggtgtatcagagagaagcacttcaaggttaatttgttgagcaaattggagatgctggattttgtattttggttgctcatgggtggtgaatgatctgacgacttcagaagaggatagatctgagattacctttcatgcatgtcaaggaagttaagtagctgatgccatcaaagcaatggagaaacgtcaggtgaaccgcgagcagaattctgtggcgcatttgttagcgcagttagttaggactctgttcatacaactgttcgattaagccaaatacctaatttagttttatattggttgttgtcaaagaatttgtgaaatattgaggttgataatatatgtggcgttcgtttttatgtaatcattgttcactaatattttgtcgaatattttatattatatagacattactaagaacgtaaggggtcgctcgtgctctgtaaaggtacaaacaatcatgattgtggaggagcgtgacggcgagggtcgattggcgtccgaccacgatttgca

SEQ ID NO: 2847 - DNA, 2383 bp, Zea Mays
atgccttcagctgtgctgaagttgtttcacgtaggagccccacaggatggtacaggcaggaggatcaggccaccgtcgaggaacgcgctcttcgctgtgttccagcgagaagatgagggatcgagggcggcgcaggtggcgagctcgtgggcggaacagactggtgagagcaagaggatggatcaggagcttgagccccagagacatgccagtgaggagcagtttagtcggttcttgctttatgaagtggatgcaattagaaagacgtacgagcgggccaacatctcgcggtggctcgccttgggcaaccggacctgcccgaccacgatgcaggagctctaggacgacgccctcacccccaacgccactctccgacaactcatcgccgcctggttctcccgcctggtttctgcattttgttttcttatctgtcaatcatgtttttccatattactgcaggtgggtctgattaattatttaaatgtagtttatcttagatattgtttgaacgtatgggatgttggaggacagaagacaatcatgtcttactggagaaattactttgagcagactaatgggttagtttggtttgctgatagttcagacataaggaggcttgatgattgccgtgctgaactccacaatctcttgaaagaagaggataaaggtttacctatctaggcagtgttctattgttgatttttgcaaataagcaagacatgcaaggagctctaaaaccaactggaatcgcgaagattttacttagttcgatgtgggagcaaaaggatatgccaaattgaatgtagtttcatcagttatgctctattatggatgttcagaggcatccaatttcagtgtgtactgcaatacttgggtccacctagtcactctccgacagctcatcgccgcttggttctcctgtcggtacacaaggtttaagaagcgctacgcggacttccacggccgcgctgccgatctcgtccacggcctccggggcacggcgatgcccaggagacaggccctcgaggaagagcaatgtacagaagagaaaggtatctcgactattccaaagcacaagtatgcatccaaagcctgttccccaaaaggtgcgtgaactttgttcttgattttgtcagactaaatgtgggtgaactttgtactgcagtttttgtttaaataaactttggactgtttaaattactgatgcatccaaccactgtttttctttattgtttgttgatacacgaccagatgcccagttgagttcacccaaaaggtttattacaacacgaaaaaatctgagataaaatgttttttatttaaatgaactttgtattgcagtatttatagacatattttggcacccggtcgtttactatttttgttttattaatacctcttgtgtttccctttcacttcctttgtataaactgtatgcctctgttttcattctcaggaacctttatctgcagctctctctgcgcttactcttgttgtgcaatttaatgggtggctatcatttttcctcttgctttattataaacttcctctgcggccagaaactcacaagacatactatgaatacactggcttgtggcacatctatgggctccttgccatgaattcatggttctggagtgccatatatcacagttgtgacacaatttggacagaaaaagctatatttttcatcagatgctgcctttctagggtattccctcattttgacgatagttggtgagcatgtagtagcaagtttcatgggctctggtagattaactgacctttgtgtgttccattagcctgtgaagttcgaaactggtcatattgctaagaattctaggaggttactattagggcctagagtaaatgactacgtgctgatgaaaatctgttcagattaatcattctggaacttgtactaacaattgaagcaagtggaggcatagcaccaattgtgtctgtgctgcagctctggatgtcagtagacaagaggtgtatcagagagaagcacttcaaggttaatttgttgagcaaattggagatgctggattttgtattttggtaggtgatgtatgcttttcagcatggcgtattttattgaactggtcaagtcctgcagaagctgaaactgatcatggataagactttgccttgtgtcacaatgggtgcatttgctggtggtccttggatcaggttgctcatgggtggtgaatgatctgacgacttcagaagaggatagatctgagattacctttcatgcatgtcaaggaagttaagtagctgatgccatcaaagcaatggagaaacgtcaggtacaaacaatcatgattgtggaggagcgtgacggcgagggtcgattggcgtccgaccacgatttgca

SEQ ID NO: 2848 - DNA, 2652 bp, Zea Mays
gatgctcagcacacttatatgatgcattgttctctcagttttttccagcctgtataatgataagacacagggagcaactgcatgagcgggagcaatacattcttgaactagaaatgaaactcaatgacaaggatagagaactaaatgctctgaagattgatcatcaaacggtgtgggcaaatcaagatcttattagagaacagaccaaagagctggcaactgtcagaagggaacgcgacaactctgaagctgaaagagcccaacatcttacacaaattcatgagctccaagaacatctgcgagaaaaagaaagccagttcattgcattagaggaacagcatagggctgctcaagacaacattctttacaaagatgagcagttgagggaagcccatgcttgggtatctcaagttcgagaaatggatgctttgcagtctcaatccctacaagttgagttacgtgagcgcatggagcaatttaatcaatattggattagctcccagcagcagtatgctgaaatgcagcggagtcttctccatacaatacaacaactccagcaagaattaactgaggcaagggaacagtctggtgcacaaaaagatggtccacaagtttctcgggaagggtcagctgaatcatcactagttcaaagcatgggaaacagcgtggcttcaaatggtagtgcaactgcagatgggaaccagcaattgttgaaaaataatggaagcgtggatgtctctgttcaggccaatagtgcctcagctgtacctgttccttcttccctactgggaatcggtggtccggctgcgcatatcgctgcgatgcatgcttttatgattcatcctcaaggcattcctcaacccttagtagcatcacccaactctggtgttcctcaatttggcagttttcagtctcagtctacaattcaaccaaattcacaatggccaaatcagcaggaagtacaaaatgtctcacaaccacaagatgaaacaaactatcagacatcccaatcagaccggactgttttacaacaaggcgctattaatactgatgagttgtcctcaaagccaagccaggatagtcagccagaccatcttaatgcccatgtgaaacaacagcagagccctgttgttgaagcgaatgtagctgaacatgtatcttgtgacgaacaacaaaaaatcttaaacgaacaggattcactgtcaaatatgaacaaccatattggaatagttgagcatctagagcaaaataccgaatccaaggatgaaagagctgcatctgataagcaacctgaacctgtatctaggcagcataaacatttgaactttcctccgttcactacccagattcacttgaaaaagagtgcaacagagaatcctaatgttgtaaatcaggttgatataatgaaatcagttgcaggtggttttagttcgcagttacctcgtgcaccaaaggaaccttctctcctagatgagagatctctattggcttgcattgtacgtgcagttcctgctgggactgagggtggaatcaggataagttcaactctgccaaataggcttgggaaaatgttggctccccttcactggcatgactataagaagcaatacgggaagctcgacgattttgtggctagtcatccagagctgtttgtgattgagggagacttcattcaccttcgtgatggagcacagcagattatttctgccactacagctgctgcaaaaatagctgctgcgacagcatcttctgcctcttactcatccttactgccttctgttgccgttactcctgtggcacaaaatactcggcaaaagaggaggcccgcagttgattccagatcatcaaatgcaattccctctggaaacggcttcacagatcaatttaacatcattcagggtgtcagcgacgtaacaatttcaggcaaagtaagaaatatccaagataatggcttcatagatgaagttcgcactgggcagccatccgtgctcacagctgctactgccaacggagcaagacatgacaaatgtgcaaataataccagacatggttatggtggaaaacaacaggggaggaccactgggacgacatacctttccagaagatgaaccaactttcactgggcgatgatgctgttggaattggaaaccatgcgagtggcgatgatgcggttggggaaaccatacgagtgacgatgctttggcttcgaaatgatggtgaagatgacctggattaaagttattctagattcattttttattttgcactattggtcttcacagagcctgtatggttgggggccttgttttggcaaagctgtactgatatatccctaccccaagaatcagaagcctgccaaagttttgcgactatgtacctcgtctgcgcttgtgtattgtggtgcacttgaatgatgcgaatgttatatcgaatccccgtccttgatcgtgatgttcttgaacgttcacctctgggaaattaactcgcatggtgagctgagctcgtgatcggtggcatggtcgatccaaggtcgggtgtcattgttgtatggtcgagctggacatgtaggctctgttactatttaggtaactatttagaccttattccaaaaagttagtagagatattcacttgctatggatttaaatctacc

SEQ ID NO: 2849 - DNA, 1001 bp, Zea Mays
ccgtctttctgttgaattcaactctgctctagctagcagtgcagctccatcttctatattatactcaaggcaaggaattaggagcagaccggagacttgggggcttcacctgctgtatctcattaccatctgcatctggttgcccgttgattgagaaggaggagctgagggccatggcgaccgagaagcccatcctgtacaacgcctggatcagctcctgctcccaccgtgttcgcatcgcactcaacctcaaaggtgtggattacgagtacaagtcggtaaaccctaggacagatccagattatggaaaaatcaatccaattaaatatattccagcattagtagatgggggcatagtcgtttctgattctcttgccatctcactgtatttggaagataagtatcctgagcatccactcctgcctaaagatctcaagaggaaagctcttaatcttcagattgcaaacattgtttgttcaagcattcaacctcttcaaggctatgctgttattggtctgcatgagggtaggatgagcccagatgagggccttcatattgttcaaagttatattgacaagggattcagagcgatcgaaaagctgttggaaggatgtgagagtaaatatgctactggagatgatgtccaattgatgtgttccttgaaccacagatacatgccggcataaatcgcttccaaatcgatatgtcgatgtacccaatcttggagaggctccatgatgcatacatgcaaattcccgcattccaagccgcgcttcctaaaaatcaaccagacgcaccttcatcataatcatcaagattatctcaataatttgcatgtcattttgtaataatttggatagggagccactgcttcctccatcccgttgtggatcaaaagggtgaacgattggcacttacctgcatggtccaatacctattatatttcttaaacagatactatttacggctattgtaatttaagcccaatacctgcatggtcc

SEQ ID NO: 2850 - DNA, 1073 bp, Zea Mays
atcttcctcctcctcccctactctgacctctcgtcgtcgacgaaggaaggattccgcccccgccccggccgccttcgccctcgccgctgcattttccggtggcctctccacgtgcggccgcgagacgcctcgcctgcctagttgtctcccggggggggggggggggggggggctgggacttgtgaggcgagaagccttacacctgttctgttcaagacggcaggtgttggtgtttcggttgcaatagagtgattggggaaactgatcagccagaattgttggtcaaccgatgggaagcaatgaccctaacacaccctcgaaggcttcaaaggcgtcagaacaagatcaacctccagctaccaccacatccagtggaacagcttcagtgtaccctgaatggcccagctttcaggcctactcagcaattccaccgcatgcgttcttcccccctaccgttgctgcaaatccacaggcccatccatacatgtggggggctcagcccatagtgccaccttacgggacaccgccaccaccaccttatgtgatgtatccacctggaacagtatatgcccatccctctacacctcctgccatgcatccatttggccattatcctatgccaacaaatgggcatgctgaaactcatggagctgcgccaagcgctccggaaatgaatgggaaaagcgagcctggcagaacgtctgctccatccgccaacgggattacctcgcacagtgagagtggaagcgagagtgagagcgaaggaagtgacgacaattctcaaaacgattcacactcaaaggacaatgatgggaaggaagatggcaattctcagaacggcatgtcttattcaggatcgcaaggagtggtaaaccaaaccatggcgatgcttccaatgcaaccgggtgcaatggtcggaggagttcctagctccacggcagctaacctgaatatcggagtggactactgggcagctccgggttctgcggctgtccccgcagcgcacggcaaagcgccagctggttcagctcgaggagaccaatgggaaaaatacattctactcaccacagact

SEQ ID NO: 2851 - DNA, 1672 bp, Zea Mays
tgtgaggcgagtgttggtgtttcggttgcaatagagtgattggggaaactgatcagccagaattgttggtcaaccgatgggaagcaatgaccctaacacaccctcgaaggcttcaaaggcgtcagaacaagatcaacctccagctaccaccacatccagtggaacagcttcagtgtaccctgaatggcccagctttcaggcctactcagcaattccaccgcatgcgttcttcccccctaccgttgctgcaaatccacaggcccatccatacatgtggggggctcagcccatagtgccaccttacgggacaccgccaccaccaccttatgtgatgtatccacctggaacagtatatgcccatccctctacacctcctgccatgcatccatttggccattatcctatgccaacaaatgggcatgctgaaactcatggagctgcgccaagcgctccggaaatgaatggtgcgtcttttccaagggaaaagcgagcctggcagaacgtctgctccatccgccaacgggattacctcgcacagtgagagtggaagcgagagtgagagcgaaggaagtgacgacaattctcaaaacgattcacactcaaaggacaatgatgggaaggaagatggcaattctcagaacggcatgtcttattcaggatcgcaaggagtggtaaaccaaaccatggcgatgcttccaatgcaaccgggtgcaatggtcggaggagttcctagctccacggcagctaacctgaatatcggagtggactactgggcagctccgggttctgcggctgtccccgcagcgcacggcaaagcgccagctggttcagctcgaggagaccaatgggatgaaagggagctcaagaagcagaagcggaagcagtcaaacagagagtccgctcgcagatcccggctgcgcaaacaggctgagtgtgaggagcttgggcaacgtgctgaggctctgaggtcggagaactcgtcgctgagggccgagctcgagcggatcagaaaggagtacgaacagctactttcacagaacgcttccctaaaggaaaagctgggggctgccagtagtgattcgcttcctgatatgaacgaacagaacgacggcgacggagacggcggctacaggaagcagcctgattccgatggccaccagcctgggagcgagtcctgacccgtttttagctcaggattcttttggaatgcacattgcttatatattcattctcttgaacgttgtggaacgcagcataggaaggaaatccaactttaattagaatcgattcgctgtcatccctcatgcatggccggagaggggagagggttctcttcttccttggatgttggatacaccgacagtcacgtgcatggcaagagcagaagctagcagctgcggcgactcagggcagcgagcgtttgactggctggggtgcttgctgatatgctcaacacatgaagcagcagcagcctggagcgccagacattcctgactgagtgactgctcatcacgaccagagccaaatccaaatggaataaaaaaaacacacacacactacgtgcagcaatatcagctctccttttctttgtccatgaaaggaaaaacaacgtcacgggaacaattgcggtcagcttttctggaccgtccaccatgccttcatttcaaattcg

SEQ ID NO: 2852 - DNA, 1685 bp, Zea Mays
aaaacaccgaggagaagtcggaaccaaacgataatcacgaaacaagctatccgacgcagttttgaccacagccgacggcaatagaagtagagaactccgacttcttcactcacacacacatggcgctgatgagccttggcgccgccgggtacaccacggccaccgcgccgcctcgtccccgaagatgtaccctgccgtttcgcgccgccgcctcccctgcggcactggaccgccggcgacggccgcataatgtggctggcgacttcttcgtcgaccaccgctgcatcgactgccagacctgccgatggatggcgccggaggtgttcaagagggtggatggcaaggccgccgtagcggcgcagcccagctccgaggaggagaggaccaaggccctgcaggcgctgctatcctgtccaacatcctcaattcacactgagaaacctccaaaagacattcttaaagtgcaaaacatgtttcctctaccaatcgacgacaagctactcccaggtgtttatctctgtgggtataattctgaagactcatatggggcaacatcgtacctggtaattcatccacaaggaaacatactgattgacagcccaaggtatactccaaagctggccaacaatattgaaaagcttggtggagcgcgctacatgtttttgacccacattgatgacgtagcagatcacaggaagtgggctgagcagctaaaatgtgaaagaataatacattcaggagatgttattttcagatgtactcactggttaagattctggagactgctacaaaaggaggaatcgcaacaacaaatcctcattgcttcgcaagttttggaagtggtggcgatggaagtcttcgcaaaccatggatggcgctcaaattcaagaattgagtatggctagtgttagtcatagtattgtaatttagttcctttgagttagtatcactattcatgcaacagttcttaattgtaataatcgacttgtattggctgtacgcattatcatgctaaagccggaactcttgtttccattatcaaaaaaaaaatacgccaggccataccccaggctcagtgtgcttgtacttcaaaccgctaaaggtgctgttcactggagaccatgttgcaaagtcagaagaatcagacgatctgaacctctttctgatgtacagcaagcagtcagtgagccttcagctggaaagcatcaggaagctactggagctagagttcgagtggcttttacctggacatggctatcgaatcaagtacaaagatgtgcgtgccaagaatgtagccatggagtccctcctagctaattacacaagctaggagcctatgagcatcttacttgagttagtgctcgcaaataagcattccaggaggctgaatgttgatgctatgtttccagagaatagtgtgcatgatgctcatcagctcttgaatgtgcatttgttaccagagactgtaccttgtgctgcacaccaagcaagtgaatgaatcaagcatacatgactcggcccaatgaatgctttttccagaaatcttgcaagaccatatgattgatttgttatatgcatgatgatatattcgacaaatgcagcacaactgaaagccccctgcttcacatcatcacctagctctgctcttctggttaatcaatccattttgtaaagataataacagc

SEQ ID NO: 2853 - DNA, 4589 bp, Zea Mays
ttgtttccagcaaatcgcccgagttgtattactagtattttattcggcgcgtctccatcgcgaggccactcggctcggctgctcggctccggatcggcgtctctgctactaaactaaaataaaataaaacgctaaagcttatcgcaactcgttctctcggctgctgctcctgctgcttgctacttaaacaaacacatctcagcgtctcttgcgatcgctcaagagccaccaccaccagtccaccacgccccctgcacgcgacccgaggccaagaatcgcttccgttccgcgccgcctcctatatccagcgagcggcgctgccagcccacgcctcgctcgaatccctcctccttcctggaaacggggtttgctttccctgccccgccaaatcctttcttctccatccagccggttcctacccatcctgccggctgcggctgcggcagcggctgcctggcgctgccgtgcgttgcagagcgagggcgaggcggaggtggccaaatgccggtccaggaccgggtcgtcgtcgtcggcgagcgcgcgagactctgtctcccccctgccgccggtctgtcgaggtgtggtagtggtagtggccgtcccagctggagcacctgagacgtcgttgctcggtcgtccggattgatttcggccgaaagctgcttgtgggtttttttttccggaaagggagggagggagggagggcagccttttcggttttctgattgttactagttgctctgcggattcgattcccttgccgagatttatctcttcgccgccggagactggtggacagcagatcctcttccatctccgccggccgttcattcttaagctgcctgcgaagctttttcttgagaccctctccagagtactgttcgccggatcttggtttggagggcgagcggtgaaagatcgaatccttgtttggaggttcagcggcaggcagctcgctgtgacgtcgcccgtgcgggcatggtgtccagatcctactcgaacctcctggagctcgccgccggcggcagcggcggcgagccgctgccgtcgctggggcgccgccggataccgcgcgtcgtgacggcctccggcattgtgccggacctcgacgtctccgacgccgcctccgccgccgaccagtcctcccacgcgccgcgggagcgcgtcatcatcgtcgccaaccagctccccgtccgcgcctcccgccgcgccgccgccggcgccggcggcggcgggtgggacttcgcgtgggaccaggacagcctcctcctgcaggtcaaggacagcctccgcgcgcaccacggccgcgcggacgtggagttcgtctacgtcggcggcctccgcgacgacgtgcccccagccgagcacgaccaggtcgcgcacgacctcctcgagggcttccgctgcgttcccaccttcctgcccgccgacctccgctcccgcttctaccacggcttctgcaagcagcagctctggccactgttccattacatgctgccactgtcgccggagctaggcggccgcttcgaccgcctcctctggcaggcctacgtgtcggtcaacaagatcttcgccgacaagatcctggaggtgatcagccccgacgaagacttcgtctgggtgcacgattaccatctcatggtgctccccacattcctgcggaagcgcttcaaccgggtcaagctcgggttcttcctccatagccccttcccgtcgtcggagatctacaagaccctgcctgtgcgtgaggagctgctccggtcgctgctgaacgccgatctgattggcttccacacttttgattatgccagacacttcttgtcgtgctgcagcaggatgctcgggctcaagtatgagtcgcagaggggctacattgctctggagtactatggccggacagttactatcaagatcttgcctgtgggagtacacttggagcagctacggtcagtcctcaacctcccggagcttggggtcaaggtggccgagcttctgaaacagttctgtcatcggaaccgtctgctgttgcttggtgttgatgacatggatatcttcaaaggaattagcttgaagcttttggcgtttgagcagctcctaatgcagcatccggagtggcggggaagggtggtgcttgttcagatcgccaatccagcaagggggcggggaaaggatgtgagggaggtacaggaagagagcgatgcaatggtgaggcgcatcaacgacgcgttcgggcagccaggttaccagccggtgatactgatcgaccagcctctgcagttctatgagaggatggcttactatgtcgtcgcggagtgctgtttggtcactgcagtgagggacgggatgaacctgatcccatacgagtacgtaattgctcgacaagggaatgagaggatagatagtattctaggccttggtccggcttcaaggaagaagagcatgcttgtcgtgtcagagttcatcggctgctcgccctccctgagcggcgctatccgtgtgaacccttggaacatcgattcagtagccgacgcaatggactacgcgctggagatgccggaaggggagaaggtgttgagacatgagaaacaccacagatacgtgagcacgcacgacgtcgggtactgggcgaacagcttcctgcaagatcttgagcggatttgcctcgaccataacaggaggcgttgctggggcatagggtttgggctgaagttcagggttgtggccctcgacccaaacttcaagaagcttgcggtggagcacttggtcttggcctaccggaggacgaagaagcgtgtcattctcttagactacgatgggacgctgatgccgcagacttcgctcggtaagagtcctacctcaaggacgatagacatgttgaacagcctttgccgcgacaggaacaacatggtcttccttgtgagcgcaaagagccggatgactctgaacgaatggttcttaccatgtgagagccttggactagcagctgaacacggctgcttcctcaggctgagaagagacgcagaatgggagacatgcgttccggtgatagactgcagctggaagcagatcgcagagcctgtgatgaagacctataccgagactacggacgggtcgactattgaggacaaggagactgccatcgtgtggtgctacgaggacgccgatccagatttcggatcctgccaggccaaggagctccacgaccatctggagagcgtgcttgcaaacgagccggtctcagtgaaagctggacccaacctcgtcgagggcgtaagcaagggcctggtggcgaagcggatcctgtcgacgacgcaggagcggggcgacgccgacgacgacctgccggacttcgtgctgtgcgtgggcgacgaccggtccgacgaggacatgttcgaggtgatcgcggcggcggcggccgcgaggggcgtgtcctccctgcaggcggaggcggaggtgttcgcgtgcacggtggggcgcaagcccagcaaggccaagtactacctggacgaccccgcggacatcgtgcgcctcgtccagggcctcgccagcgtctccgacgacgaccagacgcacgccccaccgccgccgcctccctcggcggcgacgacggcggcggacaccgtgccgaggtgaaccgtgtcggcgtgcgggggtgcggtgcagttagctctaggcggcatgagaccttgtggttgtggtggaactagtggaagggaccgtcgctcgcgactgttcgcaggtggtgtacaaaatgctctaggaatgttgtggtctgggaatgtccttgttcgtgctgcctcgtcctcgtcgcgtggccaccgcactgtgtacataaacataaggcactcgtcgaggtcgccggtcacgtcgatctgccgccctgaagctccaaaggtcgccgagacgctgcgggtcgcgttgcattccttctgtctgtgggtcgggtggggtggtgaccctcgtagccctcgctgcagctaatgatggcgagcaacagtgcagtggaggggaggggagtggaggtggtggttgcacttgctgacccgccgcacagcaacagtcgcgggcggtagccttatcctgttgcctatcggggcaaaggttcttctgccggtctaatcatgtttggtcgggataaggctctcgtgccgtgtttagcaacgagaatacaagagcgagattcctgccctcgatcgccgatggatggttggtctccagtggatttagcagcgcgtttcgtcttgggccctgggtggtccggctgccgacctggtccgggcacttgtgtgctctggaactggaaggcgaatagatagataaggctggagtagggtgtaactgtaagtcacctcgtagctgaatatggttctcagttgtaacatgtatctaccggttcgttttggtcgactccttttgaatgcatacatgcccggattgcgttgagctggagcccgacaaacatgccaccgaacaagctgcaatttatactgaacaagctgtaagatcagaggcgtggtccggcatcgcgctggcggtggcgtcttgtctcgctgtctcatcccaccgctacgactataaagatcccgacg

SEQ ID NO: 2854 - DNA, 741 bp, Zea Mays
aaacataattgttggttagatgctgaaggagaagtataaaaattatctagtatactaatgcaaaggtaagcgctaaatttaaaatatattttcttttgttcctccattttgcataagtaacaggcttctgtcgctagttggtggtgctgatgtgaatcggcaagttcaatgtgtttgttgtttattacagaagtggataaggccggtagatgggctagaaaccactatctgtcatcagcagctcttccttctatcaagggagacaagttaatcgttccccatgagagtctggatatatcaattgagaggctgaaggaacatggtataacaactaagaaatcctctcaaaatctgaagaaaattggggcttgccacatgagcatcagtcaaagggagggcaggttgcagttcgttccactaccgggtacccaaacggtcatagggtaaaggagccccgccgggtagcaccacacaggtgatagacactgcagtggccagcaagaatggagtcatggaacatcggcagggaggggtgcggcagcgttaaccgatttatcccttggacaatctggttttgacatcatgcaaaatcaatctgctgtacattgtattctgcacttgcacagattgtttggctaattacaagattatctcagtgttttggtttgaatttagagtacacttatgtatgaaatattgattggtactcatctatattatattaattatattattattaaa

SEQ ID NO: 2855 - DNA, 524 bp, Zea Mays
cacaatcttctatactctaagatctgtggggtttcgtcaatgcttccaagtttgaagagatgctcatgatctgccgcaccgaaaagcaaggaatttggaacctgtgaccgtttggagttcactgagctgttgcttgttggtgtcaaccgatcctctgatgtggcttgtactgttgtacagttttgtagtaaacgtttgtatagcatgtagagagtttccatatggaatcagaagttgagaacatgtagagttttgctttgtagaataccaaatgccatttacagagaaaataccagtcactaacactcaaatgtatatatttcatagaaactaagaatgccctgcctacgttgcagatggaagttttaaaactggaaattgctatttgtatgcccggtgggggttgccactcgcaacaaccgctgatcttgcattttgagaattgttgcccctgttctgcttcttgatcgtttcctcaagactacgaccacttctctcggaagcttcatccaattggctcacca

SEQ ID NO: 2856 - DNA, 2292 bp, Zea Mays
gcacacggatccatccccaacacggcaacacgccaacacccatcagtccatcacaggcgcagcgaactctgcgcttccacttctctctccaccgtccctttacccaaccaaccaccgcactgcgcgagggcggcgcggtctcaagccgggatggggtatctgccggcgctgggcgggaaggcggcccacctggtgaacgacctcgccactgtcatcctgaaccccgtctccgagcgcgagcgccagccacaccaccccacccacctcccggccactgaaggagaagacacactattcgttgacgatgattctgaccaaaattctgatggtcctgacacatcttcattcagagcatttctgatgtcctttgtgccttcctcaactgccagcaagaattcaatggagaccatacctgagcataatctagatgtggaatacccaactttaacacctgttgggaaggcgtgcagtgggaggaaaggcctgtttagtagagggaagcattcccttggtaggattattagcaaagcaggacttggtaatttgagacagaaacagacccacagcattgatggtgaaatcataggccaaaccgaatcagttgcacctagatttgaagtgaagggttcaaaagaatcaactttgcacgataaattgccagctatgtctgaaccttctcttcttctgacagaaatgatgcgagctgttctttatacatctcttcctgtacttgttcaaggaaggaactggatgctggtatatagcacctggaggcatggaatatctttgtctactctgtatcgaagaagcaggctttgtgctggctactcacttttggtatttttatgtattgttcatattttgcccttatgttacactaaacatgatacactcttttttcctcttacccttgcatgaaatatgattacaccactctagttgttattttttctataatgtcaaataatacagattatacaatacaatatcactgggaattttagtgcatgcaatgccatgtcaatacagtatcctccaaaaaccagaacactgtcactcttatcatgcatgcccaaaccttatgaattatggtaccctttcagataccaggaattttccatattttcttgcatttttatgtagtgcacatactagttcaattaaagaccttaatatggcaatgtttcttagtccaacaattacaaatacacccatgtaaaacaaattctattcatgtgataattcctttccttcagctgctgtgctgactgggttttgctgccttggaaagcttgccaaagaaatacatatccttcagcagcacatcagatttccataattgtattatccagctatttgagctgttgatgacagtgcacttgttttgatcatacattgtgggcgaggattgaggaatgatactacaatttagttactgctatccacatgataatttgttgtttgctgttgcagatagttggggatcgaagaggggcagtttttggtggcttggtcgaggccccactgcaacctatcgtaaaaaggaagtatcagggaactaatgactgctttgtgttcaccaacgtagatggttgtcctgttatatgccatccaacaggtgctaataactattttacattttgctctaccgattatatggcaatgggaggtggtggtcacttcgcactttatctcgatggagaccttatgactggttctagctccacctccgagacttttaacaacccatgcttatcccatacccaggaattcaaaatcaaagatgtcgagctgtggggtttcgtcaatgcttccaagtttgaagagatgctcatgatctgccgcaccgaaaagcaaggaatttggaacctgtgaccgtttggagttcactgagctgttgcttgttggtgtcaaccgatcctctgatgtggcttgtactgttgtacagttttgtagtaaacgtttgtatagcatgtagagagtttccatatggaatcagaagttgagaacatgtagagttttgctttgtagaataccaaatgccatttacagagaaaataccagtcactaacactcaaatgtatatatttcatagaaactaagaatgccctgcctacgttgcagatggaagttttaaaactggaaattgctatttgtatgcccggtgggggttgccactcgcaacaaccgctgatcttgcattttgagaattgttgcccctgttctgcttcttgatcgtttcctcaagactacgaccacttctctcggaagcttcatccaattggctcacca

SEQ ID NO: 2857 - DNA, 1784 bp, Zea Mays
ttgctgatggggaggccggtggtcaccatgaccgcagggccggtgctggggagggcagggccacaacggggcctgtgggtccgacgaagaaggcctactggggacgttgttactgttgaatccccccgttccccaggccaggccacatggtgatgtgactgatctaggggttgtaggagggccaggcgggagcgggtgcctgttcggcttgggtgcgctgcgtctagagggaagcatcgccaaggttgaccatggagcagattagagctgctagggggcctggcggctatgctaggaaggaaaacgaaaacgatagggaaaatctaggtctctagatacataccatgacagaatgagctgccagatattggattaatggtagaggtacaagggggtataatatataggcatggattgtctaaggtttatagaaagcatgcaatcaatagaaatccttgcataatctaaagcacccaatcaatgaagatctttgtgtaatctatgatttgttctcgaaagcgtaggagagctacacatcatatatataaagaagaaaaaggtctaaaataggccaatacaaaaaactggaaaaaaaacagtggccaagaccagctcatggcggccgaaagcaacaaaacataaaaacatccaacattacagctaggagagactaaatccgcggcaactaccataaacatcaaggcacatatggcagacatgatcaatctaattacatagtctaacactactatgtactaattattgctcaaaagataacatacgatatacacatttttgttcttttcttctcatctttgtttgtttgggattcctacggaagggcctctagctgtgttggttaggtggtccgagtagcactcctcagatcctgggttggactccccgtggaagcgaattttaggctgtggttaaaaaatgtcctcgtttgtcccatgccaaagcacaggtctaaggcccagctccggccgtggtcgttctcacatggactacggtgccgctgtgtacgcgtggggcttatggcgtagctttagcgtcgctaaagcgataaggcgagcgtggaggcataaggcgtcttgtcgccttgcctgcgagagtaagggcggcagcgcgtgtcgcatatctcccgccggcggcgcgcagggaggagagctatggagagggagaagctgctgctatcggctaagggacaatctgctgctagcagctgagaaggtgctagagatgttgacaaagaagatgatatgtttgtcctcattgctccacaaaatgctgttggaaactgcataattgatgatatgagagctatgactgatgctgctggtgatagacctgtgattcttgtaaatcctcgcctaaaggatatgcctgcatcaagtggtgttatgcaagatggcttatccaaataaatatgagatttatcgaagggttgacactctcaatggaaaagagaactatattcttatagctgaattcacgaacaagccaactcctgatgagatcaccagtgctttcaaaggacaaaaaagggaagaaaaggcatcttctggattctggtaacttatgctcctggtttttgtttctccattccaatactaacttcctaccaacatgaatatgggttactaaacatttcaatccttgtgtaggggtttcttaagtggtttattttaagtcaagcgatctgctgtacggcgatgcaatcctccttgtatatttttatctgataatggtttggtgccgtgacccacagcgacaaggtaaag

SEQ ID NO: 2858 - DNA, 888 bp, Zea Mays
ctaaaacttccacttgttctagccgtcacggcgctaccagttctctgccgcatctctctgttcctctgtttcttcctcttctctaatacattccactagtaatctgttaacacttcgtcatgaagttcggcggctcgtcgctcgcgtcagccgagcggatgcaggaggtggccgacctcatccttagcttcctcggcgagatgcccgtcgtcgtcctctccgccatggggaagaccaccaataacctcctcctaggaccctccatttctagctctcagcgcctgggccggagagaaggcagtgagctgcggtggaggaggggcgtccgaaatccctgagctcgctgtcatcagggagctgaatcttaggacaattgatgagctcggtttagataagtcgatagtttcagggaccgttctccccaacacgcaggggtagcgtaggaggtgttgtggcggcattatctaggaagcggtctgtggacgtgaggcggatcaacccgaaggtgcctaaggaggaggctgtcaccatctccggtcgactcgtccagatcctctccgaccatgggcccctcaccatcggcaacacctggaacaacaccaaggtacccaatcaaccagtcagtcaagcagagtggcaaaagccggggagcgatgcaggcgtcggagcagcaacaacggaggaatgagaaggaaacacacaaagagcatcaaaagcaagttcaacgatcttatgtcaacccatccacctctgaatgaggcatattcagatgtgtgtgtattcagtttacggagctcaatatgttacatcgacctttccaacctgccggcagaactcaagaagctcaagcacaagaagtgcctcgtccagtccccccaactccttcat

SEQ ID NO: 2859 - DNA, 1644 bp, Zea Mays
ctaaaacttccacttgttctagccgtcacggcgctaccagttctctgccgcatctctctgttcctctgtttcttcctcttctctaatacattccactagtaatctgttaacacttcgtcatgaagttcggcggctcgtcgctcgcgtcagccgagcggatgcaggaggtggccgacctcatccttagcttcctcggcgagatgcccgtcgtcgtcctctccgccatggggaagaccaccaataacctcctcctaggaccctccatttctagctctcagcgcctgggccggagagaaggcagtgagctgcggtggaggaggggcgtccgaaatccctgagctcgctgtcatcagggagctgaatcttaggacaattgatgagctcggtttagataagtcgatagtttcaggtatgttgttgtttgctccactctgctcttggaacgcctcagctgttcctcttgctctatcatgaatgcttctgttatacaatgggatgtcgttctcttggatgtgccaaagttttctctccccttagtctgaataacaattcctggtggatgtatgtatgtatgtattctcttggatgtgcgaaagttttccccttggatgtgcgaaacacatttactcctcactgcaatccacgcctccactctcgacccctcctccttcctcctctccctagggaccgttctccccaacacgcaggggtagcgtaggaggtgttgtggcggcattatctaggaagcggtctgtggacgtgaggcggatcaacccgaaggtgcctaaggaggaggctgtcaccatctccggtcgactcgtccagatcctctccgaccatgggcccctcaccatcggcaacacctggaacaacaccaaggtacccaatcaaccagtcagtcaagcagagtggcaaaagccggggagcgatgcaggcgtcggagcagcaacaacggaggaatgagaaggaaacacacaaagagcatcaaaagcaagttcaacgatcttatgtcaacccatccacctctgaatgaggcatattcagatgtgtgtgtattcaggttggaaccaactatgcattagatttttatgctcattctggataatgtacaacctatgacccttttccattaatttatgtttttttgttaaacattaaattcatccatcaaaatttagagaggagtataggacaccaaaaattgtgtagtattttttctgagctaataagtagtcgagtctggtatggtaggatagggtatctagctcgatccttttctttttacaaaattcattgattttgttcagtgctatttgtttctgattttctaagtaaaaatgctttaaattagagaacttttctagatggaacaaactgaaggctgcatgagtgctaggaacacaaaagctttgatgattctgttgcatgttcttttgcccccaaaccccccaccccacacaatatttttcccttttctatacagacacatgaaattctataaacaaatgtctttatgttcctagcactcatgctgccttcagtttacggagctcaatatgttacatcgacctttccaacctgccggcagaactcaagaagctcaagcacaagaagtgcctcgtccagtccccccaactccttcat

SEQ ID NO: 2860 - DNA, 2831 bp, Zea Mays
acttcaggtcaggtgagaaccgagaggcacctcctccctgtcattatcctccctctccctccccagtccctcctactaaagacacattgccccggttgtttatcgctcccaccagaactcccacttccctagctatttgtccaactgcccatcctttggagaattcttttgtggcaagaatcgccaatcagttgaaagttgccgttgtcagtcgtgatctgtcatagtctttgctccactgcaacacacccacactccaataaagctggtcccaagaacgcaaaaggaaggaagggtgagaggggagagagtaaggaggaattttcttgcctcctttgctgtaatttttctattccaaacaggctcaggtggcaggttctcagagcagaggcatccggcacccctgctcctgaacttgttgccgaggaggccacactcttgcgctgccttggcaatgggggaggttgttgctgcttcctccctggccctggtgctgctcttcttctgctcttgcgggcctgcaagcggccttctctcccccaagggtgtaaactatgaagttcaagctctcatgatgatcaagaactacctcaaggatcctcatggtgtactgaagaactgggaccaagactctgtggatccttgcagctggacaatggtcacttgctctccagagaaccttgtcaccggcttagaagcaccaagccagaacctttctggaattctctccccaagtatagggaatctgaccaaccttgagacagttcttctgcagaacaacaacataaacgggttaatcccagcagagattggaaagctaagaaagctcaaaacgcttgatctgtccagcaaccacttctctggagaaatcccaagctctgtgggccaccttgaaagccttcagtatttgaggcttaacaacaacacattgtctggtgccttcccttcatcatcaactaatttgtcacaccttattttcctggatctgtcatacaataatttgagtggtccaatcccagggtccctgacaaggactttcaacattgtagggaatccactgatctgtgcagcaaccatggaacaagattgttatgggtctttacctatgccaatgtcttacggactgaataacacacagggaactgtgattcctgcaaaagctaagagccataaagttgcaattgcatttggtgctacaactgcctgcatcagccttctgttccttgccgttggttcactattctggtggaggtgtaggcgaaaccggaagactcttttcaacgttgatgatcatcagcacatagagaacggcaacctcggaaatatgaagcggtttcaattcagagagctccaggctgcaacagaaaacttcagcagcaagaacatattaggaaaaggcgggtttggtattgtttaccgggggcagcttccagatggaagtcttgtagccgtcaagaggctcaaagatggtaatgctgcaggcggggaagcacagtttcagactgaagtcgagatgatcagcttagcagtgcacaggaacctcctcagactctatgggttctgcatgactgccagtgagaggctactggtctatccgtacatgtcgaatgggagtgtcgcgttgcgcctgaaagggaagccaccactggactggatcaccagaaagaggatagcacttggggcagcacgaggtctactttatctgcacgagcagtgtgatcccaagatcatccacagagacgttaaggcagcaaacatactgctagatgactgttgtgaagcaattgtcggggactttgggcttgcaaagctcctagaccaccgtgaatcgcatgtcaccacagctgtgcgcggaactgttggccacatcgctcccgagtacctctcgactggccagtcatctgagaaaacagatgtctttggttttggaattctgctgctggagctgatcactggtcagactgcactggagtttgggaagtcatcaaatcagaagggagccatgttagactgggtgaagaagatgcaccaagagaagcagctggacatacttgtcgacaagggcctggggagcaaatatgaccgcattgagctggaggagatggtgcaagtagcactgctatgtactcagttcctccctggtcacaggcccaagatgtcagaggtggtccggatgctggaaggcgatggacttgcagagcggtgggaggcgttacaacacactgagtcacacaaattcaaggtgcctgagttctccttcagccgctgccactctgacctgacggacgactcgtcactgttggtgcaagcagtggagctttctgggccaagatgacaccaacggagacggtctgtggcaagaagtatccagcagttgtttcccagtagaaaatgtaaataatacaaagtgaagcaactggtgctgcatcctgtcagaagtcgaagcaaatctcaatcagctgaactgtacaaagattaaaaaaagagcacaacctagtctaagcatggtacattactacatctacagattatgtaactgttggtagaataaggatagagcaatgtttccattttgtttgttattttcccctttgtattctattactgtagttatagtttgtaaaatgcaaaaacggtggcaatagcgctcgatgttggtgctgaagaactcaaatagcttagtaaagaccaagtgtagacaggtgccaacgaagaatttgattgtgtgcatgaacttcctacctccgttgccaacacatactgcaaagaaagcaggtataattcctagccatgacggcattttttgcatgatataaaatatttggtatctg

SEQ ID NO: 2861 - DNA, 1552 bp, Zea Mays
agaaaatgttcctcgcaaagtttggctgacggcacccaccgcccacagaagcgcacctctgttctttggtgtgtggccgtgtggattcaaaaccgctgaccggccgcttatttaagcccttgccccgccggttttctcttctcccgtcggcgctggtccacgcggctccaacacctgcctgcctgcctgattcttacaccaaccaaccacgcgcgccaagccgaattcgtcttccaccgatccgccccgcccgtttcccattgcttagcttgctatggcgcagcagcagccggtgcggcggattctgaaggtggcaccgccggggaagggggacggggaatccttccccacggtgcaggcggcggtcgacgcggtgccgctgggcaaccgggcgcgcgtcgtcatccgcctcgcgccgggggtctacagggagcctgtctacgtcgccaagaccaagaacttcatcaccgtcgcgggggcctcgcccgaggccaccgtcgtgtcatgggacaacaccgccacgcgcatcaggcactcgcagggttataggaactggaacattcggctgtggtacgttcatcattgagggggaagatttcattgcagagaatatcacgtttgagaactcagctccccagggctctgggcaggccgttgcagtccgggtaaccgcagataggtgtgctttctacaactgccggttcctcggttggcaagacacattatacttacactacgggaaacagtacttaagagactgttatattgaaggccattgtgacttcatctttggtaactctgtcgcccttatggagcattgccatatccattgcaaagcagcgggatacatcactgctcatagccggaagtccacatcagaatctactggctatgtgttcttgaggtgtactattactggacatggagaagctggatacatgttcctaggtcggccatgggggccctttggaagggttgtctttgcgtacactttcatggatcgatgcatcaagccttctgggtggcacaactgggacaaatccgagaacgagcgaactgcttgcttttatgagtacaggtgctcagggccaggcgccctcccatcgaaccgggtcacatggtgtagacagttgctggatgttgaagcagagcagttccttgcgcacacttttatcgacccagacgtcgataggccatggctcctccagatgatggcgataagaataccagcctcagcatagtttgatcccggcagccgcaggtcctgcatggttcatgcctcctttctagcctatttaaataaactaagttggaggatgcattatatttgcataagtttgtaacgtttggtgaattagtatccactttcatctcactgtgggcggtggggatagggaatgagagagcttctcttgtaacgaaccccagcactaggctgaaatatatgcagattttattttgcatgaactttttttgtttcattcagaactcgagcactttctctttcttttttttgcgtgttataagcgtatatggtaccacagattatact

SEQ ID NO: 2862 - DNA, 502 bp, Zea Mays
ttatggtgtgtcgtccattactatgcaaggtactggaagtctagttcaaaacaagctagttggtgctccaggcgggggatcaagtccacatgtagtacaaaatgccgatatccctgttaagcaaaccactagctcttcctcacgtgagcagtcagacgatgatgacatggaaggagatgctgagactactggaaatggaaaccctgttcaacacagattacagagaaggaagcaatccaaccgagaatcagccaggcgttcgagaagcagaaaggcagctcacttgaatgaactggaggcacaggtatcacagttaagagttgagaactcttcgctcctaaggcgacttgctgacgttaatcagaagttcaatgaggctgctgttgacaatagggtgcttaaggcagatgttgaaaccttaagagcaaaggattaaccgaacaaggcctaattgggtgttcttggccattctgatggaacgtgggaatgcatcatgttttca

SEQ ID NO: 2863 - DNA, 1157 bp, Zea Mays
actgctctcatgggcctagcgggctgaaccttatgtttcccctgcctgctgctgctgctgcgagccgaggtcaggtcggctacagtgcacattgctaaacgctcccgccgtctcgcgagccgccgccgggtccttacgcaagtccgcgacgtgcatcgcctggagaggctcccgtctcgccgccctggggatcccatctcatctgtgcagccgcgcgtggcccaagggagccagaagctaagagttagagaggcgcgtgatgtcttcagaggaggcgagggcaagcttttcggagttggtggttggttcgccaacccggacagagggcgaaacttattcttcaggtgatatgtcgtctgaggagggtgcacacgtcacttgtttcacagaggatcttcacgatgtaacacttcactttcagatagtgaggttttctaaacagatatacgtgtgggttggatgcaacacagcaaagtttggccatttatatgctgctgcaaccactagaccggataacagagtgagtgttacctctgtactaggaggaacatctgataacaccggttcaatgctgaagactggcctgaacatagtcctggcatgcaacatcccaaaggacagccccatacttgaggctgctgcggagaggaagctggttgagaagctgaaaggtttgggctacattaaaaccccagctgtgggggctaacacttcctcggcacaatgatccgtggtgtgatctagtgagctttcggtcgacgtgtagcttcatcactacatccagcagagagcggttgtgatttttggcgggctttgactgtgctacctgttctctcatgtggcaaaaggttattgtgaacatgttcgttgtgatgtactccgccctaaaataaacccccttcgtatttcaaggagaaacaatcttaattctgactaaatatataccaaaaatactgatatttatgataccggataaacatcattagattaatcatgtcatacattttatagtaaatatgtttagagatccaaatgtagatacaatttttaacctaatgaaagttaagattgattgatctgtcgaaataatgagatgaggacgtagggagtaaatacgatagtggaatgcatattgtacaatgccttgcaactttgag

SEQ ID NO: 2864 - DNA, 2791 bp, Zea Mays
caaccccatgcgtcaagggatcaaaccatggcgcgtgtgcacatcgccaccgtcggcgctgcccagtcaccgcgccgacggcgaaatatattccggggtcccacgtggaagcatccggaggaatacacggatacacctccgcctcggtccatcgcaactgcaatcttctgctccgtcctgtaggctgtagctgcagcctgcagggagcgagccataaaggagactacgtagcggccgcggagcgcggggacgacggagggagacagacgggcgcggcagggaccagggagccagcagggctaggcgacgctccttccagttctcctatccatgatttcattctgagacattcacatgcttccatgtgattgaccttgtccctaatgttctgatcaagattgccatggttgaaaggctatagtttcttatggtccatgtccacgattcaagaataaaatattgtttggcccatccattgtgataatggtctggttgcaagaccagctggaaatgcacaagttccactgtgtggcggcgaaagatcagtttaagctggatgaaaataattgccagatcgaagaggaagaattttgaaagaaaccatgaggttcctactgctgaacatgtttggaacacagaatcattgattcgtgcaaaaggaatgatgtgctgtgtatgcttggaatctatctcacctgctcagccccttgggcagatgatgacatcagaaaatatggttcaccgctgcaatgtttgcggtgcagctgcgcacataatatgctcttcaaattctcagaaagactgcaaatgcatctcaatgtttgggttcaaacatgtggtccatcaatggactgtactctggacagacatagctgaccaatccgaagaaggccagtactgtagttactgtgaggagttatgcagtgagtcttttctgggaggtcctcccatatactgctgcatgtggtgccaacgattggtgcatgctgattgccagtctgccatggctactgaaaccggtgaaatttgcgaccttggtcccttcaagcgccttattctgtcgccactttttgtccgggccattagcaaacctggtagcatcttgagttctataactcatggagcaaatgagtttgcaaccactgtgcgggggcgtttaaaccgaactaaaaaggagaagcatcagaacagattttcatctgacagcaacgatgattcatcaagtgataccacgttgaactcaaaccagagggctggagaattaaaaacaattggcgacagtgctcaaaggagtcctgagaatgagcatgatagcagtgagagtgatggtagagaactcatatcggagtccagaaggctcgaaaagtggggctcagcgcggagatcttctcaagcacaagctacattttcttttgaatccggtgcaggtttttgaattaagttcttcacaagggccagaaacaggattatttttgttcagaaagctggcactggcaatgatctttcgagagttttatcatggggaggtggcctaggtgctgttgagaagcaaggtggcctttgcacaattttacatgacatagagcatgcagcagtcactatccttgatagatggaaggtgacagtagaagataagaaatcaaagaatgtgcttctagtaaagtacatgaacaactatctcggtatcggttgtgatgcaaaagttgcccttgacattcataatctccgtgagggaaatcctgagaaattctacagtcagttcttaaataaggtgctatatgcgagggaaggggccaagagcatcattgacagggcttttgtggacttaccatggcaagttcggttggaagtcgatggcaccgagatcgagataccagaggactcggaaggcgtgcttgtcgcgaacatcccgagctacatgggaggggttgacctgtggcaaaacgagggtgaggatcccgaagattttgacccgcagtcgatccatgacaagatgctcgaagtggtcagcattacaggagcatggcatctgggaacactccaggttggactttctcgggcgcggaggatcgcgcaaggccagtcgatcaagatacagatgtttgcccctttccccgttcaagtcgacggtgagccttgggtccagcagccctgcacgctcaagatatctcatcacgggcaggcttttatgttgaggagagcagttgaagagccactgggtcatgccgctgctatgatcaccgacgtccttgagcatgcagagtccagccatgtaatcactgcttcgcagaagaaagccctcctccgagaaatggctctacggctgtcatgaagcaagcgccgctcattcggacgtcgcagaagaacggtttcctgcctctgcctgcacatcggtggttagtacgaggatctgtgatctcaacatgagctcgatcatgttgttagcagaagatacaggcccggagggacgtgtccacgtgcacatagagtttttttttttggggtcatgttcacgttttggaaatagcgaggcaatgttgtgtgcagctatgtatggtgtgtagacctcgggtaagccagttccttccttctgtgcaaaactagttacgcctgcggcctgccattccgtgttaggttgactggatggatttttagggctgcgtcgctgccacttcggttggtgccccatatgtaaacgagatgggcttgaatgcttggttgtaacctttttttttaatgataggagctctgtcctttaattaagacgaaagaaaacatatgtacaagaaga

SEQ ID NO: 2865 - DNA, 2827 bp, Zea Mays
caaccccatgcgtcaagggatcaaaccatggcgcgtgtgcacatcgccaccgtcggcgctgcccagtcaccgcgccgacggcgaaatatattccggggtcccacgtggaagcatccggaggaatacacggatacacctccgcctcggtccatcgcaactgcaatcttctgctccgtcctgtaggctgtagctgcagcctgcagggagcgagccataaaggagactacgtagcggccgcggagcgcggggacgacggagggagacagacgggcgcggcagggaccagggagccagcagggctaggcgacgctccttccagttctcctatccatgatttcattctgagacattcacatgcttccatgtgattgaccttgtccctaatgttctgatcaagattgccatggttgaaaggctatagtttcttatggtccatgtccacgattcaagaataaaatattgtttggcccatccattgtgataatggtctggttgcaagaccagctggaaatgcacaagttccactgtgtggcggcgaaagatcagtttaagctggatgaaaataattgccagatcgaagaggaagaattttgaaagaaaccatgaggttcctactgctgaacatgtttggaacacagaatcattgattcgtgcaaaaggaatgatgtgctgtgtatgcttggaatctatctcacctgctcagccccttgggcagatgatgacatcagaaaatatggttcaccgctgcaatgtttgcggtgcagctgcgcacataatatgctcttcaaattctcagaaagactgcaaatgcatctcaatgtttgggttcaaacatgtggtccatcaatggactgtactctggacagacatagctgaccaatccgaagaaggccagtactgtagttactgtgaggagttatgcagtgagtcttttctgggaggtcctcccatatactgctgcatgtggtgccaacgattggtgcatgctgattgccagtctgccatggctactgaaaccggtgaaatttgcgaccttggtcccttcaagcgccttattctgtcgccactttttgtccgggccattagcaaacctggtagcatcttgagttctataactcatggagcaaatgagtttgcaaccactgtgcgggggcgtttaaaccgaactaaaaaggagaagcatcagaacagattttcatctgacagcaacgatgattcatcaagtgataccacgttgaactcaaaccagagggctggagaattaaaaacaattggcgacagtgctcaaaggagtcctgagaatgagcatgatagcagtgagagtgatggtagagaactcatatcggagtccagaaggctcggtaatgatgagaccggtgaagttaaacttaagtacgcattgtctgaattgcctgctgattccagaccccttctaatttttatcaacaagaaaagtggggctcagcgcggagatcttctcaagcacaagctacattttcttttgaatccggtgcaggtttttgaattaagttcttcacaagggccagaaacaggattatttttgttcagaaagctggcactggcaatgatctttcgagagttttatcatggggaggtggcctaggtgctgttgagaagcaaggtggcctttgcacaattttacatgacatagagcatgcagcagtcactatccttgatagatggaaggtgacagtagaagataagaaatcaaagaatgtgcttctagtaaagtacatgaacaactatctcggtatcggttgtgatgcaaaagttgcccttgacattcataatctccgtgagggaaatcctgagaaattctacagtcagttcttaaataaggtgctatatgcgagggaaggggccaagagcatcattgacagggcttttgtggacttaccatggcaagttcggttggaagtcgatggcaccgagatcgagataccagaggactcggaaggcgtgcttgtcgcgaacatcccgagctacatgggaggggttgacctgtggcaaaacgagggtgaggatcccgaagattttgacccgcagtcgatccatgacaagatgctcgaagtggtcagcattacaggagcatggcatctgggaacactccaggttggactttctcgggcgcggaggatcgcgcaaggccagtcgatcaagatacagatgtttgcccctttccccgttcaagtcgacggcttttatgttgaggagagcagttgaagagccactgggtcatgccgctgctatgatcaccgacgtccttgagcatgcagagtccagccatgtaatcactgcttcgcagaagaaagccctcctccgagaaatggctctacggctgtcatgaagcaagcgccgctcattcggacgtcgcagaagaacggtttcctgcctctgcctgcacatcggtggttagtacgaggatctgtgatctcaacatgagctcgatcatgttgttagcagaagatacaggcccggagggacgtgtccacgtgcacatagagtttttttttttggggtcatgttcacgttttggaaatagcgaggcaatgttgtgtgcagctatgtatggtgtgtagacctcgggtaagccagttccttccttctgtgcaaaactagttacgcctgcggcctgccattccgtgttaggttgactggatggatttttagggctgcgtcgctgccacttcggttggtgccccatatgtaaacgagatgggcttgaatgcttggttgtaacctttttttttaatgataggagctctgtcctttaattaagacgaaagaaaacatatgtacaagaaga

SEQ ID NO: 2866 - DNA, 1666 bp, Zea Mays
ctcactagcctacatttcggcggccgccgaaggcccgaaaccgtcgggcgtctcagggaggcgctgacgggggactcggagttgaggcgccggagtggcggcatccccctccagtcccagtccactactttctctgttcctttccgagacaggcacgcacgacacgcgctcgcacgcagagcaactgcttcgatctctccgtgtccgtcctctactctctagctaaccgcggtcggcccggggaggtggcgatgggcagcgaggacatgctcgtcgagatccacccccgcgagctccgctttctcggttaaaacaacttctccaaaaaaatattgtgttcgaccaaatataggagttattcttccattggcatcacgtgattttacagttactatgcaagcgctaaagaatgttccacctgatttgcaaacaaaagacaagtttcttgtgcagaccacagttgttccatttggtacagctgacgaggacatcgttcctgcttttttctccaaagaaactgatcaatatattgaggagaagaagttgaaagttgtcactgtcagagtatcagagcctcaagtagagaagctcatcaatggagttccccatgccaaggaaacagctggagttactgtggcagagcagacactagatagtgtgaatgaagcacctaatgtggtgaatgaagttcgtcattctctgaaagcaagctttccgtctttaagtggaactcctgctactttcaatgaaaactcctcatctgtaaacgaatgccctactatcctgcaagaatttctagtcccatccaaacaagcttcatttgcattgtcagaatctgcttccaatttgcaagaatcctctgttgcctctatagaaactctgttttcttcaacagaagcaagtgtagacctgaaagaatctccaccgctggaatatactcctgctccaagtgaagttccatcattaagtgataaagaatctaccaatgctgataatgtttatatacctcaggtaaccaaagattttcaaaatttacagatgaaacttaacaatcttgaagtaaaacttgatgaggctaaaactttgattgtaaaattgagggaagcaaacagaactaccatcctagagcgggataaattgcagaaagagatggtattcttgaaaagggcggaagctgctgcaaggagtcagtccatcggttttcccctgcttttcgtcatctacgtggcagttgttggcattttgctcggttaccttctacacctatgaggacggtgaattttagaagaagcacctgcgccattgctgatctctcttggagtcgctgagttcctgaacctgggttactttgtcagagtgaacctactgtcacgtcatgattgtcacattagtcagatgaacttgcatacatcttaggaccgggggtgataattactggagtatatagaaatagagcagcttaattttttacttggtataagaatagagtagtggttgatatatgctttgatcgagaaggccctgtaaccaggagatcatatccttgatacttctcctttcatgacaaggaacctccccttgtccttgtcacaatacgaacagaaactataaagagtttgttgaccttgtcaattaggttagagatcggttgttgattagcataaaa

SEQ ID NO: 2867 - DNA, 2231 bp, Zea Mays
cgcacaattggcgactagccgattgacatccatccatctctagccgggcggtcactcagagtctcagacacgcacaaccagtacaagtctacctgaagtgaccccgtcgacctgaagtccactactagactcagtgtacgcagcaggcagcagcagctagtgccaccgcttgcctagttgcctgcctaccctgcatgcatgcacgctcttctctttctgtagcctgtatgtatgcactgtatgtatggtcgcagtctcgccgatctatcaaacttggccagcgatcaggtgtagtccggtctgtctgcgggagccgcgctgagatctgacgtggctacagtggcgtcccagcctgagaatagaggggcctttaacaagacaccgagggcgcgcagccagcgggagcccatcccatggagtggtccatgtccagggggaggcggagatggaggcggtgtggcagatccatgctaaagctggcggggctgtgcctcgccgtcgccgtctgcctctgcctctgcctctacctctgcggcgttcggccttgggcctgcagtggctgtactgtgctgctccgttcagagtcctggagacgaggacgggcggcagcaccttgcggcaatcaggtgcgaatccatctccccgatctcagctactactacctatattctccactgcgcgacgatggcgatgggacagcgcagagatcaaaccgacttgtgattagctggttgtcctgttcataatactaatcttctgctccgggatccaccgcattcatgacgatgcgccatcaaatctaattaaacccacgtaacagagagcgacagaggaaacgccaaacgcacccggctccgccatggctgctgctgcacgcacgcacgcactgcagccagctcccggccagtagcgctcgatcatgcattcacaggcacaggcacggccatgccagctgctcgcagccccgtccgtccgacagcccttcgccgccgggtcccatggccttttgaccatacgtcactgctgtgtccatcggtcgatgcattggcaatgcaacaccaccgtacgtacccacgatagcgaccttaccgccggccgaatggtacgtacgttccacgagtgcgcgacgcgacgcgacgtaccctcagcccccagcattcagaactcatgatatggttcgttattcttcttgctactcgcgctgcaggggtgctacacgggtgggcaatggcggcggctgctggcggatggtccggggtcatacccgccacggtgcacgtccaagtgcggcgactgcagcccctgctacccggtgcacgtggccgtgccgccgggcgtgcccgtcactaccgagtactacccggaggcgtggaggtgcaagtgcggcaaccgcctctacatgccatgagcgcagtccgagcaagcaggcaggcagccagccagccagccagcgaaggatcgagagcgccggccgaggcgcgctgggcctacgctccattattgcaccgggcggggtggctctcgcggtctcgcctgcgctgcgctgcgcgcgcgcgcgcggtgtcgtggtcctctcgccgcgcgcatgggcgggatctgcgctctgcagcggcgcgtgctggccgtggccagtggcggcctaccactctgaccggctgccggctgggtccgctgcctggggatgctgagactgtgcatggctttttccgtgccgcgcgctggaattcgcacggccctaccacgagcgcgtggaggcttggagcggagcggaggcatggcgggcgtacggcgcgtcagcgcgtgctggatcgatgaaggatgagagctgagaggagctgtcgcggcccactcctacacgtgtccgtataatctgttcaatcttccaagtgttgatactcgatcttttcgcatctgagaatcttgttacacaattttctggtaaccaaatatactgttggatactagtactatatttcgtgatagtacggaacacttcaaatcctattgccctaccgtgttagaattgatctccaccggttagcccaatgacaaactaggtctttgacctcacggcttgatcgatagagtccagcacaaggtgaggttggtgggccttgttgcgaagcttataaataaagaggtgggagttgacggctcagtacaagattcacagtacctattgttttaattcccccaatcctaactgatctagagggaggctgtcagcaacg

SEQ ID NO: 2868 - DNA, 1402 bp, Zea Mays
accatggtgatcctagacagtggcgaagctagtagtagagcaaatcaaatcagcaggatgcaaatgtcttgagggtgtatagtgataatttataggtggtacatataagccatcggcgctgcgtcggcggcgccactcaagttcgggatcaactacgggcagattgcgaacaacctcccgcagccgacgcaggtgtcgggcctcctgcagtcgctgaacgtgaaccgcgtcaagctctacgacgccgaccccatcgtgctgacggccttcgccggcacgggcgtcgagttcatcatcggcaacgatgacctctacaacctgaccgacgcacgcaaggcccgggcctgggtggcgcagcacgtccagccgttcctccccagcacgcgcatcacctgcatcaccgtgggcaacgaggtgctctccggcaaggacacgaccgccatgcagagcctcctcccggccatgcagaccgtgtaccaggccgtggtcgccctgggcctcggcggccaggtgaacgtctcgacggcgcactcggtcaacatcctggccagcagctacccgccgtcgtcgggcgccttccgggaggagctcgggcagtacatccagccgatcctcaacttccacgccgaggtcggctcgccgttcctcatcaacgcgtacccgttcttcgcctacaaggcgagccccgggagcgtgtcgctgccatcgacgccgtgtacgcggccatggaggccatggggcacagcgacctcaccgtcaggatctccgagaccgggtggccgtccagaggggacgaggacgaggtgggcgccaccgtggccaacgccgccgcgtacaacgggaacctcatgaagaggatcgccatgggccagggcacgccgctcaagccgcacgtgcccgtcgacgtcttcgtgttcgcgctcttcaacgaggacatgaagcccggggcaacgtcggagaggaactacggcttgttttaccccaacggcacgccggtgtacagcctcggcttcaacggagcgtccttcagcccatcgccgacgtactcctcttcttccaagctggtgattacatttcagatggcagttgttgtcctactcgccagcttctccatcctacacactgccgtgccgtgccatgcgtgaagattattgctatttttttgactaacccatctgtggcttcattgtacattaggctagctaccagaacccatattagtctgacttgatgtaaagcatgcgacagtagtgctgtccagctcaattgataatgcgtattatatttgttttctaaaaaaatgaaattacaaatgtccatttctgtttggcgtcagagtagagttatttctctcgttatatggacgtctcttacttcaaagtagatattatttgaacttttg

SEQ ID NO: 2869 - DNA, 840 bp, Zea Mays
tcatcaccgctgcggccgtgcgtggaggcgtgaggccgatcaaatcggcggcgaatccccaaccctagcagcagtgggcggccggaccgggacgggcggtagacggctccagcacgcaacgctgacaggtttggccgtgcgaggcgcgagggctagacaggtgtcgcggcgccaggcatccagttccagggctgcgtgggctcgaccagagcgagtctgcaatccgcccgtccttgtccccgtcggcggccgttcaccagtgtcagttatatggtgagtcatgtcaaaggcacgtaatgctgtagttgccactggattgctgctcttcgctggtgctggcttatcatttccgttccttttcgtgaaatcaaagaacaagcctattattgattcgacaaaacctctgccaccacaggctacttttcgaggaccatacgtgaatacgggttcacgtgatatcggacctgatcctaccaactatcccaagaagtgatttgaatcttccatgacatttcggagtcccatttcactcgactccactgctgtgaaattgttcgttttggggccatcttactgtgcacgtgccttgatattgcaaaaaaataaaataaataacaatacctaaataaagggtggttattgaagctcctccattctccttgctcccaaacaaattccccttgcttccaaataaatcctagtgtaaagtttcccaatattgtatgggaatatctattttttacagatccatatatgattagttgaatttcatataggcgtattttgttttgtagataagactttattacaaaaaaagagttttaggcttgcgaaatttgg

SEQ ID NO: 2870 - DNA, 916 bp, Zea Mays
gagctggaagaaggtgaaccaacacaaccatcgcgatgaccatgagatcaaaggcaacctttcatgagtgggccgggccacttagaccaacatggggtagggagggaggagcccaggcccaggaaggactccgtccgggtacggcggcggcgttgggcgcgatgcaaaaggcgaaagaagcgaagaagataaggagggaccaagaccaacccagtgcaccacacaaggcattgtcagcggcggcggcggcggcgggccggcggagactcccaggccaggagcagtctgccgattggaaggggagatgaaggccacgctcaagggccgctacgagggcgacaaggccacggccgccaccaccctcgccgcccccgccggcgacctccgcctcaaggcctccgccaccgaggccgccttcaccaacggtccttccctgcgaggcctcaccctcaccctcgagaagcccggcgccttcctcgttgacctcaagccccacaaccaggatgtgcgctttcagttcatgaactccgcgctcgtgctcgacaagcgcgtcagcctcacctacactcactccactagcctcgccgcggcccccgccgccgcgccgccctcccgcaccgcgctcgactgcaccgtcactttcgaccccgccaacaaggtcagcctctcccactcgctaggctccggcggctgccgcctcaagtacacctacgcgcacggggtcgaccgcctcaccaccatcgagcccctcttcgacaccaacaagaacgcatgggagttcgccatcaccaggaagttcgccggaggggacgccgtcaagggcacctaccaggcctccaccaagctgctcggcctcgagtggagcagggactctctcgccggcggctccttcaagacatgaatccgtgcaagtgca

SEQ ID NO: 2871 - DNA, 2161 bp, Zea Mays
ctgccattgtgaacgaaagggaccaggctatacgccccctctcctccaatccaatctccacaggttggtcgcactccctccctcacaacacataccataccataccatgatgtcacaccactcctctcagaatcagatgcgcgctcttccttgcatctcgtgccactccagctaatttatgacctgtgctgagctttggagcagctagtaattaagcctagagcgctagcagtccttttggatttcggttcggaagcaaggcgtgccggactcccaaatcccaatcccaagcaagcagtgtgcagatggcaacgcagtggttctccaacatggtgatggacgagccgagctttttccaccagtggcagtccgacacgctgctggagcagtacacggagcagcagatcgcggtggcgttcggccagggggagccggtggaccacgccgtggcggcggccctggcgacggcgatgcccatgcagctgcagcagcccgcggcggccgagcagccgcaccaccgcccgcgcaaggcggccaaggtcaacaccagctgggactcgtgcatcacggagcagggctcccccgccgcggactcctcctcgccgaccatcctctccttcggcggccacaccgcgttcgccaaggcggagccgacgacgcaccagccgcccagctgcgccgggtactacggcgccgccgccgccgccgcgaaggcgccgaagcaggagatgatggacgccgccgcgatgccgccgttccagcaggcgcgcccggccaagcgttcctacgacgacatggccgcggtggccgaggccgccaacgcgccgtccgccaacacgcgcccggcctcccagaaccaggaccacatcttggccgagcggaagcgccgcgagaagctcagccagcgcttcatcgccctctccaagatcgtccctggcctcaagaagatggacaaggcatcggtgctcggcgacgcgatcaagtacgtgaagcagctgcaggaccaggtgaaggggctggaggacgacgcccggcggcgcccggtcgaggcggcggtgctggtcaagaagtcccagctgtcggccgacgacgacgagggctcctcctgcgacgagaacttcgttgccaccgaggcttccggcactctgccggagatcgaggcccgggtgtcggaccgcacagtgctggtcaggatccactgcgagaaccgcaagggggtgctcatcgccgccctctctgaggtcgagcgccttggcctctccatcatgaacaccaatgtgctccccttcacagcctcctccctcgacatcaccatcatggccatggctggtgacgacttctgctggtctgtcaaggatattgtcaagaagctaaatcaagcgttcaaatcatccttctgatgggtttagcttctgaccaaacttaatctaggccaacctttttttccattagccttaaggatttgaggctaatggtaatgttttcaggttcttccttgccttgcttccgaagagagttgcttgctgtcccccaacagtgcccccccaaagatagccatttccactgttttttgctgcatgggtgcagaggtttattacctagttacccaacatcctattttctctccctccagttttttacatggtttgatcctgtcactccatgtttttgggagggagcagattgtaaaaaaaaacaaaaaaagtgaccagcctttttctagggctttgctatataggccggggagctcctaattttcctctctcccctttgccagtatgtttgccctttcaccttgtttttccatgagaggattgtgtttgtcaaacacacaaaaaaaaccctacctttgccgtcctctcaatcttgatcacactgctcccaggaaagcttcaattgtggagaaaatggcgccatctttttttcagctctgagggggactttgcaagccttgatttggaagtactgtaggggtgccacttccttttttttttgagggtcctacaggttggccaccacttgatggaccctttgcttatagttccacatgtgagctttgttgtcacaggatcaatgtgtagttgttgctgtttactctcacacaagcataaaaataaataaatgtgctagtttgttacctttcatggcttttcagttcttg

SEQ ID NO: 2872 - DNA, 1227 bp, Zea Mays
ctagcctcgaagcaattcccggtcgcgggtctagtactgtagttctctactctccgcaacttgggagttcaaacccccccgcgcgcgctcggaggtctacaagcttctggatccgtccctggcgccgatggagcggttcgactccaagttccacgagaagtacactgttctcaagaagaggaagctgctagacgaggggctagagcgaaagcgagaggcggagctcaaggagctttacgatgccatgaaagattgggtcagcgaactcaagaaagacaatgcggagctcaacgataagctaatggaaaagcaggatgagctcgagaaggcccgtcaggaattccttgaagatattcttacaagggacactgaaattctgaggctgaagcaactcttagatgagaaagctgaaaaaaacaattctacagcttctgggtttcattgcttaacacctgaagctatcctagaaaattcaacttcaatgtcacctaaaagaaaaacaccactttcccacggcaaggagaagagggtacagttgagtgaaaatgctcctcacagtagccccgcaaaggaatctcaagagctagtttgttctagaagacgtacatgcatcagagggaatgggacaaatgaaattcggagtgcgcatatgcttcgtttgcttcttcaatctttagttcgcatgaaggtctcagtaaatgatgaatcagagatattttcggtttcagtctctcatgaagctagtgcttcaccctcacttggttagaaaaatctgatgaatggtcatataagctctcgtcgttgggcaccctgggaaggatagccgctgattggatgaggcaagacataagattcagcacgaaaatgtgccgtatgttcgttgagcggatatcaagcatcataacaaaaggatgacggcatgctattcgcttcagctagctgtatcagtgtgctaaggctatatggccagcagactgtgcaaaacactgttgcaacagagtggagtttggaatagaggatgggtttgtaaatgggacatccgtaaaaattatctgatgcaatctcattgcgtaaccccgattatggcgtatgttctcgagcgttcgtgggctaggatgatcgctgaggcgtttggctgttttcaaaatgtttttcaaaatacttttgtctatatgatttagttgttttggatttgtcctaaatcaaattatttaaattatattatgg

SEQ ID NO: 2873 - DNA, 1382 bp, Zea Mays
aaaacaaatttagctgttttttctttcgacgttttcgtccctacctcgcggttggggctcgcggctctcgcggcccgcctgtgctactgctgcacccgcacggccgcgcgcacctccaccgcaacggtcacttctagctctcgtgcagtcgtgcgtcctccatcgtcgcctctcctcccgcggtcaggggagtgtctgttgttgcgctgctaaggcatttcgggtgcccatgctgctgggagttggcctctgttctgagggacacaaaggagagatttgattctgctggagtaaaactgattgctgttggtgttggcactccagctaaagcccgtattcttgccgagcgcttgccctttccgttggaatacctctatgctgatcctgatcggaaggcgtataatctcttgggtctatattttggtgttggtcgcacgttcttcaatccggccagtgcgaaagtgttttcacggtttgactcccttaaggaggcggtgaagaattatacaatcgaagccaccccagatgacagggcaggtgtcctacaacaggggggaatgtttgtgttcaaaggtaaagaactgttgtacgcaaggaaagacgagggcacaggcgaccatgcacctttggacgatgtgctcaatatctgctgcaaagttcctgtaacctaacccgacggcttgtcccacagctcagtaggtccgtaacacagatcactttgagctatctttactagtgatttcttatttcatccttgttacaaaaaggagagtaagaatatactcgtaacaggcacattgtctttcatccattctcttttggcaattggcgttagcagatcccttatcttgttcacaagctggacaaggttctatatgctctgccgattccctgcatgccgatttttgcataacgtcactctaagttacttctgtacagtaggtacttggaaagcactttcggcgtccttgattcctgaacttccaggatcgcctgctgcaagagtgtcttctccaccaatgtgccgatattttcttttgagatgcttggtttactttgatatctttttggtgatggatcgtgagttgttggcttgttgcattatgaattgcgtactgtaagtatccagtttgctgtttagcacttatacaattcgaaagcaaagttcgaagtcctggctgcctggctcttccttggagatggaagtttttgcacttccagaaatatcgggaacataaagtccatgtgatcttttgtgcctttaaaattttggatcgtttcctaatggaaatctgttccagttttattgacatcagaaatcctatctcctgtagtcctgttattcagcgtctgagtggagctataaaattgatcttatcatt

SEQ ID NO: 2874 - DNA, 2087 bp, Zea Mays
ctcagtacctagcttcacccctggattagagagaggtgttgtagtttgctgcaagtgggagatttgtgtgatttatgatctcatgaagtttgaagctgtgtgcataagctagctgtttttttttccaatcatcatgtgcactcgaaacattggacctgcatttaacatattcagttgtgctgatcaaacactcggttcatcaaaatggagctgaaaatatattcttttgtctgtattcatcaatacaaggttttgttgaaggtctgagctgtgcaaagagagatggattccaaaaagaagaggaacaagaagaagaagggaaaccaagggaagaatgccgctgatgtcacatccattgctggggaagctgcttctcagaatcacaatcatgagttagccccaatagatcatcataaaggttctgatgcagatgatgtcatgtccagtgttggagaggaacttcctcagtacaagaatcatcagccaaatatacaggcagattataatggcacaagtgcttacgacactacatcctccattggagagtgtattgcatgctatcaaaacaacgaacctatgatgacacaggagaatcacaaggctagcaatgcagtccctgcagatcagaggagtgttggactgtcagagtctagtgtggagcttgacatgcatagacttcatgaagccaaactcgataaattacatgagacaataaagcagttggagaatgaaaagagtttgtggcttcaaaaagtgatcaccatggagggtgaacttgaaaagttgcataacgaagtgggttgtcatgctcaaaatgaggtccttttggaggaaaaactgaatagtctacagagtggttatgatgtgctgattaagaaggaggaagttgtggataacaaagtcaggtgcatagacaacatcaatgataccttaactcatcaagagtctttgcttaaagaaagattaagtgggctggaggaaacaaacaaatccctgctggtacagtctggcaggtgaaggtgttggaggaagcttcaaacaatacttctgaggaaaatcagatgttggtaaaaaaaatatatgaacttgattcaagactacaagcacttgaagcaaaggctgctcctagtgaagccttaatgattgaaaagagtgtaacaaaaactgtaatgcagttccctgataataaggtgatggatcaagtgcattttgccaactcgccacttcagcaacagacaattgatttttcagagggtaacaaactgtttgctgagagaggtctgagcagtccagtgaaacttaatcctgacaacagctatcgtcaaatctacgacattcccagcaatgactatgctagtaattatacagaggaaacatcaatacaacttccagaaataggcaccagcaatactattgttcaaggtcatgttgatgtcaatgaacaccgatttgatggaccaagaacaatcgaagaaatcgttcctgttccattggatgagatacagatccatgaggatgtcccagggcaaccgggagcagccgatgagatagatgaggttccattttctgacgctccgatcattggtgctccattcagactgatctcatttgttgctaggtatgtcagcggcgctgatttggtcaaccaaaaataactgtctgcataccaggaattcaggacttttatgtcaggagttcctttttgatcccactgataattacgtcagtatcttgagataaagatggatagattggattcagaatagatatggagctgtattcattcgtgtcagtgctcacgtcactgccaattattctccttcccctgtacttttttcaggcgccggagaaattcttgttcctttatactacctgttcttgaatatttgtcatccgctacttcatttttaaattaaaacacgataaataaaaaaagaacggagaagtacaatataagaagctatgtaccatgggcctctttacgggtctaaccatgcgaaaaagttgttctggaaattctattattaatgactgaattttggtgtgctgacactataacctgtgacagacacctatatgcttgattt

SEQ ID NO: 2875 - DNA, 2175 bp, Zea Mays
acacgtgcctgtggcacgtgcctctcaagtctcaactagtatgtagaaattggctagtcgatcggatactccctttccctgcgaagtgttctacgactggtggactctcttggctgtggctgctgatccgccaatgtcaaaggcacgtgcagcagcagttgcccttgcccctgggtctggttgatcgcgatgcacatgaccggagcctgactttggtgcggcgtgagcacgatgatgcgttgcgcggttcggattcgtgagagctgtagtcaaaaggctggaacggatggaattatccgagcagattgggtgggacggcggagggagccctttgcgccgtcacaaatcgcaaccaatcgccgagttgcttgtgttaaatagctcttcgcgtacgacacggcaagcgggctgcgacggcgactttctcatctgctcactgctctgcttctccactccgctccgctggcagcgcaggccatggcgacacaggcgctggcgccctccctccgcctcctcctgctgctaccgctgctcgccgccgccgccgccgccgccgcgttgtctcacccagcgcacgagttctgcgcggtcgggggtgacgcctccggctgcggcggcggaggagacggcacgaggatcctgatcaagggcgggacggtggtcaacgcgcacctcgcggaggaggccgacgtctacatcgaggacggcgtcgtcgtcgccgtccgcccagacatcccggttgatgttgataatgtcagggtaatcgacgcaacaggaaaatatgtcatgccaggtggaattgaccctcacacgcacctggagatggagttcatgggcaccgtgaccatagatgacttcttcagcggccatgctgcggcactggcgggtgggacgacgatgcatattgactttgtcattcccgtggacggcaacttgactgcagggttggagtcctacaagcacaaagccgcaaaagctgccatggattatggctttcacatggccattacaaagtggaatgatgaggttgcaagggaaatggaagtgatggttaaagaacatgggataaattctttcaagtttttcatggcatataaaggctccttgatggttactgatgacctcctcctgcaaggcctacggaaatgcaagtcgcttggtgcccttgctatggttcatgcagagaatggtgatgctgttgccgagggacaacagcggatgattgaccttgggataactggtccagaagggcatgctctctcaaggcctccaattttagaaggagaagcaactgcacgggcaatccgtttagctaagttcatcaatacgccactgtatgttgttcatgtgatgagcatcgacgcaatggatgagattgccaaggctaaaagagaagggcagagagtcatcggtgaacctgtggtttctggactagtgcttgatgattcttggctttgggatcctgacttcacgattgcttcaaagtacgtgatgagtcctccaatccgggaagcagggcatggtaaagcactccaagctgctctttcatcgggaattctacagcttgtaggtactgatcactgcacattcaactccacacagaaagcttttggttctgatgattttcggaagattcccaatggtgtaaatggtcttgaggaacggatgcatatactttgggacagcatggtggagactggcaagatttctgtaaccgactatgtcagagtgacaagcacagaatgcgccaagaccttcaacatattccctcggaaaggagcaatcctggaaggatctgacgcagatatcataatcctgaaccctgaaaggagctttgtgatgggtgctctcacacaccattcgaggtccaacaccaatgtgtacgagggcaggaaaggaaagggaatggtggaaataacaatctcaaggggccgagtggtatgggaggatggcgttctgaacattgcacctggttcaggacgatacgtcatgatgccacctttcggctacgtctttgatgggatcgagaagtccgatgcgacctacagagcttccctccgagcccctgtacagcgtggtaaagctgctgcatagctatgacagctgctgatgccattgacagggcagtagccccccatctgattcaagaacgagttgctccaaggtacaagaagc

SEQ ID NO: 2876 - DNA, 2376 bp, Zea Mays
acacgtgcctgtggcacgtgcctctcaagtctcaactagtatgtagaaattggctagtcgatcggatactccctttccctgcgaagtgttctacgactggtggactctcttggctgtggctgctgatccgccaatgtcaaaggcacgtgcagcagcagttgcccttgcccctgggtctggttgatcgcgatgcacatgaccggagcctgactttggtgcggcgtgagcacgatgatgcgttgcgcggttcggattcgtgagagctgtagtcaaaaggctggaacggatggaattatccgagcagattgggtgggacggcggagggagccctttgcgccgtcacaaatcgcaaccaatcgccgagttgcttgtgttaaatagctcttcgcgtacgacacggcaagcgggctgcgacggcgactttctcatctgctcactgctctgcttctccactccgctccgctggcagcgcaggccatggcgacacaggcgctggcgccctccctccgcctcctcctgctgctaccgctgctcgccgccgccgccgccgccgccgcgttgtctcacccagcgcacgagttctgcgcggtcgggggtgacgcctccggctgcggcggcggaggagacggcacgaggatcctgatcaagggcgggacggtggtcaacgcgcacctcgcggaggaggccgacgtctacatcgaggacggcgtcgtcgtcgccgtccgcccagacatcccggttgatgttgataatgtcagggtaatcgacgcaacaggaaaatatgtcatgccaggtggaattgaccctcacacgcacctggagatggagttcatgggcaccgtgaccatagatgacttcttcagcggccatgctgcggcactggcgggtgggacgacgatgcatattgactttgtcattcccgtggacggcaacttgactgcagggttggagtcctacaagcacaaagccgcaaaagctgccatggattatggctttcacatggccattacaaagtggaatgatgaggttgcaagggaaatggaagtgatggttaaagaacatgggataaattctttcaagtttttcatggcatataaaggctccttgatggttactgatgacctcctcctgcaaggcctacggaaatgcaagtcgcttggtgcccttgctatggttcatgcagagaatggtgatgctgttgccgagggacaacagcggatgattgaccttgggataactggtccagaagggcatgctctctcaaggcctccaattttagaaggagaagcaactgcacgggcaatccgtttagctaagttcatcaatacgccactgtatgttgttcatgtgatgagcatcgacgcaatggatgagattgccaaggctaaaagagaaggtacgtgatgagtcctccaatccgggaagcagggcatggtaaagcactccaagctgctctttcatcgggaattctacagcttgtaggtactgatcactgcacattcaactccacacagaaagcttttggttctgatgattttcggaagattcccaatggtgtaaatggtcttgaggaacggatgcatatactttgggacagcatggtggagactggcaagatttctgtaaccgactatgtcagagtgacaagcacagaatgcgccaagaccttcaacatattccctcggaaaggagcaatcctggaaggatctgacgcagatatcataatcctgaaccctgaaaggagctttgtgatgggtgctctcacacaccattcgaggtccaacaccaatgtgtacgagggcaggaaaggaaagggaatggtggaaataacaatctcaaggggccgagtggtatgggaggatggcgttctgaacattgcacctggttcaggacgatacgtcatgatgccacctttcggctacgtctttgatgggatcgagaagtccgatgcgacctacagagcttccctccgagcccctgtacagcgtggtaaagctgctgcatagctatgacagctgctgatgccattgacagggcagtagccccccatctgattcaagaacgagttgctccaaggtgaacaccgcatcgttccatgcgtattgtctatacagaacagtttatttaagatcagattcaggataggtaaaggcctcagcttgcctatgtacatcaaacacatttgttactagttctggtcaatttgtgcaactagcaattcgctgttccaataaatcatattatcacattcattactcgcattgtaatgttaaacccttcttcctattcatcatgagctatccccaaacatgctaaaagaacatggttactgattgttcatgaaaaggatggcctatgcagtactgtgattctttg

SEQ ID NO: 2877 - DNA, 3521 bp, Zea Mays
acacgtgcctgtggcacgtgcctctcaagtctcaactagtatgtagaaattggctagtcgatcggatactccctttccctgcgaagtgttctacgactggtggactctcttggctgtggctgctgatccgccaatgtcaaaggcacgtgcagcagcagttgcccttgcccctgggtctggttgatcgcgatgcacatgaccggagcctgactttggtgcggcgtgagcacgatgatgcgttgcgcggttcggattcgtgagagctgtagtcaaaaggctggaacggatggaattatccgagcagattgggtgggacggcggagggagccctttgcgccgtcacaaatcgcaaccaatcgccgagttgcttgtgttaaatagctcttcgcgtacgacacggcaagcgggctgcgacggcgactttctcatctgctcactgctctgcttctccactccgctccgctggcagcgcaggccatggcgacacaggcgctggcgccctccctccgcctcctcctgctgctaccgctgctcgccgccgccgccgccgccgccgcgttgtctcacccagcgcacgagttctgcgcggtcgggggtgacgcctccggctgcggcggcggaggagacggcacgaggatcctgatcaagggcgggacggtggtcaacgcgcacctcgcggaggaggccgacgtctacatcgaggacggcgtcgtcgtcgccgtccgcccagacatcccggttgatgttgataatgtcagggtaatcgacgcaacaggaaaatatgtcatgccaggtggaattgaccctcacacgcacctggagatggagttcatgggcaccgtgaccatagatgacttcttcagcggccatgctgcggcactggcgggtgggacgacgatgcatattgactttgtcattcccgtggacggcaacttgactgcagggttggagtcctacaagcacaaagccgcaaaagctgccatggattatggctttcacatggccattacaaagtggaatgatgaggttgcaagggaaatggaagtgatggttaaagaacatgggataaattctttcaagtttttcatggcatataaaggctccttgatggttactgatgacctcctcctgcaaggcctacggaaatgcaagtcgcttggtgcccttgctatggttcatgcagagaatggtgatgctgttgccgagggacaacagcggatgattgaccttgggataactggtccagaagggcatgctctctcaaggcctccaattttagaaggagaagcaactgcacgggcaatccgtttagctaagttcatcaatacgccactgtatgttgttcatgtgatgagcatcgacgcaatggatgagattgccaaggctaaaagagaagggcagagagtcatcggtgaacctgtggtttctggactagtgcttgatgattcttggctttgggatcctgacttcacgattgcttcaaagtacgtgatgagtcctccaatccgggaagcagggcatggtaaagcactccaagctgctctttcatcgggaattctacagcttgtaggtactgatcactgcacattcaactccacacagaaagcttttggttctgatgattttcggaagattcccaatggtgtaaatggtcttgaggaacggatgcatatactttgggacagcatggtggagactggcaagatttctgtaaccgactatgtcagagtgacaagcacagaatgcgccaagaccttcaacatattccctcggaaaggagcaatcctggaaggatctgacgcagatatcataatcctgaaccctgaaaggagctttgtgatgggtgctctcacacaccattcgaggtccaacaccaatgtgtacgagggcaggaaaggaaagggaatggtggaaataacaatctcaaggggccgagtggtatgggaggatggcgttctgaacattgcacctggttcaggacgatacgtcatgatgccacctttcggctacgtctttgatgggatcgagaagtccgatgcgacctacagagcttccctccgagcccctgtacagcgtggtaaagctgctgcatagctatgacagctgctgatgccattgacagggcagtagccccccatctgattcaagaacgagttgctccaaggtacaagaagcactaggcacacaattatatggtgtttggtttgagaaataagatcggaaaataacaaacatccaccataacaacaaaaaggaaacatcctaagagagtacacatggaaatctttgcgagccccttccttcttttccagtccgatcggttaagatgctcccgctacaactatgggagggatgttagttaggatttattatctcttctgctatcatggagatatggacctaccaccgtgatgatctcatgtgccctggttggggacatgcatatcagcatatgtggtccagtgatcagtgacaagaagccaagcccctgacagttgaccagggcaactgttaggccagtgcagtgaagtgaggcaggatggcacatgaatggaaaccattgctcatcgatctcagtccttgcacagttgctagaagagcataaggccaacagaaacctcacttcagagttcagataacaaagttgtcatccaatgattacaacacatgaggtgaaaggtctagtctaatcagaaaaaagcaatcgactttttcctcgtggaaagcagaggcaatcaccaccgcaatccatgcgctgcgcagtacagtgaccaattagccagaaagcaatcagcaataagcagggaccatatgatgcccatgctcgtgcacggacaggtgagacggccacaggaagtcaggagcacgcggaaacgggaggacagatgaacgggggaagaaaccatgagcaaaagaggaagcggggacatacatgccgtgctgaggtggcccaaagctcgtcatcgccccgctcgcatcttctgccaccgaccctcctcgtctactctccatcggctaccatcaatcagcatgcaaccgtccggcgccgctgtcgcctcaccgcaggcccgcgcattcaaacaagcatcgcaagccaagcagaagcggaggaggattcctgtcgaaaaagcttggacttttgcacggcctggtgatcagtgggcgatttgacaggggttgtgtttcgaggtgattggggaaggacgaagggaggtggtgggttgagaagaaagcggccggttgtgtttgggcgaagcgaggagaaaatggagagggtggtccgtccgtccactccagcggcggcaggggccaggggcagcagaggttgccaacgcctcgaactgcggccatttttataatgatttctcgagcttgcgagtccccatcgccactggaagaggagtgacgtttggaccataccaatctcaaggcgggagccatcccatcccatgcttccgctcacacagtggccagcgctgaggcgagctcagacgtatacatcctctatagtcgtcctttac

SEQ ID NO: 2878 - DNA, 2082 bp, Zea Mays
gcgctgccccctcccctcctcccccggtctcactcacactccttcatcgggctcggcccgcgcggtcgtgagttcgtgactgcggaggaagtagcgcaggcgaaaaggctgcagcagtggacggcggcgaaccctagcctagctccgcgaggtgagtggttcagttcgacggctggcgcccgcgtatggggctgcgcgattcccgctgacttcctttctggtggattttggcaagtgcgttggcggtttgattcgatggccgtggcgtcgcggctcgcggtcacgcgtgtgtcgccggcggacggcgcgcgccccgcggcggcggcggggaggaggagtgggctcgcggtggttcggctcccgccgaccgacagcagggggagaaggaggaggcgcggcggggccgtcgcggccagccccccgacggaggaggtcgtgcagatgacggagccgctcaccaaggaggacctcgtcgcctacctcgtctccgggtgcaagcccaaggagaactggagaattggcacggagcatgaaaagtttggttttgaagtcgacacattacgccctataaaatatgatcagattcgtgacatactgaacgggctcgctgagagatttgattgggagaagataatggaaggaaacattgttatcggcctcaagcagggaaagcaaagcatctcactagaacctggaggccaatttgaacttagtggcgctcctctcgaaacgttacatcaaacttgtgctgaggtcaactcacatctatatcaggtcaaagcagttggagaagaaatgggaataggatttcttgggcttggctttcagccaaaatgggcactgagtgatataccaataatgccaaagggaagatacaaaataatgaggaattacatgcctaaagttggtacccttggccttgatatgatgttccggacatgtactgtgcaggttaatcttgacttcagttcagaacaggatatgataaggaaatttcgtgctggcctcgcattgcagcctaaggaaaaccaaatggatttctcagcctaaggagccatatctggacagataccgataacaaccgtgcagggatgctcccttttgtctttgacaactcatttgggattttatgcaaggaaagctccgacaagctcctggggagttgcctactcttaatgattgggagaaccatctaacaacaatttttcctgaggttaggttaaagagataccttgagatgagaggtgctgatggtggcccatggaggagattgtgtgcgctgcctgcattttgggttgggctgctgtacgatgaggaatcattacaaagcattttagacatgacttttgactggacacaggaggaaagagagatgctaagacataaggtaccgttgactggtctgaagacaccatttcgcgatggatatgttagagatttagccgaggaagttctaaaactggccaagaatggattggaaagaagaggatacaaggaggtcggtttccttagagaggttgacgaagtggtgaggacaggagtgacacctgccgagagacttctgcatctgtacgagacgaagtggcaacgcaacgtagaccatgttttcgagcacttgctatactgatgttgtagatgtaccctagtacaaaaatctcatctttgattcattcaacgccttgagtgggagggcacaggaacacagcttttggttaagttgctgaccgggggaacagctacccggtgctgcgtgcggtgcctacaaataacttcgctcgggacggatcactactctctagggagatggaacaaatcactgtttgtaccggccctttttgtttctgttttccttcagagatggagatgccgtattgaaaataagtccatcttctgtacgatgggaactgtctgttttccccccttctttcctttcagcattgttgggatgtttgtcccgtgttaacatgcaaaatcaattacgtgtacgataaataagctgatggtttgatccggaatctgcaattgcgcgtgccttttcccaccttgtttttagccaaaaatcactatggatgagactacagt

SEQ ID NO: 2879 - DNA, 2234 bp, Zea Mays
attttgagggagggagttccctttctctgctctggcctccatgcatataacttgctcagcaggcctagttctcgcagtcggatcctcatactgcaagaaccctctctctctctctctctctctctctctctctctctctctctctctctctctctctctctctctctctctctctcatctttctctctcaagacacacaaaaggaagaagggagcctccaagcagacccctgctgtatagctgctgcagcatgcgcgaatcctaactgaggactaggccaacaatacatcgcaatgaagtacatgaagctcggttcaaaacctgatacgttctataccgaagaagcagtcagttcccactgctcctcaagtgcggcctcctgcagcgcctctgctccgacaccgacgacggcgatgaggagccggtgcccgtggcgctgcacgacatccctggcggcgagcaggcctttgagctgtgcgccaagttctgctacggcatctccatcagcatcagcgccgggaacctggtgcccgcgatgctggcggcgcgcttcctccggatgacggaggccgtcgccaagggcaacctggtggccaagctcgagaccttcttcgactcctgcgtcctgcagggctggaaggactcggtcgccgcgctgcaggccgcgtggcggatctccggctggaacgagagccgcatcgtacagccctgcatcgactccatcgtcgagaagatcctcctgccaccgtccaaggtcacgtggtcctacacgtacacgaggccagggtacaacagcacgaggaaaccccaccagtccgtccccaaggactggtggacggaggacatctccgacctggacatcgaggtcttccgctccgtcatctccaccgtgcgcgcgtcgcggctgctcccaccgccgctcatcggcgaggcgctgcacgtctacgcgtgcaagcacctcgtcgacccgctccacgttgccagcgacgcaggactgaccgccaacggcgtcctccaccagccgccgcagagctcagacgacggcgaggagaagctggtggccatgcagcgccgcgtgctcgagtccatcgtcaccatggtcccgggcgagccggggtcggtcaccggccgcttcctactaaggctgctgcgggtggccaactacgtcagcgcgtcgtcgtccacgcgcgcgcagctgatccggcaggccggctcccagctcgacgaggccagggcggcggacctgctcatcccgctgccatcggacccgcacgcgtacgacgtcggcacggcggaggccgtgctcgagcacttcctggcccagttccagcggcccgcgccgaccgacgagcggcgtcggatgagcgccgccatggagaaggtcgccaggatcttcgacgagtacctgcggaccatcgcgctggaccgcagcttccctgtcggcaagttcgttgacctcgtcgaatgcttgccggacatcgcccgcagtgaccacgacggcctctactacgccatcgacatctatctcaaggagcacccggagctgagcaaggcggataagaagcggttgtgccggctgatagactgcaggaagctgtcgccagacgtgcgggcgcaggcgatagccaacgaccggatgccactgcgcaccattgtacagcttctcttcgtcgagcaggagcggaccatcggtgcagccgccggcagccatgctgcttccggtggcgccgcagatcgggcctccgtcggtgttatctcccagctcgcggcgggaaccaaagatgaagaaccagcctcgtctgctggccacaagtcagacgtgcacagaccacgccgggaccatgcccgggtagccgatggagcctctgccatggcgaggtcgctgtcggcgtcaaccaagactccaccggcagcgaggaaggagaggacgccggaggagacggggagcaggatgaggaacaagcagtgaagcccagtgcacaatttgttcatacttgtgattcttgattatattttttttatttcagtgcatcccatttttggtgggagatgtaagaggtagatttttgtaattaaaatggataaggagttaataagtggctacgtgcagtcatgctcatataatctagggtagctcaccgatgaacaaaggttcgtgttcatcacattcttcctccggcagaacttatgtttgcccatgcatcggcagcctacgaaaaatcagccaatttaac

SEQ ID NO: 2880 - DNA, 2267 bp, Zea Mays
gccaaacaaaattcatccatatttgcaagtgccagctccagctattcatggcaagcctgcatgtataaatataatatagacactggggtcatgccaagttgccaacatcgtcttgttcagaaaaaaaataaaaataaagagtgagcagaaaggagagagaggaggaccagcgagcaacaaccagtgctgcgtgtctggtggagccttgtgggctgtgaggcctgctgcttgaggactaggccaacaatacatcgcaatgaagtacatgaagctcggttcaaaacctgatacgttctataccgaagaagcagtcaggtcagtcgtatcagacatacccgccgatctcattatccatgtaaataacaccaagtatcagctacacaagttcccactgctcctcaagtgcggcctcctgcagcgcctctgctccgacaccgacgacggcgatgaggagccggtgcccgtggcgctgcacgacatccctggcggcgagcaggcctttgagctgtgcgccaagttctgctacggcatctccatcagcatcagcgccgggaacctggtgcccgcgatgctggcggcgcgcttcctccggatgacggaggccgtcgccaagggcaacctggtggccaagctcgagaccttcttcgactcctgcgtcctgcagggctggaaggactcggtcgccgcgctgcaggccgcgtggcggatctccggctggaacgagagccgcatcgtacagccctgcatcgactccatcgtcgagaagatcctcctgccaccgtccaaggtcacgtggtcctacacgtacacgaggccagggtacaacagcacgaggaaaccccaccagtccgtccccaaggactggtggacggaggacatctccgacctggacatcgaggtcttccgctccgtcatctccaccgtgcgcgcgtcgcggctgctcccaccgccgctcatcggcgaggcgctgcacgtctacgcgtgcaagcacctcgtcgacccgctccacgttgccagcgacgcaggactgaccgccaacggcgtcctccaccagccgccgcagagctcagacgacggcgaggagaagctggtggccatgcagcgccgcgtgctcgagtccatcgtcaccatggtcccgggcgagccggggtcggtcaccggccgcttcctactaaggctgctgcgggtggccaactacgtcagcgcgtcgtcgtccacgcgcgcgcagctgatccggcaggccggctcccagctcgacgaggccagggcggcggacctgctcatcccgctgccatcggacccgcacgcgtacgacgtcggcacggcggaggccgtgctcgagcacttcctggcccagttccagcggcccgcgccgaccgacgagcggcgtcggatgagcgccgccatggagaaggtcgccaggatcttcgacgagtacctgcggaccatcgcgctggaccgcagcttccctgtcggcaagttcgttgacctcgtcgaatgcttgccggacatcgcccgcagtgaccacgacggcctctactacgccatcgacatctatctcaaggagcacccggagctgagcaaggcggataagaagcggttgtgccggctgatagactgcaggaagctgtcgccagacgtgcgggcgcaggcgatagccaacgaccggatgccactgcgcaccattgtacagcttctcttcgtcgagcaggagcggaccatcggtgcagccgccggcagccatgctgcttccggtggcgccgcagatcgggcctccgtcggtgttatctcccagctcgcggcgggaaccaaagatgaagaaccagcctcgtctgctggccacaagtcagacgtgcacagaccacgccgggaccatgcccgggtagccgatggagcctctgccatggcgaggtcgctgtcggcgtcaaccaagactccaccggcagcgaggaaggagaggacgccggaggagacggggagcaggatgaggaacaagcagtgaagcccagtgcacaatttgttcatacttgtgattcttgattatattttttttatttcagtgcatcccatttttggtgggagatgtaagaggtagatttttgtaattaaaatggataaggagttaataagtggctacgtgcagtcatgctcatataatctagggtagctcaccgatgaacaaaggttcgtgttcatcacattcttcctccggcagaacttatgtttgcccatgcatcggcagcctacgaaaaatcagccaatttaac

SEQ ID NO: 2881 - DNA, 2787 bp, Zea Mays
atccagtcgaaacccactcacttgatggcaaagtagcgaatcccacgtttcataatggctcggttccaaatttctcccttcccaagcatggcgtccctgccgcagcccccgcgatccccttctcaagcctggcgtccctgccccccgcgatcgcgcctgccaagcatggcgtcgtcgcggccgttgcccccgcgatccccttccatcgacctgccaagcatggcatcgccccggccgttgccacgcccgccgcacacgccgcgatgagatcctggaccccccgcgacatcctcctccaccgcgccatggccgcccccgacgtcctcgcgcgccgctccccgaggtgggcatggtgcgcacgaccatcgcgggggtcacgacggcggcgcggttccaggagctggtggactggatggaggagtggaaggcggcgttcagggacaacagcaagtggacggagacggtgaacctggggctcgggagcctcgcgctcatcatgtccgggctgcttccgttcgccatcgacggggacctcgggttcgggaagcccagcctcgtgctaccctgggtgcgccatggccggctgggatccgcgtccgtgatggtggtgccctgccccagcggcgacatgtcgtggttcttcggcggcaccaggatgtggctgcggctcatggaggtggtcgaatccgaccctttgatgaagcagacaacgaacctgggaatggcgacagaggcgggatcccgtctgtgactgtgagctcgcgctggcggtacctgccattacggtgtacgggtatcatcgccatcatcatccagatccaggacatttccggatagatgacataatctgttcatctcaaatgccacaacattcgtgggcacatgttgccttgttggcttcatttagctcgcccgacatcatattttagcaactatctgtcatatataatctactaaaatggtttattttttcatttactcttatactctcatttttccaaccaggacttctgagcacatggaagatgaaggagacgttgcaactcctttacactttccaaatttttattaaatataccaatatcacgaggtgaaccttcgagtttagtgatttttcatatccatggtttgcagtgccacaaaggcaagcgaacctttgatttggtccatgttctggtctaaccttgttgggtccacactccatgggtcactttcacattactactaccatatctgtgaggtaaccattgttacatgacctactcatatatcttttgcttgtacattcaagtaaagattgtctatttcaaccacaccaaaagtaaagaaaattattaagttggtgaattgacaaaagaaatgaagcaagtttttaggtgttgaagtataagtgattcgcccaacttttcccatcagcttgacttttagtttgggggtaaactaacctacacatagcaggcatcagatatagcatattacaataagctaggtatgtgtttgtattcttagttcttttagtatattacataagctacatccctcgtgatgccttaatctaggttatatctcaatgatgatttctttataacatgctgatcataaagcatttgtagacagtgcattcaagtaacggtacaatacaaagggtggcaaatgataatagcctgaagaatgatggcacaaaatgatctagagtattctttatcttacttagattttgtcaacattccatcatcatataatctcgaatattttcataaactggttgtgtaaaatggggggatctttctccatgaatctcaatggatctgttgtgcactgcatagctgcggagaagaaaaaggtatcaaatatcaagcagctttacggcagcgaaggatcattcactatgagtggatattaaactgttgcaaggaaaacatcttcattttcatcctagatagacttttagtccttttttgtcacccctcaagggactagagactaaaagggtttagtccttcatatttggaaatttggtagtctgatgcatgcacattcgatctgtctcatcagtgacatgtatcgcttgtcatttgatgaaaatggaagttgaacgatcattctctttttgggcactgctgaaggtgatgttgttcacccaactgagtgtatgccccagctgcttgagcaagttcggcatcacaaagcgaatatcgattgcaatgattatattgtcatggtgactacattggttcttgagatgtccatgctgatggcttgtgaaatcaggctcttggcctaagattgacttagatgacccttcaaagaggatgaaataactgaataacaaatctaagcttctgattgttgaggatttgtctacacaacaagtgaatgataagctcctagaagctgtacaaccttaagcactcgagcaatggagcaatgtggtatgatgagagcataggaggtttgtcgagatgaggtcgaaacatggccccaatgtaactagaccagagcaattgacaatctaggcaatatccgctatctggtccattgtttctctcgtgggtccattgtttctgtcgtgggtcagacgtcttcgacgtgaagagaggttgttttgtcatttccacattctgaagcgtaatgtagtgcagtggacgcatatagctactacgtatgttaaagttgtattttttatatctcatattagatgtatttactattttacaagccttatgaaaatagcaatatgagtggtactaaattattgatatgtattaaagcagcttcttaaaaaaa

SEQ ID NO: 2882 - DNA, 1999 bp, Zea Mays
cttcgcagtcgcagcaagcattccggctctgcatctggcccagctctgggttgcgcgaacagtcggaaccctaattccctccccggcgccggcgccggcgccccctagctgcgcccccacgaccagcagaatccagatcgaagttttgctcttgccgcggccccgcctaaactccaaaagtgcgaaccccctaactcatcgatcccagcctgcctccgcctacgcgcctcgtgacggcgtggacccctcccctatctgcgtgctgcgcgcatccgcctgcggcctgtcccgtgcagccgtgcctcctccgcgcacatctccagggtctagccgagagcagaccgccgtgacgccaccactcgcgctcgcgctcctgacatcgttgtctgccttctctgtctaagatcagagcagagctccatcgaaagcgtcgcccgcctgcttggatgatcaatcaccacgaaatagtgcagtttgggaagctgtacaatagagacatggaatcagctcctgctcatacccctcttatacatggtcttcctgatgagtgaagaatggcacttgtgccgcaagaggaataacttggacgagccgtggatctatgtaatctgtagggaagcaggcatcaaatgctatgtgttggctccagatcctccaagccggtgctttcgaatcatgcatgtcattgaacccccatgctcagggaggaaaggtgttaccattgaagctttagacaaaaagctatttcttctgggtggctgcagttccgtgtatgatgctacggatgaagtatattgttatgacgcatcctcaaatcgctggagctcagctgctccaatgcctacagcaagttccttatgctccgccgccttcctttcaggtgctattttgtgtctgcatcccttaaggagaagttgtacataactgatggatacggcttgacggacaagtcaccaaattcatgggacatctatgacccggccacggactcgtggtgcacccacaagaacccgttgctcacccctgacatagtgaaattcgtcgcattgggggaggagctggtgaccattcaccgagcggcgtggcacaggatgtactttgccggcgtatacgacccgctggaacgcacctggaggggcagagggaacgagatcgctctctgctactcgagcccgacggtggtcgtggacgggacgctgtacatgctggagcagtccatgggcacgaagctgatggtgtggcgggaggacgccaaggagtgggccatgctcggcaggctctccgacaaggtcactagacccccctgcgcgctcgtggccatcggcaggaagattcatgtggtcggaagagggctgagcatggtcaccgtggatgtggacacggcggcaagggtggacgggttcctggttaccacctctgtaggcccgttggtggaggaagacctgaccccggagaggtgcgtggtgatcaccatctgaaggggtgggcgtgtccaagcttccttgacgccgggtgtattgtggtaactgtgactgactatcgtcgctggcgccgaacatttggctagctagcgtggatgatatatactgcgatgtgagtgaattcaataagaggcttggctctccatacagccaataactatagttagcatttgtatctcgtgttgtttgggctgcttttgtcgactgctggctgtaagaacaatatttgagcttcgtttgttgagtactgtgcgtcccagatggatgggattaatacaagctaatgtgatcctcgtcctggcacttttgttattgtctatttgattgatcgatcaagcgttcgatttctgcagacatggatggcgatgtgcatcgacatttgagggtttcggttttttcttttactgtcggtgtaatggttttggatgctgtgcgtcggtagctttacgatttgtgttcgctacatgcgtaatgatctgattgagatgtgtggtgtactggtgtgtgtaaaataaagc

SEQ ID NO: 2883 - DNA, 986 bp, Zea Mays
  misc_feature (985)..(986): n is a, c, g, or t
agacgtcccctctagggcttgttcggttattttcaatccatatggattggaggggattgatacggattggaggggattttgacttattgtggattgaaaccccttcaatccccctcaatccatatggattggggtaaaaccgaacaagcccctagcgggaatcgcaatctcaggatccagccgagcactcgacagtcctaaactcctaatccggtgcccaagtgctgaccttgtctgcatcttgtgacgcttggcgtgtcaaccaactttggtcttcacagatcaggggtagaaataaaaggatgtggacatcagatgaagatgacgagcttgtcaaagctttgtgtgagatatctgctgatcctagatataaggttgaaggaggggcctttaagaactgttactctcaaggcatagagaacattctttcacaaaagctacctggtcgtggtattaaagccagccctcatgttgattctcggctgaaagtgatgaagcggaagtattattcgatcaaggatatgatagcatcgacaggcttctcttgggatgacacaagaaagatgatccagtgtgaaaaacaacgatatgatgaatattgcagagaccatcctagagccaagggtctgtatggtgtcccatttgtatatttcgatacatttgatgcaatatatggcaaggacagctctgctggggaagggttggaagggtctgaagctgcaattgctaacatggagaatgaaaatataaatgaagttggagatgacgaagtggaagaggacaggatgtccacaggaatatctggtcgctccccggccgcaacgttaagctctaagagtcagaagaaagacaattatgacgggaaaaggaataggaccgaatcaaattgcccatctctggacaagttcaaggatgtacatgttcagtttcagaatgccattcagcatgccagcacaatggctgctgcaatggagctgttcaaggnn

SEQ ID NO: 2884 - DNA, 2558 bp, Zea Mays
cgacaccgcctcgcccgcaatctacgccgccgcggtgcccacgcccgcgacatccaccacctcgacctcacccccgcccgcggaaatctcgcccgcgagatccctctgcccacacaccgccccctctgctctccgtcgatggaagggcgccattaacacaccgcgatcctcgctaccgcccccacgaggccataccatgccctcgccccctcccagatcttcgaagaggccgccaccccgcccctgttcttggcccctcgtcggcgtcggcctcatcgcggcacgggctgcactccttcgccccgctcacggccgcggtgcttggccacctctgggcctccggggtggcggtgctcccgggcctgacagagctagagttggtgcgcaccaaggctgagatgtggtttgcgttcccgcccgacctccgtgccgtcctcgccgcgggcctgccgtcggggcccgggttcccggactggcagtcgcgcgtggggctgcggtccgcattcgacctgcccatcgcggcggcgtcgctacagatcgcgcggggcgagctgtggccgcgctgctagggcgtgcgccccgccgaccccaaccacgcgctatggtctgcttcatctatggcgtggttcctgttttgcctgcctcttgctcctatttgaccaccatgcgcgccgcgaggaccaccactaggtggagcgtgtctccgtggtcttcttcaccgaccacgaggctgctgagaccctaggggggctcgacctggacatcatcgcagtgctccccaccgtcaggtgccatcgtcggtcgaggttacagaatgtctctcgagtgtgctagagatgctttgctgcaaaagaccatggacaacaaagaaaatacaagtgaattattttcccgatctcgtgataagctcagagttgatctcatgaatatttctatgactactcttagttgaaaaatactttcccaagacaaggagtactttactaaacttgtgattgatgttgtcttgaggcttaaggtgtacaaatggtttaatgaaagttggttatcatttacattgaactatgatatcttcatctataaaattttactcttcaaaaaggtagcacccacttggaatctattgaaattctgaagatacatggagaatctcttaaggactgggatgtgccaactgccgagacttgcacacgtcacaaattaaagctgtttgcattgccggctaaccaagctccagggtataaacttcataattagacattctagatcttagttggccgacttgatcataagccactacccaaagcaaaaaaaagtatattattgaagatgcaactctcccctatatttgagagaagatgaaggatatatcagtgtgtttggtaccctgtagctcctcgtcgacctggtgcaacagcttaagctcaggaagaatgctttacaaatccgaatataagttcagtacgatagtgcaaatagagagcatcaggtactccttaggttcctattgacgtttaattgtcctaatgaggttgatccatgttctattacgaattgtatgtgtgctattttcccacaattttctaatcaaaatattcagcacaaaaggatgacctcgtatatgggatattcaattaattgtccatgaaatttgacaaaattagaaaaatgaaaaatatagcaggcctgtagatctgagcaaatgatatgaagtaaatgttgttactttctcaaaacgtagatgagctttttttgcaaggactttagttgaaaattggaaaatctaacatgcctgtagatctgagaagacgatatgaagtacatgttgttactttcacaaaatgtagatgagcttttttgcaaggacttcagttgttatgttgctcctcattaacactaaaacttaacctgcccgggttacaattatacatctcaatccagatcagccttttcattgttctggttctgctcatttatcctttctagtcacataaattcttgccatttgacaccagcactaaagaagatagggagagttcaatgcatgatgtttgttttgttgacactggaagaggcgactaattgaggcggttgtcattgccaccggtgtgcacacattctttgtcaaggccgcatatcttgtcgattcaacaaaccaagttggtcattttcagaagctgttcatgctatcggtttggaaagaacatgtggaaagccaatctcggatcttgcttccttcagggattgtctccatcctcttgatagcgatctatattggttatttccgaagaagaatcaagaagcaattcaacattcatgcaagtgtggtaccagattgagatatgtctgttagtttgtaacaatataaacttgttagttatgtgtcagagaaaacatagtaacaatgatttgtgctctatttctacccgtcattgtgtcctatctcaatggtgacttctttgtacacaactgtgtggtctctctatgtcctaataaatacatgcatcatcaatgaacttaatggatattgtcaatacagtgttctacaattgtcgctg

SEQ ID NO: 2885 - DNA, 3040 bp, Zea Mays
cctcgacctcacccccgcccgcggaaatctcgcccgcgagatccctctgcccacacaccgccccctctgctctccgtcgatggaagggcgccattaacacaccgcgatcctcgctaccgcccccacgaggccataccatgccctcgccccctcccagatcttcgaagaggccgccaccccgcccctgttcttggcccctcgtcggcgtcggcctcatcgcggcacgggctgcactccttcgccccgctcacggccgcggtgcttggccacctctgggcctccggggtggcggtgctcccgggcctgacagagctagagttggtgcgcaccaaggctgagatgtggtttgcgttcccgcccgacctccgtgccgtcctcgccgcgggcctgccgtcggggcccgggttcccggactggcagtcgcgcgtggggctgcggtccgcattcgacctgcccatcgcggcggcgtcgctacagatcgcgcggggcgagctgtggccgcgctgctagggcgtgcgccccgccgaccccaaccacgcgctatggtctgcttcatctatggcgtggttcctgttttgcctgcctcttgctcctatttgaccaccatgcgcgccgcgaggaccaccactaggtggagcgtgtctccgtggtcttcttcaccgaccacgaggctgctgagaccctaggggggctcgacctggacatcatcgcagtgctccccaccgtcaggtgccatcgtcggtcgaggtccgtgactaagtgtgacgtgtacctgggcgagttcgcgcacagggagcggctcaagcagttgtctctcttccagatcccctacctcctctttgttccctcggcttagccaccaccttggccggtgctccttgcacgtcgggataggaggatgccgaccaagttctagatgaagagcaactgatttgcttcccttggatggattccactgttgagccattcaaaatttgagatgcggattaatttttacaattcatgttttcagatttaccttccaattttcttagtaataataataatgtataggtagtgcaccatgttttgattctaatctatcttgggtcacctgttttataccgaggtaacacctgttttataccgagataattagtatgtattctgagcttcaatcattgttctttatggtgagattcaatgtctccagttaattcattttgtaaattttaggttacagaatgtctctcgagtgtgctagagatgctttgctgcaaaagaccatggacaacaaagaaaatacaagtgaattattttcccgatctcgtgataagctcagagttgatctcatgaatatttctatgactactcttagttgaaaaatactttcccaagacaaggagtactttactaaacttgtgattgatgttgtcttgaggcttaagggtagcacccacttggaatctattgaaattctgaagatacatggagaatctcttaaggactgggatgtgccaactgccgagacttgcacacgtcacaaattaaagctgtttgcattgccggctaaccaagctccagggtataaacttcataattagacattctagatcttagttggccgacttgatcataagccactacccaaagcaaaaaaaagtatattattgaagatgcaactctcccctatatttgagagaagatgaaggatatatcagtgtgtttggtaccctgtagctcctcgtcgacctggtgcaacagcttaagctcaggaagaatgctttacaaatccgaatataagttcagtacgatagtgcaaatagagagcatcaggtactccttaggttcctattgacgtttaattgtcctaatgaggttgatccatgttctattacgaattgtatgtgtgctattttcccacaattttctaatcaaaatattcagcacaaaaggatgacctcgtatatgggatattcaattaattgtccatgaaatttgacaaaattagaaaaatgaaaaatatagcaggcctgtagatctgagcaaatgatatgaagtaaatgttgttactttctcaaaacgtagatgagctttttttgcaaggactttagttgaaaattggaaaatctaacatgcctgtagatctgagaagacgatatgaagtacatgttgttactttcacaaaatgtagatgagcttttttgcaaggacttcagttgttatgttgctcctcattaacactaaaacttaacctgcccgggttacaattatacatctcaatccagatcagccttttcattgttctggttctgctcatttatcctttctagtcacataaattcttgccatttgacaccagcactaaagaagatagggagagttcaatgcatgatgtttgttttgttgacactggaagaggcgactaattgaggcggttgtcattgccaccggtgtgcacacattctttgtcaaggccgcatatcttgtcgattcaacaaaccaagttggtcattttcagaaggcaagctaagtgtgatgccgccacataagaccatgcccactgtatttatattttatactaatttttaacgtccaaaggacaccagatgtttcaatgttaatggtgctattgttatacactgatgttttgttcctgtttgcttgcaactttttgcagctgttcatgctatcggtttggaaagaacatgtggaaagccaatctcggatcttgcttccttcagggattgtctccatcctcttgatagcgatctatattggttatttccgaagaagaatcaagaagcaattcaacattcatgcaagtgtggtaccagattgagatatgtctgttagtttgtaacaatataaacttgttagttatgtgtcagagaaaacatagtaacaatgatttgtgctctatttctacccgtcattgtgtcctatctcaatggtgacttctttgtacacaactgtgtggtctctctatgtcctaataaatacatgcatcatcaatgaacttaatggatattgtcaatacagtgttctacaattgtcgctg

SEQ ID NO: 2886 - DNA, 2333 bp, Zea Mays
ccccgcgcaagtaggtgaggaaagccgaggctccagctgcccgtcgggtttggagcggtccgctcgaccaaccaacgacccctgacggcaatttatgggtgggttagttccggtccggtccggcttcagtcgactccacgcagcagcagccactctgctaggggcagccgtcggtcagtggagtgttgtgggtattgattgccgtccgtcgacggcttcaatcgctgcccgttccggtgcgactgcccgactgctatatagcagcagcagcagcagcctactactactactactgcttttaccggccggtggatcggatcaccaaaccggaacgacagcgatggaggccgggacgtgggcggcggcggccgtggcggccgtggcgctgtacgtggcctggttctggcggatgtcgcgcgggctcagcgggccgcgggtgtggccgctgctcggcagcctgccggggctcgtgcagcacgccgaggacatgcacgagtggatcgccgccaacctgcgccgcgcggggggcacgtaccagacctgcatcttcgccgtgcccggggtggcgcgccgtggcggcctggtcaccgtcacgtgcgacccccggaacctggagcacgtcctcaaggcgcgcttcgacaactaccccaagggccccttctggcacgccgtcttcagggacctgctcggggacggcatcttcaactccgacggcgacacctgggtggcgcagcgcaagacggccgcgctcgagttcaccacgcgcacgctccgcaccgccatgtcgcgctgggtctcccgctccatccacgcccgcctgctgcccatcctcgccgacgcgcacgtcgtcgacctgcaggacctcctgctccgcctcaccttcgacaacatctgcggcctcgccttcgggaaggaccccgagacgctcgcccggggcctccccgacaacgccttcgcctccgcgttcgaccgcgccacggaggccaccctcaaccgcttcatcttccccgagtgcgtctggcgctgcaagaagtggctgggcctcggcatggagaccacgctggcgcgcagcgtccgccacgtcgaccgctacctctcggccgtcatcaaggcgcgcaagctcgagctctccgccgccacgaggaaggacctcctctcggccacgccgcacgacgacctcctctcgcgcttcatgcgcaaggggacctactccgacgagtcgctgcagcacgtggcgctcaacttcatcctcgccggccgcgacacctcctcggtggcgctctcctggttcttctggctggtctccacgcaccccgccgtggagcgcaacatcgtgcgcgagctgtgcgccgtcctggccgggtcccgcggcgtcgaggacccggcactgtggctcgccgcgcccttggacttcgaggagctcgaccgcctcgtctacctcaaggcggcgctctccgagacgctccgcctgtacccctccgtgcctgaggactccaagcacgtcgtcgccgacgacgtcctcccggacggcacgttcgtgccagcgggctcctcggtcacctactccatctactcggcggggcgcatgaagacggtgtggggggaggactgcctccagttccgccccgaacgctggctgtcggacgacggcaccaggttccagccccacgactcgtacaggttcgtggcgttcaacgccggcccgcggatatgcctgggcaaggacctcgcctacctgcagatgaagaacatcgccgggagcgtgctcctccgccaccgcctaaccgtcgcgccgggccaccgcgtcgagcagaagatgtcgctcacgctcttcatgaagcacgggctccgcatggaggtgcgcccgcgcgacctcagcgtcgtcatcgacgagctccgcggcgccggggagtacgacgcggcggcaagagccaccgcggcctccgcatagaggttcgtgcagtgcaggtcgggaaggaaaccaacggacagattggaaacgtcaaatgaaaagttatgtagatattgacagtaagtaattaaagagtttggtgaggtatattactcaattgggaacaaaaatgcatgtgtaaaaagtccatatcattttgatttgcatttgaatgggaggacgaagaaaagcgggccggagagcaataataactctctcatgtaacctgacggggaggcgccaaattggtttcggcagcttgtgttaatgggccgccaaaactgttgttgtttgtaaaaacaaaactcaagcgatcattcattcgatcacttttagcctttatttggatccactagtttttttaaaaaaaatttgatttata

SEQ ID NO: 2887 - DNA, 1455 bp, Zea Mays
tcctggtatccagttcctttctttgcccctcctccgctttcttcggttcttcctctcccccactccccacgctgcctgagaggctgagactaggaaggggaaggaaaataatagtttggcgcgcaaatatccgcctccattcgtacgccgctattctcgtctgcgatccgcagcgcgatgatgatcccgtggggcggcgtggggtgctgtctcagcgccgctgcgctgtatctcctcgggaggagcagcggaagtgatgcggaggtgctgaggtcggtggcgagggcgggcagcatgaaggatttagctgctatcttggacactgcaagtaaggtcctaccacttgtagttgccatctctgggagagttggttcagacacaccacttatatgccaacaaagcggcatgagaggtgtaattgttgaagaaacggcagagcaacacttcctgaagcacaatgatgccggatcctggattcaagattcggcagtgatgctttctgttagcaaagaggttccatggtatctgtttacaactgggatgcttctctaacctttaaacaatcactaggatgatggaactggacgtgtttatgtggtcggtgctcgttctgcagctggtttaattttaactgttgccagtgaggtttttgaggaatcagggaggacacttgtacgtggaactctagattatttacaagggttgaagatgctgggagtaaagcgaactgaaagggttcttccaactggaacctcattgacagttgttggtgagcgaccgcacaaaggacccttttatgcatcatcaaagagcattgatcaacttattgtgaatcttgggaaatgggccaagtaggaaaatttgttagaacatatttttggttgttacttcttagttagggcatcttatgctagtatcatgtttgtggcaggttataccgaattgcttccatgggttttgcaacatttggtgtcttccttcttgcaaagcgtgcactacagcattttctagaaagaagacggcggcatgaactgcaaaaaagggttcttaatgcagcagcacaaaggcaagctagagaagctgaagggagcaaaggtacatcagacgcagagcctaacagtaaaaaagatcaattagtgttggacatatgtgtcatatgccttgagcaagagtacaatgctgtttttgtgccgtaagtattgtatcttttccagaacttgaatgctctttgttgagaatgaagcaacttgattttctctatttttctatttcctttttcccataattccaaatatactaggcaacattatggttttcatatttcctgttcactagtagtttcttgatttttctcttaatggcttgcctcataacttgatagaacttgaatactgctaaggccttctttggatgttcagtactaaggaactataattctagaacccattgatctgc

SEQ ID NO: 2888 - DNA, 1386 bp, Zea Mays
gtgaacaattgcggtgaaacctgaaaggatactactgatgctgcactgcacacagcacagctgcacccgaaacgcacgcacgcacgcgacaggcgacagcgccagtagaggcccgggcttacataaagggcagccactccggccccgaccgcttcttcgcaaacctcccctctcccatcgacttactccgtcgtccgtcgcactgccacggatcaccctcttccttcgtcttcctccacaaaacctatagtgctggtgcgccgaggagctagctagctagcccggccggccggcgccatgcctcccgtgaaggccgaggacctggttgtgcacgccgtcaaggagcagttcgccggcctcgactactgcatcaccagcccccccccgccatggatcacgacggtgctcgttggcttccagcactacctggtcatgctcggcaccaccgtcctcatcgccaccatcatcgtcccgctcatgggcggcggcatgtccacttcggcacgcggctccccgccgtgatgagcggctcctacacctacatctacccggtcgtggccatcatcctgagccaacgatacgcgctcctcatcgaccctctcgagagattcgtgttcacgatgaggtcgctccagggcgtgctcatcatcgtcggcgtcttccaggccgtcgtcggcttcttcggcatatggagagtcttcattaggttcctgagccccctcacggcggtccccttcgtcacgctcacaggcctgggactcttcttctccgcgttccccggggtcaccaagtgcatcgaagtgggtctccccgcccttgtcctcctggtgatcttcgcagagtacgcctcccacgtgttcgctaaggggagcttcgtgttcagccggtgccccgtgctggtgaccgtcgtgatcatctggatctacgccgagatcctgacggcggccggcgcctacaaccagctgggaattacctgaccaattacagatgactgcataagttgatggtcgccgctcttgccaaaacagggagggaagcccctcatggctggctcggactgggtccttcgtcgaacacctgtcgtgcagccccccgccccctcgtttggatcacaacgcagagcaacgctcctcaccgcaccagtccgcaccgcccgacgagcaacaccacggaagacatgaccacccgcgcgcagattggccacagaaatgcgcaggccgccgccagagattgctagatccggcaatgccaccgccagcagacgccggggccaggggtcgcgcccgccgccgctgtggccagggggcgtgtgcctcgccctcgccgcgacggggaggagagcgcacccgccgctctcaccgcgacagagaggagagcgcgcccgcc

SEQ ID NO: 2889 - DNA, 935 bp, Zea Mays
ctggacaactatgtgaaatacaatatatgatgtcacacttgccgaacattctgctagcatcaatactccacctggctgcatgggctgggcatgttgatgttgtgagatgcctttgcaagcacaaagctgatgtgggagctgcagcaatggacgacactgcagcacttcattttgcttcccagaaaggccatgtagaagtggctcgtgagctgctggcatctggggcctctgtgaaagccaagaaccggaaaggcttcacggcgctgcactttgctgctcagaattctcacctggatcttgtgaagtaccttgtgaagaaaggtgttgacgtcacagcaaagaccaaaggtggccagacagctctacatgtcgctgaggatgatgaagtgcgtgcgttcctgaaggagtgcgagcaatccttgaagaagggtgccgagctaccatcggagaaggatgattctgccgagaaagagggcgatagcaagtcttcaggtgaggttatgaaagatgaggaggatgcagagcagggcgagaagaggaaaagcgaattggttggtgcgtcgagtttgtcaggagcaaaaaaagccaaagtttctcttggtcatctagtttgtgaaaatgacatggacgaggaagaggagtgatttcgagcagccttgaccttgaggatgcaatagaagtgcacttcgatgttttgttatgctagtcttagtctgtacggcgatcttgaatgtaaagacaagtgcaaagttgaatctcagttctcatgtattgcatggatgaaaattctaagggcttgtttggtaggactctggctcctttgaaaacggatgtagctctggctcatttatttgtaggagcagctcctccacatgagtcactgtacctcaatttctgtaaaccagtttcttaaaaaaaaatgggtgcttttaaac

SEQ ID NO: 2890 - DNA, 1105 bp, Zea Mays
ctgcgagtctgggacgggtcacgggtgaggtctattccttcctgctacagtccaaagtcatggatccaattacctgaccgattcgcgagactgatgggacggcgtcacagcggcggcggcggccgcggcggcggaagaggaagagggcgagggcgagggcgtgggcgagatgaggaagaagatcttcctctgcacaaggctgcaaggtctggtgatgcggcagcagtggagtcgactccacctggctgcatgggctgggcatgttgatgttgtgagatgcctttgcaagcacaaagctgatgtgggagctgcagcaatggacgacactgcagcacttcattttgcttcccagaaaggccatgtagaagtggctcgtgagctgctggcatctggggcctctgtgaaagccaagaaccggaaaggcttcacggcgctgcactttgctgctcagaattctcacctggatcttgtgaagtaccttgtgaagaaaggtgttgacgtcacagcaaagaccaaaggtggccagacagctctacatgtcgctgaggatgatgaagtgcgtgcgttcctgaaggagtgcgagcaatccttgaagaagggtgccgagctaccatcggagaaggatgattctgccgagaaagagggcgatagcaagtcttcaggtgaggttatgaaagatgaggaggatgcagagcagggcgagaagaggaaaagcgaattggttggtgcgtcgagtttgtcaggagcaaaaaaagccaaagtttctcttggtcatctagtttgtgaaaatgacatggacgaggaagaggagtgatttcgagcagccttgaccttgaggatgcaatagaagtgcacttcgatgttttgttatgctagtcttagtctgtacggcgatcttgaatgtaaagacaagtgcaaagttgaatctcagttctcatgtattgcatggatgaaaattctaagggcttgtttggtaggactctggctcctttgaaaacggatgtagctctggctcatttatttgtaggagcagctcctccacatgagtcactgtacctcaatttctgtaaaccagtttcttaaaaaaaaatgggtgcttttaaac

SEQ ID NO: 2891 - DNA, 1018 bp, Zea Mays
ggccgttttttttatgttgggcttccggtcgcattcggcccattcgctcgaaccgggggagcctgttgacttctacggtctatctcgaagtcacagacgccgcgtcgccgcgaagcgcatccattcgtcgccgcagcacgccggcggccggcgggcaggttgcttcgatgggctctcctacgcgggttcggaggacgaccggtttcactctcctcctggtgcttctgttcctctcgccgcccgtgtcagctggacaaccaaaaggtgtgtgtgtttcaccaggtggacggttccctgccttttcatctgaaggcaagcctcctggaagagcacccaaggggcgcagagatctagcactgtgtaggatattccgtcagaaaacatgttgcgatgtgatgcagacatttcctgctctggtctcagtaagaaaccttgcattggctggtgaaggcagtcaagaatgtattcatttgtgggaattgcttgagtgctcaatatgcgatccacgagtgggtatcaggcctggacctcctgttgtatgtgcatcattctgtgatatggtcttcaaagcttgttcagagtcgtacttctctatagatacgaaaacacaggccttgtctccttgtggtttagatgacatcctttgtggcaaaacacataaatgggtctctaacggcacagagttgtgccgtcttgctggtttctctgttcaaatttctgagaccagctctggtggagttggtcacactttctgctatggtgggaaagcaagtttggattccatctctgattcatggacttcttcaaaagaccgtccaacattaagtggtgtggcttcatgggacgttcaagattttcagagatgggcacgagaaatgcctatcggtgaaagagtttcgtgggcgattggaggaatggttctcacagctggccttatttttatcagtgtaatcttgcaactatctggcatgatgtcttaaattcttgctgagatggcacattggaagcttgcacttca

SEQ ID NO: 2892 - DNA, 948 bp, Zea Mays
atgcccgcctccgcgattcgcgtccttgccgctgctctccgtccagggatgcctccgcggtcgccccgccatcttcgccctcgccccgctctccatggaaggaagggcgtcattccagggattacctctgcgacagcccccaccattctcgccctcaccccgctctccatcgaaggaagggtgccattccagggattacctctgcggcagcccccaccattctcgccctcatccgctctccgccatcctcacccccacccgcccccgccatcctcctcctacgcgcaagtcttcggtgcccttctcctgcccctgccatccccgcatatttggatccggggttcgctcaggttgcctcgcaagggccccaccacgcgcgcgccgagctccatccgcaacaaactcaagcggccccgcctcatgtcctggtcagcggtgcagatcgtcgggaacttcgcccccgtcggtgagcagtcaccgacttcgtcttcaacgactttggcgaaggcaggcggctccaaagcgcgcgtcacagagatcttcgtcgtcactgtgtccggcagcaaggtcccatgcctcgcgtttgggaccaggaaggcgtcgttcctcttggaggtgccgctcagcgttgttgcctcgctctttgacgagggccatagtgggggtcacgccgttgatatcggcatcgtgatcgaggagcacctgaatcctgtcgtacatgcctgcaaggatgcaaggatgtcgtttagacttatcactttgttgattaaatcagagctccaaacatcgcaatcaagattggttggtcgaatcgacagtgtgagggtaaggttggcaatggtgaacaagggcaagggcatctcactgcctcgtcatgtagtcctccatgttgtccatccccaaaggccactactccgaaggatgcaagtgcggaaggagattggtttg

SEQ ID NO: 2893 - DNA, 2818 bp, Zea Mays
ccgttttgtagtggcttcgtctttagcttgggcctcgcttccacttcgtagctgcctacgcgctcgcgactcgcctggtcgcttccggttgaagggccgggccgcaatggacgaagaggtcggcgccgccgggcggcagcaggttcagtggaaaagttactgcagtactctctccctcctagcgttccagagcttcggcgtggtgtatggagacttgagcacatcgcctttgtatgtctacagaaactcactgtctgggagactgaacggttaccttgatgagacaaccatctttgggttgttttctctggtgttttggaccttcacacttgttccgttgctgaagtatgtcataattgtcttgagcgcggatgataatggggaaggtggagcttttgctttgtactcacttctttgcaggcatgcaaaattcagtctgctgccaaaccagcaagcagcagatgaagagctgtcaacttattaccatccaggcactgatcgagctgtggtttcctctccattcaaaaggtttctggagaagcacaggaagctgcggacctgtttacttctttttgtactgtttggtgcgtgcatggtgataggtgatggtgtctttacaccaactatatctgttctgtcagccatctctggattacaagatcctgccacaagtggactaggagatggatggatcgtattcatcgcatgtgttatgcttgttggtctctttgctctgcagcaccgaggtactcataaggtggcattcttgttcgctccgattattgtgctctggctcttgagcattggtatcattggactatataacatcatccgttggaatcctagaatatttgttgctctttctccacactatattgtaaagtttttcaagaaaactggaaaagatggttggatatctcttggtggggtacttcttgctatcacaggtaccgaagctatgtttgccgatcttggccacttctctgctgcatctatcaggttggcttttgtcagtgtcatatatccctgtcttgtgctgcaatacatgggacaggctgcgtttctgtctaaaaacataccagctgtatataacagtttttatctttctattccaagtcctttattttggcctgtgttcgtcatagcaactcttgctgcaattttgggcagccaagctattatatctgcaaccttttctatcgttaagcagtgccttgccttgggatgctttccacgggtaaaggtcgtgcatacttcaaggtggatccgtggccagatttacatacctgagataaattggattctgatggtcctctgtttagctgtgacacttggcttccgtgacataacagtgataggaaatgcttatggtctcgcgtgcatcactgtgatgtttgtcaccacctgtctgatgtcattggtcatcatcttcgtgtggcaaaagaatctcctcatctccttgctattcttcgtattctttggggcactcgaaggcgcctacctgtctgcagcagtgatgaaggttccccagggaggctgggctccgatcgcgctatccgccgtgttcatgttcatcatgtacgtgtggcactacggcacgcggcggaagtacctgttcgacctccagaacaaggtgtccatgagatggatcctgaacctgggcccgagcctgggcatcgtgcgcgtgcccgggatcggcctcatctacacggagctggtgacgggcgtgccggccatcttctcccacttcgtcaccaacctgccggcgttccaccaggtgctggtcttcgtgtgcgtcaagtccgtgccggtgccgtacgtgcccatggacgagcggtacctcatcgggcggatcggccccagggagtaccgcatgtaccggtgcatcgtcagatggaggccgaggagtcggcctcgtcggggacggggaggagctacgagtcgtcgacggagggcaggatggcggtcgtgcacaccaccggcacgacggggaccgggctggtgatgatggcctccgccgaggacgcggaaggcacgtccctgtccaggagcagcaagtcggagacgctccggagcctgcagtccatctacgagcaggagtccgccggcaccgtcagccggcggcggaggagggtgcggttccagatcgacgaggaggagcggatcgagccgcaggtgagggacgagctgtccgacctcctggaggccaaggaggccggcgcggcctacatcatcggccactcgtacgtgaaggcgaggaagaactccaatttcctcaagacgttcgccatcaactacgcctactccttcctccggaagaactgcagggggccgtcggtgacgctgcacatcccccacatcagcctcatcgaggtcggcatgatctactacgtgtaagtgtaacccaggcggcctgccctcaaagtcaaagcagcacggggggattttcattttctttcgggtgatacgatatgcttgttttggacccagacttactgctggagatactctctccgtttctttttatttgtcgctggatagtgtaaaattacagtatccagcgacaaaaataaaaagaaacagatgaagtaattagttagttttgtctctgctctgcaccgtatctgtatcgtagtttcatcaaggtggtggcataagacacacagtagccgaatcggccggttgccaccgtttgttcaccagagctttcggtaaccctttgtaaatagattctgttcatcatggaaattaagcattgtagcttgtcaataggctacagctagcatacagatttgagcatccttcctttgcacttcat

SEQ ID NO: 2894 - DNA, 2142 bp, Zea Mays
ttccgccggtcgaccgatcccccccacccccaccggataccaccgcctccaccaaccgattccgttccatcccccctcccccctcgctcgagcgcgaggcttctctcccctcccctcccttctcctccccccccggcgcggattcctacagccagctccctcgccgatcgcggtcccgtcccgagggagaggtgatgataaaggatatttgctgaccaaacttgcagtagttcttctttaaggaaatagaacttggcgtcatgacacatagaaatatgctctggacacatcagtctgttaatcctgaatgggagcaaagacatgcccaagttcaaccaggaagttcctattatgcaggcactgcaagtgattcatccaacctgggtgtgcaagttgctgtgggagttccaggaaatactgctaatgttggtatatgtgatttgcggaatcatgagtgcccgcatgttcataattcatacccacatgccggtgttacatcaagatttgtcttcccaactactatgtacaaccctagcatgtcagcagcagctgtcaacatatatattcctcagactcaaagctttggactaggcagtgtgctaccaccatctttacataatcaagttcccacaggaactattgatgagagtagcagcagtgtcaattttggtgatagtgctattggattcatgaaaaggaaaaatgcagtagttgctggaagccatcattttcttcatggatttgctgggtcaagttcatctgttcatgtgcctcagaatcctgtgcatgggccatggaatccttcatctcaatcaaattgtttacccagttctgcagcttcaaacctaccagaataccacaatagtaatgggtggccatacttagaagaatcttctgcagatgcttcaaacagtttcagttctgtggctgcttgccaggagctggcacctcatggtaactatttatatccagcttgtcacataagccagtccaatacatgggttccacagcctgcaggttatggagtaccacagtggggatatagtaatgcagtggtcaatcctccaggaactgcagacatgtcaaatgggccactgcctcatttctgccagaatagtatgcaggcacctcaaatacaagtgtcccatcaacagttcatcggtaacaatgcggtgcatggtttaaatccttctgccacaggccttcctttacatccaagaatgctggctctcccattcaatgctgagcacacttttgggcatccaatgcacccacctctgataaaccaagttaacaatggggctttaagaattctgccataccagctacctcaagtaattgatgtatgtgtgcagaatgctacagtgatggaccattcaaggatttatgaagcaggacatgttatcgatgaacatagcgatatgcgtttagatgtggataacatgacttatgaggaacttgtagcattgcaagagcagataggcgatgtcaatactggtttgacagaaagctatatccaggaaaacttgaggtccagttttcatgttccaggagcagctagcatgtctgatcagttttctgagctttctttggagaatgatgcttgcataatatgccaggaggagtataaagctaaagaacttataggaacccttgaatgcggtcacaagtaccatgtgaattgcataaagcaatggttgatgatgaaaaacctgtgccccatatgcaagacgacagctttgtcatcagatagaaggaacggatgaccgtcgccaataatgttgttggttgtttaccgcgtggcaaattagcgtggattttgtatatagacatggttgcctttatttgcccgtcccctttgctgtggacataaactgagcttcgaaacactgtacagatattttgtaggatgttttagacgttaaatggcacaatggtgtgtaaagctcccatgactgccttggtagatgccctcttcctttacattgtacattgtatttatctttactcttcaaaaaaagaagcttgaaaaccgtaagttctgtacattctggaattgaaagaaccggaaattttcttcacctgtagagctttttgctagagctttatgagattcagtggtgaatcttgaagtcgtgaaat

SEQ ID NO: 2895 - DNA, 2266 bp, Zea Mays
gaatggtttggactttgaatgttgtatctgagcttaggtttggtttgaagaatttagttagagcacgttctttgtttcaattttagaatcaagtgttttcagttatttgctacttgggtatgaagtttttcagttgctagtgttgtggatcttggtagttttttgttgggcctttttagggtctgttgagggggaaagggtttttcctacctgctatattgcactggaagacaatgcattctgcaaatgagtttacaacactagccaacaagagtttgatttatgagtctcgacaacttaactttgcaatataagctccgtaacaagggcacggatgggcacagaggaacagaaacgccaaactccaagaaaggcgcagactcggtaacggacaaggagaggtgatgataaaggatatttgctgaccaaacttgcagtagttcttctttaaggaaatagaacttggcgtcatgacacatagaaatatgctctggacacatcagtctgttaatcctgaatgggagcaaagacatgcccaagttcaaccaggaagttcctattatgcaggcactgcaagtgattcatccaacctgggtgtgcaagttgctgtgggagttccaggaaatactgctaatgttggtatatgtgatttgcggaatcatgagtgcccgcatgttcataattcatacccacatgccggtgttacatcaagatttgtcttcccaactactatgtacaaccctagcatgtcagcagcagctgtcaacatatatattcctcagactcaaagctttggactaggcagtgtgctaccaccatctttacataatcaagttcccacaggaactattgatgagagtagcagcagtgtcaattttggtgatagtgctattggattcatgaaaaggaaaaatgcagtagttgctggaagccatcattttcttcatggatttgctgggtcaagttcatctgttcatgtgcctcagaatcctgtgcatgggccatggaatccttcatctcaatcaaattgtttacccagttctgcagcttcaaacctaccagaataccacaatagtaatgggtggccatacttagaagaatcttctgcagatgcttcaaacagtttcagttctgtggctgcttgccaggagctggcacctcatgcctgcaggttatggagtaccacagtggggatatagtaatgcagtggtcaatcctccaggaactgcagacatgtcaaatgggccactgcctcatttctgccagaatagtatgcaggcacctcaaatacaagtgtcccatcaacagttcatcggtaacaatgcggtgcatggtttaaatccttctgccacaggccttcctttacatccaagaatgctggctctcccattcaatgctgagcacacttttgggcatccaatgcacccacctctgataaaccaagttaacaatggggctttaagaattctgccataccagaatgctacagtgatggaccattcaaggatttatgaagcaggacatgttatcgatgaacatagcgatatgcgtttagatgtggataacatgacttatgaggaacttgtagcattgcaagagcagataggcgatgtcaatactggtttgacagaaagctatatccaggaaaacttgaggtccagttttcatgttccaggagcagctagcatgtctgatcagttttctgagctttctttggagaatgatgcttgcataatatgccaggaggagtataaagctaaagaacttataggaacccttgaatgcggtcacaagtaccatgtgaattgcataaagcaatggttgatgatgaaaaacctgtgccccatatgcaagacgacagctttgtcatcagatagaaggaacggatgaccgtcgccaataatgttgttggttgtttaccgcgtggcaaattagcgtggattttgtatatagacatggttgcctttatttgcccgtcccctttgctgtggacataaactgagcttcgaaacactgtacagatattttgtaggatgttttagacgttaaatggcacaatggtgtgtaaagctcccatgactgccttggtagatgccctcttcctttacattgtacattgtatttatctttactcttcaaaaaaagaagcttgaaaaccgtaagttctgtacattctggaattgaaagaaccggaaattttcttcacctgtagagctttttgctagagctttatgagattcagtggtgaatcttgaagtcgtgaaat

SEQ ID NO: 2896 - DNA, 1753 bp, Zea Mays
ggaattctcaccgcctccccgtgcggggtgagaggcggtgggtcgtggttgcggtcggcgcgcgaggagggtcgacggcctcgcgccattgggtacgaaaccggccgagactgtgagcggtgggcggccgctgcctggagacagctcaaggcaggttgatccaggttcgagcgcctcgggttgctggaggatttgcgggggggtgcgtgtttatgggcggctagatcggtgattcttcagctgctctcggtgtgatggcagctgactctagcatggggtttcaccaggggatcaccgcctcgctgtacaaccatcacatgctctcgttccagtccaacagcgacgtcggcatcagcggcgacgccaccggtgccatggtcatggccccggggagtgtgggtggcggcagtagcaacgccgggctgttcctctccgcaaacacaggggtcatgggcaacgcgccgggggtcgccccgtcaaggacctcgtcgggggatgcactccttggtaccgggacgcccaagtataagtacgtaactggtcctccttcggattggagtgaccgcgaggtggccatactgaaggaaggacttgtgagatatgctcgtgaaccgagtatcatgaggtacattaagatagcagctatgcttcctaacaggaccatcagggatgttgcgttgcgatgctggtggtctacacagggtaaagagagaaggaagaaacctgatggattctatacaggaaaaaaaatgagagacatgaagccaatccaggacaaaatggttgcatctgtcccaatagctaattttcacatgacacctacaaccaatgtaacccctttttcgatatcaatgcaacatccaaatcaacaaagtcaggttcccaaagaagctcctattgtcgacagtgcaacccagcgtctcctggaggaaaataatcagttgcttaaccagatttctgcaaatattaaaacattcaagacagtggagaacacagatctttttctccgcacgagtaacaacatcaaaacaattttaagcagaatgagcgaaacgcatggtatcatgggtcaaatgcctccattgcctttatccataaatgaagaccatataaattcgcttattcaactgaacagactggttgcatcatatggtacgacaagcatttctcatcatacgaagcaagagccatgaagctagtttaccatacccagggggaaaaacgagacgaccagatggccggacctcctgcaatcctgtaaacgtgctgttgaggaaggcttacatgttgttatactgaccaagcaccagggaaaaatcactgttttccagataatgtttttgcagtgatcaccagagtatcagacactttatcctggactccgcaagtgactgtaaatatcggatgactggaggcattccatgttttgttttactgatcgttcgtgaatgcatttcttcttttcttgttttttattgttatcccagacagggttgcattgctcccaatatgtaactatgtacaatagccactgccctagactgctaggcgtagaacgactccattttctgactatttggacactggaacccaaacatgttgtccaggtgttctgcattcttttttatcttcacttcagaagctttggattagcacttctgatgcagcaatggttagctgtgccccaacatggacaacaacagtttattccttttgtttcgtttcaaattgtaagccattttagcattgtctc

SEQ ID NO: 2897 - DNA, 829 bp, Zea Mays
gtccagcacgctccagcgtaccacaagccgcgcatccaagctagtcctagatatagcacactagttgctgggcagcagcaggaagtcgcagcgttgcgtgatgaagaacaacccgagcttcgagaacacgtgcagcgccgccgccggcgggtccggctctggctccttcaacgtccggaacctgtccaaggtcatcctcccgccgctcggcgggccgtccggccagagccagtcccatggcgggtcggacaagtgggtcatctcgccgctcgactccagatacaggtggtgggacacgttgatggtagtcctggtggcgtactcggcgtgggtgtacccgttcgaggtggccttcatgaacgcgtccccgaagggcgggctggaggtggcggacatggtcgtggacctcttcttcgccgtcgacatcgtgctcaccttcttcgtcgcctacatcgaccccaggacccagctgctcgtccgcgacaggaagaagataaccctcaggtgagaaattgaaggttgatacggagaaggcgctgattgtgaacgacgaaggagcggaggtcgactcgatcgacgtgatccgggacaacgacaagctgttcgtggtcaccgaagaagatctgacgcggctggcaccaatggactcggtgccttcgtcatagcatttgtagattcaggtttttccgtagcaagtcacacggtagatgtgcacccaactaacaaaatgtgtattcctcggggtctcaagatagtcaatatttcatgtttttaaatacaactttttaaattttgatcgaatatatacagaaatactaaactttatggt

SEQ ID NO: 2898 - DNA, 1593 bp, Zea Mays
ctcacttctcatgacttcactccgcactaatgttgagctcgagggtgaagcaggggagccttcttaccgtcgtttagttctccgtctggtttctcatgtcatcaggctatacagctcttcacttgttactgaaagtgaggttttccttaatatgcttgtaaaagttacccgtcaggacttaccattatggcatcagatacttgtccttgaaattttaaggggtttttgtgttgaagcctgcactctgcgcttgctgtttcagacatttgacttgaatcctgtgaataccaatgtcgtggagaacatagttagagcacttgctttggttgtagcttcaattcaggtggcttcagattcaagcgaagaaactctagccgctgttggtgggatgttcagtagtaaagctaaagggatcgagtggagtatggaccatgatgcatcaaatgctgctgttttggttgctagtgaagcacatactatcactctggcccttgaaggtctcttaggcgtagttttcactattgccactttgactgatgaagctctagatgttggtgagcttgaatcacctaaatgtgaatcaaatagtatggaatgtagtggacagttggcccttctttgtatggctttggtcaattcaacatggttaaccatccttgactctttgtcatttattttgacgaggtcacagggggaagctataatattagagatattgaaaggataccaagcattcactcaggcttgtggagttctccgtgccatagagcccttaaactctttcctagcatcactttgcaagtttacaatcaataatccaaatgaaggagagaagaaaagcatcttgcagtctcctggatcaaagaggtcagaaacttcaatggatcagcgtgatagtattattctcacactaaaaaatgttcaggcactaagaacactttttaatgttgcacatcgattacacaatgtccttggtccttcttgggttctggtattggagacactttcagcacttgatagagctattcattctccacatgcttcaactcaggaagtatcagcttctgtttcaaaactttcaagagatacatcgggacagtacagtgatttccatattctctcttctttaaattctcaggagttgaaccgatatgggatcaaattgctgctcatcatcttgagcttgcaaattgctctaacccacaattatgtaatatggcactgaactcattggatcaatcaatttgtttggtagcgggttctgaaaaatttcagggcatcagcgcagcacctcatcagtttccagaaagccatttggtcaaagaaagtgaaactgtatcatttgagtatgcagttttatctccattgatgatcctctattcctccaacaagaacgttgatgtacaaatgggtgcattaaagattcttttgcatgttcttgagagacatggagaaaagttatcatatagctggcccagcattcttcatatgttaaggatggttactgatgcatcagaaaaagacctcatctccttaggctttcagcatgatatgatttctctgtgggagttttcccctggcatagctccttag

SEQ ID NO: 2899 - DNA, 2238 bp, Zea Mays
ggctggtccccgtctcttctcagatctcacttgtcccgtgccgcgcgccctcccgcttccgatccccgcgtgagcgcaggccaaaaacctaacccctggtctcaccatcgcttcctccgcctgaggaggagcaggccggcggaggaggagatggtcttcatggcggcgctggaggccgatctgcgcgctctctccgctgaggcacgccgccgccaccccgctgtcaaagacgccgccgagcacgctatactcaagctccgatctctatctgccccaagtgaaatagctcaaaatgaagatatactgcggatgtttctgatggcatgtaatgtcaaatcagtgaagttgagtgtcataggactatcctgtttgcaaaagcttatatcacacgctgctgttgcatcatctgcgctgaaggatatactagcgactttgaaggatcacgcagagatgactgatgagattgttcaactaaagactttgcaaacgatgttgattctctttcaatcacatctacatcctgaaagtgaggagagcatgtcacaagctcttggaatatgcctttacctacttgaaagcaatcgatcttctgacagtgtccgcaatacggcagcagctacgtttagacaagcagtggcattggtcttcgataatgttattcgtgctgaatcacttccctccggtaaagcttcttcagcaagacttggttcccgtgttagcgctgttgctgataacgtcactcatagcttcagtcacacactatcgctaccaagcaactctggggatcctaccatcatgcagaatttgagtgatgttggaaagcttgggctccgtctgctcgaagacctgacagctattgctgcaggtggatctgctatgtggctccgtgtttattcactgcataggacatttgcccttgacatacttgagaatcctgtgaataccaatgtcgtggagaacatagttagagcacttgctttggttgtagcttcaattcaggcttcagattcaagcgaagaaactctagccgctgttggtgggatgttcagtagtaaagctaaagggatcgagtggagtatggaccatgatgcatcaaatgctgctgttttggttgctagtgaagcacatactatcactctggcccttgaaggtctcttaggcgtagttttcactattgccactttgactgatgaagctctagatgttggtgagcttgaatcacctaaatgtgaatcaaatagtatggaatgtagtggacagttggcccttctttgtatggctttggtcaattcaacatggttaaccatccttgactctttgtcatttattttgacgaggtcacagggggaagctataatattagagatattgaaaggataccaagcattcactcaggcactaagaacactttttaatgttgcacatcgattacacaatgtccttggtccttcttgggttctggtattggagacactttcagcacttgatagagctattcattctccacatgcttcaactcaggaagtatcagcttctgtttcaaaactttcaagagatacatcgggacagtacagtgatttccatattctctcttctttaaattctcagttgtttgaaagttcagccttgatgaacatagctgcggtgaagtcacttctgtctgcattgcaccaattgtcaagtcagcacatatctggaagctctcaattgtctgtccagcagattgggagcatttcattttcagtggagcgcatgacaacgattcttgccaataatctgcatcgagttgaaccgatatgggatcaaattgctgctcatcatcttgagcttgcaaattgctctaacccacaattatgtaatatggcactgaactcattggatcaatcaatttgtttggtagcgggttctgaaaaatttcagggcatcagcgcagcacctcatcagtttccagaaagccatttggtcaaagaaagtgaaactgtatcatttgagtatgcagttttatctccattgatgatcctctattcctccaacaagaacgttgatgtacaaatgggtgcattaaagattcttttgcatgttcttgagagacatggagaaaagttatcatatagctggcccagcattcttcatatgttaaggatggttactgatgcatcagaaaaagacctcatctccttaggctttcagcatgatatgatttctctgtgggagttttcccctggcatagctccttag

SEQ ID NO: 2900 - DNA, 3145 bp, Zea Mays
ctcacttctcatgacttcactccgcactaatgttgagctcgagggtgaagcaggggagccttcttaccgtcgtttagttctccgtctggtttctcatgtcatcaggctatacagctcttcacttgttactgaaagtgaggttttccttaatatgcttgtaaaagttacccgtcaggacttaccattatggcatcagatacttgtccttgaaattttaaggggtttttgtgttgaagcctgcactctgcgcttgctgtttcagacatttgacttgaatcctgtgaataccaatgtcgtggagaacatagttagagcacttgctttggttgtagcttcaattcaggtggcttcagattcaagcgaagaaactctagccgctgttggtgggatgttcagtagtaaagctaaagggatcgagtggagtatggaccatgatgcatcaaatgctgctgttttggttgctagtgaagcacatactatcactctggcccttgaaggtctcttaggcgtagttttcactattgccactttgactgatgaagctctagatgttggtgagcttgaatcacctaaatgtgaatcaaatagtatggaatgtagtggacagttggcccttctttgtatggctttggtcaattcaacatggttaaccatccttgactctttgtcatttattttgacgaggtcacagggggaagctataatattagagatattgaaaggataccaagcattcactcaggcttgtggagttctccgtgccatagagcccttaaactctttcctagcatcactttgcaagtttacaatcaataatccaaatgaaggagagaagaaaagcatcttgcagtctcctggatcaaagaggtcagaaacttcaatggatcagcgtgatagtattattctcacactaaaaaatgttcaggcactaagaacactttttaatgttgcacatcgattacacaatgtccttggtccttcttgggttctggtattggagacactttcagcacttgatagagctattcattctccacatgcttcaactcaggaagtatcagcttctgtttcaaaactttcaagagatacatcgggacagtacagtgatttccatattctctcttctttaaattctcagttgtttgaaagttcagccttgatgaacatagctgcggtgaagtcacttctgtctgcattgcaccaattgtcaagtcagcacatatctggaagctctcaattgtctgtccagcagattgggagcatttcattttcagtggagcgcatgacaacgattcttgccaataatctgcatcgagttgaaccgatatgggatcaaattgctgctcatcatcttgagcttgcaaattgctctaacccacaattatgtaatatggcactgaactcattggatcaatcaatttgtttggtagcgggttctgaaaaatttcagggcatcagcgcagcacctcatcagtttccagaaagccatttggtcaaagaaagtgaaactgtatcatttgagtatgcagttttatctccattgatgatcctctattcctccaacaagaacgttgatgtacaaatgggtgcattaaagattcttttgcatgttcttgagagacatggagaaaagttatcatatagctggcccagcattcttcatatgttaaggatggttactgatgcatcagaaaaagacctcatctccttaggctttcagagcattcgtgtaataatgaatgaaggactggcaacaatccctgtacaatgccttgatgaatgcattttggtaactggagcatatggtactcagaaaactgatataaacataagtttaacatcagttggacttttgtggactgctactgattttattgtgaagggattagtcagcaagcctattgagcaagctagtcacatgaatgatgatgttcaatcatgtgaaatgactgaagaggcaaacagcaagcaagttcctccaaaactagttgattatagtatacttttcttttcagttttctctgtcctccagaaattgggttcagatgatcgtcctgaggttcgaaattcagctgttaggactctcttccagactctcagcatccatggccaaaagctttctaaaagtatgtgggaggattgtctttggttatatgttttccctatgttagagcatgtttcccacttggcatctacctcatctcgagatgagtggcaagggaaggaacttggaactcgggctggcaaagctgttcatatgcttatccatcacagtcgaaatacagcacaaaagcaatgggatgaaaccattgttcttgtacttggtggtattgcacggcttttgcgttcttttttctcttacctccaacaactgagaaaattttcttctggttgggtgcttttactcagttttataaaaaatagcatcttaaacggtagcaaggaggttgctattgctgccatcaattgcttgcagacgtttgtcggcgcaaactgtccaaagggcaatttggaatcctcgtatgttaaatctgttcttgatatttatgaacttgttcttcaaacttcatctaattttaagaatgactccactgataaagtgaagcaagaggttctccgtggtcttggtgatctttatgtccaagcacaatctctgtttactggtgacatgtatctaaggcttatggcaattatgcatctgatgatcaagactaccttgaatcctactgattatgatagtgaactgggtagtattcctgctgtacaacgaggtatattggaaatcattcctatgctacgcccaacagttgtattgtctcccatgtggacacatctgcttcttgagctgctatgctatcttaatgggcacgaaggccccctccagaaaaataatgaacaaacgcccgatcataattctcaagcactggtagacggtgcaaagcatgctcttgttgaaagaagcaatctcaatggcgggggtacaaaactggatatggtgggatctggttggggcattctatttgtagaaaaacttgtaccaatcattgccaaccttttcttggaggctccaccaaatgaaaggtttagtgtctctcctgaagtcattcaaggtcttggaaggtatttgctttttatgatttatatc

SEQ ID NO: 2901 - DNA, 4397 bp, Zea Mays
gctccgtatccgtaattccgtatcattgtttctctcctgagtctcctccttatcagagaggagctggggaaagtgctccctccgcctccatccgtccgtcgtcgcccggcgaatcgatcgaagctagcaatcaaatcagaaagagcaagagaagcgcccgagtccctaggccggaaagctatggacagcgccgccaactggcggtcaacgcagggcaccgaccctgccgccggcggcgtcgatccaaacgcggctgcccccgccggaagcgactggcgcacccagcttcagccagaggcgcgccacaggatcgtgaataagataatggagactctgaagaagcacctgccagtatcagtaccagaggggctgactgagcttcacaaaattgctgtgcgttttgaagagaaaatctatactgcagccaccagccagtctgattatttgcggaagatttcgctgaaaatgctgtccatggaaagtcagacaaagacacaacagaaccctggaaatgttcaagtgattccaaatcaaaaccctcctggtccagcacctggccttcctccacaagttagtaatccagcacagtcatcagctatcccattgatttctcagcaacagacacggcaatcaaatgcctctacatctgttcaaggttctcttcctagtcttggtcagaactcgtcgagtgtcagccaggcatcgacgctgcataatatgtctgtcatgccacaaaataccatgaacaatggtttagcacaaggtactccacaagatatgtatgctgcacaaaggcaaatggctggtaggcagcagcaacaacaacaacaacaagcacataatcagttaatttatcaacaacagaaatacttgaaccagaaattgcagcagaattcacttatgccatcgcacattcagcagcagcaacctttattgcagtcaacacagatgcaatcttcacagcagcccatgatgcaaatgtcatctggtcttcagcctgggcagactgccattccacaaactcagtccatgacgatgcattcagctacacaaagtggtattcaacaaaacccattgaattcagtacaacaatctgtgcaaccattactccatcagcctacacaatctgtagtgaggcagcagcaacatccacagtccatgcaccagcagtcttctctgcagcaaactcagccaactcaacagcccaacattcctttgcaacaacaacaaccacaattaatgaaccagcagtcaaatttacagcaaaatcagttaatgaatcaacagagtggtgttgtggagacgcaacagcaacaaaggctgccagttcagtcaaataatcttttgaatatgcagcaaacacagcagatgatgaaccagcaatctatgtccttgcaccagccacaacaattggcaaaccaaggaaatatgtcaagtctacatcagcagcagcatcagcaaaatcagcagcagcagcagcttctcggaactgggccaaatgcccgtatgcatatgttacagcagcaaaaggtaattcagcaaccacagcagcaacagcatgctcagcagacatcaatgggtttgatacaacctcagtctcagcagaaccaacttcagcaacctcagcaacatatgatgtcgcagttccagtctcagcctaatcaaatgcagcaacaattgggaatgcaacaaaggctccaaacttcagctggcatgctcttacaacaaaataacattgatcaaaagcaatatgttcaggcacagaggggccttcaagaagcacccagtacatctgtggattccactgctcaaactggtcatccaggcataggtgatttgcaagaggagttatatcaaatgattaagagtttaaaggaccaatactttgtggaattgaatgaattgtacaataaggtatctatcaagatacaacagattgacaaccaaatgcctgctcaaaagtcagcagagcagtatgaaaagatgaagggctttaaaggaatgctggagcgcactttgcatttcctgcaagttaacaagagcaacattcatccaggtttgagggaaaaaatccccatttacgagaggcaaattctcagtatcctaagttcacaaagaaggaaacctgtgcaggcacctgggcagcaaacgtttcagcaatctagtgggcaagctcctagctctaacatttcacagcaacttcagacttcccaaggtttgcagcagcatgatagtcatactagtcagatgcctcaagcaagtttaccaagtatgaacacaggagtacaaacctctggagcacctgcgcctcaaggaacaaactttggtgttccaacaacacagcaaaatgtcacaaatgcaccacaggctggctctaatttggagaatgctcagggaaataattttaatcatgtgcagcatggttcaatgggtgctgctttgcaacaggaaaggactggtcccatgcagggtgcattgaatgcacagcagcagtccagtagcaacatgatatccaacaatgcaatgagtacaatgcagactaataacaatgcaaatgcgaattcattgcagcagttaaagcagcaacgtcaggagcatcaaatgatgcaaagtcagcaaatgaagcagcgccagcagatgatgcaacagatacaacaaaagcaaacgcttcaaccgcagctcccaatacagcaactaaagaaacaacagcagcaagggcagatgcagtttccacagcttcattctggaaatgatgtgaatgagctaaaggttaggcaaggagctgcaatcaaatctggaatgtatcaacagctgagccagcgtaactattatcagcagataaaacagggtggtgtctttccaatttcttctccgcaaaccctccaaacatcgtccccacaaatttcacaccattctcctcaggttgatcagcacagtctgttgcaatctcaagtcaaaaccgggacaccattgcattcagctaactcaccatttgtcccatctccatcccctcctgtggccccatcaccgatgccaatggattcggataaaccactatccaacttatcttcagttactagtgctgggcaggctggacatcagcaaacatctcttgcacctcaaacacaatctatagccgttaacacaccaggtatatcagcgtcacccttgcttgcagaattcacaagtgctgatggaagtccggccaatgtaccaactcaagttccagccaaatcaagcgcagcagaaaggcctctggaccgtttgcttaaagcattgcgaacaacacagcgtgagtccctaagtgctgcagtcagcgatattggatctgtcgtgagtatgattgacaggattgctggatcagcgcctggtaatggttctagagctgctgtaggagaagatcttgtcgctatgacaaagtgccgcttgcaagccaggaacttcataactcatgacgggagtggtgcatcaaagaaaatgaagcgggacacgagtgctatgcctcttaatgtgtcatcagctggaagcgtgaatgatagcttgaagcaatcatatggtgttggtactccagagctacaatcaactgcaacctcacgtgtcaagtggcaaagggctgaggtaaaccatgctctgatggaggagattcaggagataaaccaacagcttatagatacagagctccatgtctctgaggatgatgctgagtccttcactacatctgaggggggcaaagggacggtcattagatgcacattcactgctgttgctgtttgccccagcttgaaatccgtgtttgcgtcagcgcagatgagtccaattttgccgttgaggttgcttgttcctgctagctacccgaaatgctccccggtgcttctagacaagtttcctgatgaacaatggaactcagacgacctgtctaccaaggccaagacaaagttcagcgtattgctccggggtctagctgagcccatgtcactgcgagaaatcgcaaggacatgggatgcttgcgctcgcaaagtgatcacagagtatgcccagcaaaccggaggaggcagtttcagctcgagctatggttgctgggaaagctgcgtaggcgcttgttaattgcttatattgtatctattattattattataagtatttatgtgtcgagtaaaatagaaaaaaaaacagtgtgtctgctgtatactccatccttttgctattgggtcaatgttggcttgataaatatggtcgtgtacagtacagtgtatgcgtcagtccggttagtatcatgtatgctttgcctctatttacagaacttggttttataactttttttcgtcaccttttatatctaaatattttttaatagtctttttttttccattgattataatgtatgccgttccttccca

SEQ ID NO: 2902 - DNA, 5326 bp, Zea Mays
cctggtcgcacaacatgggtgcaaaaaaaaagggagggggcgtatgggcctggacggcggcctcattaggagcggcagttagggttaggaaaccctaaccggccactaccttcccaaacggcggcggtcagcacctggcggcggtgggcgcgaccccggtccccggcctcccctggcggtcgtacgggcagcaccgacgcgaggccactcggtccctcggcgtaggccggcgcacgcccgcggcggcatggcgtcccggtgacgctggcggccagggcgtagctctctggcggcgcgggcgcggctgtgggtgtagccccggcgtcccacggcgtggacacgaggcgtggccggtggagccccggtgcagcgcggtcgcgcacccggctcaggccatcccggcccaaatggcgcggcggcgccccctggtggccggatccgcccggcatggccaccccacaaggggcgggcgcagctcggcggtccccctgcgcaggctcgcgcgaaccggcgcggcttcctggagggcgcgcggctccctggtgcgatgaggggcggcggctggggggcttgggctccctggtggcgcgcaggcgcgggatcagcccgactcgggcggatcggctactgccacggcgcggagggtccggcctcggcggctcggcggcccccagccccggctacctggcgcggacggtccggccacggtggcacagggcgcggagggtccggcctcggcggctcggcggcccccagccccggctacctggcgcggacggtccggccacggtggcacagggcgcggcccctgttgacgcgctagcgcggtcccctgacggcggcgcgcgggctcgcggccctcctgcgcgcgcgagcacggccccccggcggtggtccggttgccaggcgcggcgagcccgctgtgtcctcccggcatcagcgcgggcgtatggcccctcggcatggcggccccctcgacgtgcaggcgcagtggccctgtcaatgcgctgccccgacgaccggtccggcgcgggctaggccagcgcgtgtgcgcagccccgacggggcgcagtaccatgggcaggacgcgtgcgaagcccccgcagaacccctggtggcccgtggccctgatccggcttggaacatggccggtggccccgatgagccatggccgtgaatggcgaagcaaccatcagaaacaagaaagattaaacaaaatagtgataatgcgtaccacataatccttctgcacatttctgtttcttaacttctgtgagcgattccttctctcagcaacttcaacttctctctgtttctcacgagcagtgctgataacgtgttaaactctatcacaacgctcagtggcaaatgaagattaacagagacaaagacaaatcgctgggacaatcctttattgcagagtagtgaagtatatatacaagagttcccaaggggtgtgtcccttgggaaataactgtcactacgacatatggatggattagatcacatgtataaaatgttttataacaatgtgaaaccacatctgtggaactttcagtgtgtgatgactgggtcactggtggaataccgtgttttctgagctggtcgctttcagttcgcggccaaagtcgatagctcaactatcttttgagtttagctcccaggttctttggcttcatttcaacaagcccgatcttcttctgacctctaaggtaaacctgcgaggaaaccattcccaaagagcatggcactctggaacggcataggtcaggtggcaagcatcgcacagttagccggggtcgatgcctatgggctcatctccatgatcgtggaggctgcaaagacggtgaagaggaaccgggagacctgccagctactggcacgccgtgcaaggatgattggggaccttctacatcagcttgaaaggacacagctgatgcagcacatggagacgaggaacccagtggagcatctggaggagacgcttcggcatgcgtatgtcctcatcacatcctgtcgcaacagcagctacctatacaactgctgtatgggagggaagcaggctgatcggcttcgagaggtgcagaatgagattaccttctacctccaacttttcccccttgtcagctttgtcgacaacacccgtacttgggagcggcttctgagtagagcttgtcctctgtgcacaacagaaaacatggatgagttacatgcagcagcacatcatgtggaacatgaagatggatcagaggccatcaaggcaactaaattcgaaaatctcggaagtcatcctaccctaaaacctgacatagatcaaatggaaggccaagtcatgaggatgggaggattagtaaatctcattggtggtacaaaaggagcagagttatcatgttttaccttttctcatattttggcggcgacagacaacttttcagagaaaaatttggttggtaagggtggatttggttatgtctacaagggcaatcttattaatggtcttaacgttgccattaaaagatttgatgcatgttcatcatatcaaggtccacatgagttcagaactgagattgatgccattccaaatcttcgacacaagaacataattggtctacttgggtactgtgttcaaggagaagaaagcatacttgtctatgaatatatgtcaaataaatgcttggcatctgtcattgctggcaagtttttggggttgctaaattggtccaagcgtcttcaaataatcaaaggcatagcagatggtcttgcttttctgcatgggcattctcagatgtgcattgtccacagggacataaaaccaagcaacatcctgctggaccatgaaatgaatgccaagattactgattttggtctggcattaatgttggctccaaaatcgactgcagaggttcctgttttgggcacatatggctatgcagatcctgaatatattgttactggaaaaatctcggagaaggcagacatatatggatttggcatagtactttttgagataataagtggaaggtcgatccattcttatatgaaggcagagggcactcgagagctaccataccctgcttatgcacacaaatacaacccaaagacgctgcacaagcttgttgatccattgttgcgcgtggacgagcatgaacgggctcagattatggaatgcgtgagggtggcgcagttatgcgttgaccatcgtgccaagcatcggcctgtgatgtcagaagttgtcaccatgcttggcatggcagcatcaaagggatagttgtagctttgcaagacccacaaagggatagctgtgaatgatgcaagtgtgaactaattaatgagctctactcaactattttcccccttctcatgcatgattgtgtaaacatcagggagattagtcagtgaaatatttggcatgcaccttacttgagcgctgtggctaataaattgtggttggctggaatgcaaattgctccatggtgttgttaatttggtctaagctggagatgaagtgactgactccatgggcatgtggttcacctccctgctggtggtggacgacaaatatcaggctggcattcacgtagaatgtgcggcaaagactgatgactgatgagtgatgactggtgaggaaccagacaaatgatgagttgaatctttcaaagtttgacagttcagtctccaatttttttttctcaaatcattggtactgtgtacaagcttgaagcttcctggaaacagcccctcctccacgggtttgttcaaccatgtccaaagcaagcaagaagaaacgaaggacgataatggctctggtcgggcaggtggcgacggtggcgcagctggtgggcgtggacgcgttcagcctcatcacgatgatcgcggaggcggcgcagacggcgcggcggaaccgcgccgtgtgccggcagctggcccggcgcgtggagatgatcggcagcctgctccggcggctgcgcgagcaggacgacaacgacgacatgcggctgctgcggcacgcggagacgcgcggccccgtggaggcgctggaggagacgctccggcgcgcctacctgctggtgcggtcctgccagcggcgcgggtacgcgttccgctgcctgatgggggcgcggcacgcggacgagctccgcgagatgcagggcgagatcggcttctacctcgacctcttccccctcatcagctacgtcgactgggcgaggcgtcgcggcaacggcaacggcaaggccgcctgtggtgacactcgttctttgcaagaggcacctatggtaagaccatgtcttgtgccgttcctgtttctctcgctcctgcgatggatgcaattgttcagggagtacgtcatgcacctgctctgcttatcagcttatgtttactgacgtgtgtatctgtgaaatcattttgcatgttaattttcattaacaatgatctagctagctagctagcaccttaattttcattgctgggaaacaagctagctagctactagtatgcagctgttgttggtcctctgtttttcggactactatctgtcgagttcaggtgaaattgcctttcttttttgaaccagattaaataggtatgttggaataatcctatttttttcctcttgggaacgcaaccagcacacgttcatcaggagtgtttctgtttggcctggctatctgtttcggtttggatacatacagatagcttaccttcttggttcatcaggagtgcaaagttgcaggatctcaggcggcgctgacgatgacgcagcagccctggagccttccacggccgagcaaggacgagtaggaaggagggccacatgcgtcgtggccccgtgacacctgcttcacgttctctcagattttaattttatgacgcacagcgaaaagcccaaaaggaggggggggaagatgctgtcgatacagatcgttcgatccacacgggaagatctgaagcatgagagcatgtctgaaacagtcgagatgtcagacatgtcctgccgccattttattttttacccgctcatgtacgggggttatttttttttcgtatttctttcctcagcggcgctgcagaatagaaccgatcgaggcggagttgtctgtcatctcatcatctctcagtaatattcacacgcgctgcgtctctcccaagggcgccgccaacttgtacatatagcagcatttttttttgggtttttttaagatggtgccctcgattttggtggtgtgctcagttttaccctcagtggtgttttttgctcagttttgcccttctgttctatagcactggaagggcaaaactgagcaaaaaacaccactaagggtaaaac

SEQ ID NO: 2903 - DNA, 1601 bp, Zea Mays
gttgtttatcttgcgtccggcgtcctctctctctcgtggcgacgactgggcgacctccccgcccccgccgctctacgccaggtgcccagatcttcgtcgggcccttcgccgaagagcagccaacagcttaggttaaaatcaaaaaaatttgtcgggcggataatacaaggcctacaccagaaggaacaccctttgttgccggtctgcgggttgaatcatggcggagcacttggcttcgatcttcggcactgagaaggacagggtcaactgccctttttacttcaagattggggcctgtcgtcatggggatcgctgctctcgtctgcacaacaggccaactatatcaccaactcttgtgcttgctaacatgtatcagcgccctgatatgataacccctggagttgatgctcaaggccaacctattgaccctgagaagatgcaggagcattttgaggacttctatgaggacatctatgaggagttggggaagtttggtgagattgagaatctgaatgtttgtgataaccttgctgaccacatgattgggaatgtctatgtccagttcagggaggaagagcaagcagccgcagcatacaatgctcttcaggggcgcttttactctggccgccctataattgttgagtattctcctgtgaccgacttccgtgaagcaacctgtaggcagtttgaggagaacagctgcaaccgtggtggctactgtaatttcatgcatgtgaagcaaattggcagggatctcaggaggaagctgtatgggcgttctgcttccaggaggtaccatgggagaagccgaagccgaagcccgccaccacaaaggaggggccaccgtgaccgtgatgactaccaccaccgtgaccgtgatgactaccgtggtggcggcggtggtggaaggggaagaggtagcaggtatgacaggtacgatgacggagcaggcagaggtggcaggcatggcaggtatgatgatggagcaggcagaggcggcagacatgacaggtatgatgatggaggaaggcgcaggcatggtagcccctcaaggcgtgcaaggagcccagtcagggaaagcagcgaggagcgaagggccaagattgagcagtggaaccgtgaacgggagggaaaacagtgagctctccgtggctactgtttgccggacttgttgcttagctccggctctcatcgctatattctaagtatgcttgtgtggattgcattctgcatggctaagtaaaaccttttaagatcaggattcctcggttcattttatggttaaaccagacatcatttgtttccatctgtgttgtgtcggatcctttgctattatgttattttgacaattggtgtcaaatcttttgtggtgtgctattagcttatgatgatgtcagttgtggtttgtcactagatttgccatctggctttcagtcgtgtgttatgctgttccatggcggatttcttgttttccctcttctcatttttgctcaatgctcctagacagtgcttgggctgccgtcattgtactatgtgcagtagcacggagcaggttctattcagtttgagctgtcttttgtcttgggttcatggcaatctgt

SEQ ID NO: 2904 - DNA, 2311 bp, Zea Mays
aaaagcgttcgcgcccctgcgcccctcactgcgcatccgcatcactgcgtgtcctcctcctctccccctcactgcggcgcatccacatctgccaatttctccacctcctcctcctcgcccctgtgcctcgacatctcgcatccgctccatctatggaaggccaccacgcgccatggatcgccgctctctaccgccacctcaattgaaggttcaccgctctctacgcggatccgccacctcctcctcggccgccgtcaatagaaggtcccagatctcctctcccattacttctctccccattaccgcgctcgaggtctgccatttttggaggtccgccacttccgcctctgctcgccgtcaatggaaggtcctagatctcctctccctattaccgcgctcgagtcagtgggaggtccgccatttttggaaggtccgccacctcctcctcgacccgcggcaaaaatggcgtgggagatccgccacctcctcctcggcccgcggcaaaaatggtgtgggagatccgccacctcacctcctcccattctcacgcccgcgcctgatatggaaggtccgccgaagggactcggacgtcgaggccatggctgagccgcaccccttctccccctgcctcgcgcgcggcggccgagatggtgttggctgggttgttcgggatggtggtcctacctgccctccctgctatcctcgccccaaatcgacgagaatcatgcagcccaaatctgaggtggaggcgcctgcactgtcgatggaggtgtcgagtctgcggtggtgtctgtagatgggaaggcatggtgtgcagcagcagtggccaggtggtgtcgctgagcctgtcctcctacgggctcactagcacgctctccacggccatcggggacctcacgttcctacgtatgctgaacctgagctccaattggttccacggggaggtcccagcgaccatcgttcgccttgcgcatctgcaggcgctagacctgagctacaacgccttcactgaattccagagatgcaattcccgaggccatggagcagcagacaatatcaattgccaaagcagccattacaatagtactcattttagggacttcatttcttgcagctgccaatccaattacaggatgctatgacgctcttaagtgatcatgaacttatacattgaaataatggtgggcctcgagaggccaggaggtggagaggagttcaacaagtactacatcttgtctgctctcctatccgtggattgggtgcctgaaatatcctatagatgtctttagtagaggatccaaataatggcctgcaaggtttattgaatcggatcgcacaaaactccatctgcttcagaattgagctaagcgcatcctaacatcttgactcctatatcgatcaattatttttgttacacatttgattctttagtttcgtagagggaggaacatcgtgggatgcaggccccacggaacaccagatattttgaggtagaccgcggcgaggtgcccaagggcagcgcctagatcttcttctggatggtcaagttctgtaacgacaatgtggcagaggagatgccctgatcttcgtacgctgaaggatgtatgcatggaatagaagtcagataaatcttttgtgcaacaggctgaagtcattcttgttgatgggaaattaacagaggctaaggctaaccagcttgctaaggtttaaatgcaggttggagaactcccttgttcaggcttttgtctttcttctgcagaaggagagatgacgtgctgcatgacatgatggcatgtgaggcagcaacctcttctccgcaacccttgtcatggcctggagttggtgttctaggaaggagcacaattttattagggtagccaccagagttgaggtcccttttcaatggacgaacttggtgctgtggacgacatctgctattgtagctaggcgcatacatgttttcctataaatgctagctctgcaatcaccaaaggaaaacacaagagtactcttggaggaaagtttagcattcagtttaacaaaccttaccaactcatgccttgtttgaatgcaataatgcatgttatgttgccctgttgttgcttggacacatgcttggcatggctattttctggttatgtcacaactcacatctcccatgtaaatttatggctatgatatgcatcaaacaagcttatattttgctcttaagttggttcaaacagttctaattcattttaataattatctaaaattggtttgataattggtgcaataaggaactcatttgaaaggtaagagttatgtgttg

SEQ ID NO: 2905 - DNA, 1786 bp, Zea Mays
aatcaattcgaatcctattcgttgggctcgctttcttcagttgcattacttggcccacacaaactcttcccaataaattacgacccccagccaagctttggagtgcggttcccaaccatggcggcctcccccacttcctccctcgccccgccggtggtgcctatggagcttcacgccggcaaccgcgaccgcctcgtcgccgcgctccgcggccacatctccgcctccgcgcgcccgctccacggcctcgtcctccttcagggcggggaggagaagacacggtactgcaccgatcacctcgagctcttcaggcaggagagctacttcgcctatctctttggagtgcaggaaccagggttctacggcgcaattgacatcgcctctggacagtcaattttgttcgctccaagattgccagctgactatgctgtttggatgggtgaaataaaacctttgtcgtacttcagggatacatacaaggttgatatggtcttctatgttgatgagattgcaagggttgtgcaagatcatttcgggaaccatggaaagcctcttctgtttctgctacatgggaggaatactgactctggaaatttctcaaagcctgctagttttgaggttatgagacgagcaaggccaggcatgaaggaatatcaattagaaagtatcttccttcaccatgtttatatgtatggaggttgccgacattgctcttatacatgtatatgtgctactggagataatagtgctgttctacattatggacatgcggcagctccaaatgaccggactttgaatgatggagacatggcactaatggatatgggagctgaataccatttctatggatctgatatcacatgctcataccctataaatgggaaattcaacagaagtcagacaataatatacaatgctgtgcttaaggctcataatgctgttatatcagacatgcggcctggagttaattggatggatatgcacaaattagcagaacgggcaatacttgaatctctcaggaaggaacaaattgtacaaggggatgttgatgatatgatggctcaaaggttaggggctgttttcatgcctcatggtcttggccacttacttggtattgacacccatgatccaggaggctaccctgagggattggagaggcccaaggatccaggactgaactccttgcggaccacaagagaactgaaagaaggaatggttatcacagtggagccaggctgctatttcattgatgctttgctaactaaaacaagggatgatccaatttcctcaaagttcttcaactggcaagaggttgaaaagtataaaagctttggtggcgttcgcattgaaagtgatgtgtatgtgacggctcaaggatgccggaacctcacaaactgcccgagagagacctgggagatcgaggctgtaatggctggcgcaccatggcctctgccggcttcaagttctatggtggtagcagcagagaatagcaatgacatatctaaagcgtcgtaattttctctatgctcaatccatatcccgagttgaaacaaattcgacctggattcttatattcaataaatagtgaggctgaggcgcaaaacattgttggattgatggctggaaaacatttcatacgctcacttaatttgtaagctttctgttatgtgtttgagatcgatggggaaacgtttagctattcaaatgtcttgtttttgtggagagtttcaaatgccttagaattaactcatcctggaccggaagaagattggacaaaaagatgttt

SEQ ID NO: 2906 - DNA, 3500 bp, Zea Mays
gtcagctctcttccctccccgtccccgctctccacgcctgctgcctgggtgggtatttatatattagagtggttggttaggatcacatgtgggacccccacgtctcctcctccggatggacgggacgggacggacgcttccggttcacgtctggccattccacgcacgctttcccctctctctgctggctcgtgctccgctcactcgctcgccataaacgcgcaacagctgcaggcagatctgtccgttaccgctgctgctacttccttgcttgtattttatatgtaggtgaggtaagcggccacggagcaaaggaggagtgaagtgccgacggacggaccccagagagcacaagtgaacaaagccgccaccaccaccagaccaggggaaaggaaagggactgccgagtgccgacgcccgactgcggctgcggctgcgctgccagagagaagagaaggggcgataaaaatcctgtccgtatcaccctcccttctccagtcccagtcccagtggtgccagtggagtagcggccgctgcgcagtacagtgcagtgcagtgcagggggtcgccggcgtctcccgccgtccgcttcgatcaccgtcggacgcggaggaggaggagaagcgccaagacgaggacaggcgggttgcggcgtcattcgcggaacgatggcggcctgccgcgccggcggttaggcccctccgctccgctccgctcctccgagattgttgccctcttgttcctgtgaccgagataaattcaatagaattttctcctaagctatttaaaggacaactatggctacaattcaagatataggactctctgcggctatcaacataatgggtgctgtactgttcctagttgcatttgctttccttcgactgcagccaatcaatgatagggtttacttcccaaaatggtacctcaaaggtgcaagagagagtccaagtcatgggggtacatttgtccggaagtttgtcaatttggacatgcgttcatacttgaaatttttaagttgggtgcctgctgctctcaaaatgcctgaggatgagttgattagccatgccggtctggattcagctgtgtatctgaggatttacttggtcggacttaaaatatttgctccaatctcagttctagctttcattgttcttgtccctgttaattggaccaatgatactctgcaattctcgaagttagagcacagcaatgttgataagctttcaatatcaaacataccagttggatcaaaaaggtttatagcccacttggcaatggcgtatgttttcacattttggacctgctatgtactgttacgtgagtatgaagtagttgcaaagatgagactgcgatttctttcatcagagaaacgcagaccagatcagttcacggtccttgtgcggaatataccgcctgatccagatgaatcaattagtgagcttgtggaacatttctttcttgtgaatcatcctggtcactatctgacacatcaggtggtttacaatgcaaataaacttgctaaattggtgaaagagaaagcaaagatgcataattggcttgactactatcagctgagatttgaaaggaatgcatctaaaaggcctactactaagactggttttcttggttgttttggtacgaaggtggatgccattgaatactacacatcagaaattgagaggatagaaaatgaagaagcagaagagcgtgaaaaaattgtaaaggatcccaaatccattgtaccagcagcatttgtttccttccgatcacgttggggtgcagcagtttgtgctcagacacagcaaaccagtaacccaactgtttggttgacagaatgggctccagaacctcgtgatgtgtactgggataatttgtctattccatttgtctcccttacagttcgaaggctgataattgcagtggcattcttcttcctgaacttcttttatgtgttcccaatagcatttgttcagtctcttgcaaatcttgaagggattgagaaggcagcgccgtttctgaagcctctgattgaagagcatactattaaatcattcatccaaggtttccttccgggaattgctctgaagatcttccttatattgctcccaagcatattaatgtttatgtctaaggttgaaggattgacctcaatatcttcactggagagaagatctgcatcaaagtattatattttcatattcttcaatgtgtttctggcaagcattattgcaggatctgctttagagcagctaaaaagctatattcatcagtcagcaaatgaaataccaaggacgattggtgaagcaattccaatgaaggcaaccttttttataacatatacaatggttgatggttgggctggggtagctggtgagatattgagattgaagccactagtgatcttccacctgaaaaactttttcttggtcaagactgagaaagacagggaagaggcaatggaccctggaagtattggttttgactcaagcgaacctcaaattcagctgtatttcttacttggtcttgtctatgcggcagtgacaccatttttgctcccttttgtattgatattctttgggtttgcgtacgttgtataccgccaccagataataaatgtgtataatcaagaatacgagagtgcagcagcattttggccaagtgttcatggacgcataatcacagcgttgattgtatcacagctgcttctccttgggttacttagcacaaaaggcgctggccagtcaacacctgtgctccttgttcttcctgtagtgaccttctatttccacaagtactgcaacaaccgctacaaaccgacttttgtgaaatgcccattgcaggaggcgatgaagaaggataccctggaacgtgccagagagccaggatttgacctcaaaggatacctaatgaatgcctacatccacccggtgttcaaaggtgatggggacgacgacaagttctcagtcgcagatgaaccagaagccgagcaagtcctggtggcaaccaagcggcagtccaggcggaacacccccgtgcccagtaaatacaatgggtcggaatcaccttcgcttcctgaaattgtaaatgaccaacggctataaagatgtctacagttttcctatgtatactaggtatatgcccgtgcgttgccacggaagttaaaaaatagtataaaacatgtataccgaacaccatgttctagacaatgctagtgaaactgaaataaaaatagctacataattgcttaaatagttatacagctcgtagcacaaacaaaacaaagttgggcataacgttaagtgacacttttcctgtatcagacttggactatgtcccggctaatgcttgtagcctttgaatattatcgggacccattgatcactacactctacttgatcactacactctacttgcactatagcaatctccaaatccttaggtggcggaggcatctgcttcaatgatttatggagcatcgtttatcgtgcaaacatttg

SEQ ID NO: 2907 - DNA, 2504 bp, Zea Mays
ccaagcaaaggtacacccatcactctcagtcagcccgcacacacgaccgaaaaaaaatattaacttctagaaagtcttcgtcgcagtccagccaataaaccccctcccacgcgcctcaaccgttcttcgccgccctgccgaggacccttccttcctcgtccgcccacgaatttccggccagaccatcctacaccgcccgtccgggacacgcgcccgcctctgccaagaatttcgccttctccggcgccgatcccgcccattcttgtgccgccggcaggccaaggatgcggaaccttctcacggattcgtttgagctcggcaaacgggggcagtcctcaggaaatgtcgacatcgagcttggattgcagggtgacctgactagttctgcgcagccaggttttgagggattctatgaacaggtcaaagaggttgaaagcttgctcaacacattgacaaagttactgaaggaccttcagaactcaaatgaggagtcaaaagttgtcacgaaggcatctgcgatgaaagaggtaaaaaaacgcatggagaaggatgtcaatgaagtgacaaagattgcacggctggcaaaatcaaaagtagagcaactgaacaaagataatgctgtgaacagaggaaaaccaggatttggcaagggatcgggtgtggaccgatcccggacaacaaccactgtgtaaggtccatgtgatcatttcctgcttgcccttgtcctctttctctttcttgatatgattgattgcttgatgattttgttgcagcgcattgacaaagaagttgagagaacgtatactggagtttcagacattacgagaagaaatccagcaggaatatcgtgacgtagtggagcgtcgtgttttcactggtccgctttctcaaactcataaacatagttttactgtttgtagttcagttgcatcagggccgtgccggtaaaatctgaggccctgtacaaattctgaaatgaggcctcttttattagtcgaattctgaaatgaggcctcttttattagtcgaattctgaaatgagacctcttttattagtcaagaatgtcgactgtcggtgaataaaatatcggactacacgtatatgagctgtgactaaactcatgtctcacagttatggatcacagttatggaatagacgcatgagtaaataattaaagactaaaaacaactctaaaagactatatattttttctaattgatatgaatttttttttgaaaaaaaacccttctaacagcttatttaaatggctatcaaaaataatcatcttctattctatctttctcgctagcgtgaatgactctaaaaatacaaataagatatataaaagttgttggagattaaaataaatttagagtgattctcaaaatgataatttagagactgaaatttagaaatagtcttggagacagaagcgggcccagatatttgatattgggtattcaaaaattcaaaaaattaaagaaattagtgctataacgctattttgtataatacattattggtaaattactataaatcacaaaaattttgggtattcaatgaatacccatgaatacccagtgggcccgcctctgcttggagatgctctaatacatattttctattatataaatatactacagacttatatatttggggccctagattttatgggggccctgttccggtgaacaccttgcactcccgctggcacgggcttgagttgcattatagcttaattattttattcattcttacaaatatccaaccgaacagtgacgggggagcgtgctgatgaagagacaatcgacaagctgatagaaacaggcgacggcgagcaaatctttcagagagcgattcaagagcaagggcgaggaagggtactggacacgctgcaggagatccaggagcgccatgatactgtgaaagagattgagaggaagcttcttgatctgcagcagatcttcctggacttggctgtgttggttgaagctcaaggtgagatgctggacaacattgagacgcaggtcacaggtgcagctgaacatattcagaccggaacaaaccttctccagaaagcgaagaagctgcagaagaacacacgaaaatggacctgcataggcataatcatcctcctcataatcattctcatcattatcctctccttgaaaccatggtcctggggtaaataagcagcaaacaagaagcgtcgttcccatgttggttttggttgatgatattacctatagtattcttgttatagctgtgcatatgtcagaaggtgctgtacatcgtattgcaatctttgttttttttttccttttggaagagaaactttgggtgtgaactttcagattttgcttgattcgaatttgctgtattggttgtgcaactaaaggcctacacatactggtttcttgggaaattggtaactctgtctacgtagacagtaagctactgctgatgcaatccttgatttgttttacgtgatcgtatacttccg

SEQ ID NO: 2908 - DNA, 1273 bp, Zea Mays
atggcacttttcctttattcttggtgctcagattgcatcctttaatcatcaccattcaccatagacaagttaacaagtcaagctgatcgagacgctcgcgccagaggcttcttccaaagcagggagaagagaagagaagagaagagggagcgagctatggggttcggcatggtgtccctcatcgacggtttcttccggcgcgcgctcacgtccgccggcctccgcccaggctccgccgccgtggacgccgacaccaccatccacttctgggcgcacccctccctcctccaggcccaggcccagccctcctccgcggctccgcggccggtggtggtgctgatccacgggttcgggccggacccgacgtggcagtgggcggcgcaggcgggcccgctgtcgcgccacttcgacctgctggtgccggcgctgctcttcttcggcgcgtccgccacgcgcgcccccgcgcggtccgacgcgttccaggccgccgcgctcgccgcgctgctcgcgggcggcggccacgtcccgggcctcggcggccggaccgtgcacctcgtgggcgccaactacggcggcctggtggcgtaccacctcgcccgggagctggagcagcgaggcgtccgcgtcgggaaggtggcgctgtgcgacgcggacgcgtgctggggcgccgaggacgaccgcgcgctggcgggtcggagcggcgcggcggacgtggtggacctgctggcgcctggcgacaccgccgcgaaacacttcgcggacaacagggaggagaaggtggcgctagtcaaagggatcactgccaaagaaggcttcgagctgactcctctacctcaggaggtgttcatcatctggggtgagttcgaccagatctacccggtcgagaaagcacacaagatgggagggaagctcggggagaaggcgacggtgaaggtgatcccgggctgccgggcacgggacacctgccgcagcaacaggacatcaagctcttcaaccgcgtctcctcgacttcctgctgcagcctgctgctgcttccacctccaatggcagcgctgccgccaagtagctcgggttcttttcttggttctccacttgtattgtatcccgcgtggcacgagcttgctgttgtgttattgtgtatataaaattctctgcagctgggttttattccgcctcttcgttttctatccagctggtttggaaatagagacagtgcacattgttgtgtttagcaagatgtgaaataaatgatgaggcattgtttttctttaaa

SEQ ID NO: 2909 - DNA, 1048 bp, Zea Mays
gcccaccggtcagaggttcgtctctatcaagggagtaccaaacccttttatctgcttcgtcccctcccctgtgcgtgggggtataaagcaccgggctctgcttccgtcacgcgagacggcgagagcacaacattagcagcggttgtaccttgggggccgctaaagcagcttggtccaagctgtctgtagaacttaagcaactccgatcccagccacgggacacggcagattgaagccatcagctccggtttctggcgccggatttgggatccgcgcgatgtcttggtccgcgcccgacgacatcctcctctccacctcactcgcgggcttcctggacaagaaacttattgtcctgctaagagatggacggaaacttcttggcaccctctgctcatttgatcagtttgcaaatgttgttcttcagggtgcttgtgaacgagtaattgtaggggaacaatattgtgatgttcctcttggtctgtatgtgatccggggagagaacgttgttttaatcggagaattggatcacgaaaaggatgaactccccgctcacatgacatgtgttttagaagcagaaattagaaagattgttcatgaacaaccctgtgttttcccgaagataattctaactgtggctctaaaaagtttgttgtcttgctcctttactgggtgtttcactggctgagaaggcggagcgggaagcaagggatctgaaaggcacgatgaggaaacggatggagttcctagacttcgactgataataaacccgttcccgtggtggttgctgctcccctcccattgcggccgcggagtttttagtggcggcctgtgccatacctgatgactagcagtgatgttttctacgtacttttgatgccacatcagatcctttgagcgcctcctgatacggctgtcacttctctctgattattactactgcctggggagatgccatgtgctctcctccgtcgtcgtttgcaacagtgcattcgccctatctcgtgatttatttatttatttatttatataactggtattactgtactac

SEQ ID NO: 2910 - DNA, 2993 bp, Zea Mays
aaagagcaaaagaatctgaccgaaaccaagttgccaaattgggacgtcgtctccgactccgacgctgctcgatcgagcaaaccgacaaccccctctccgccgccgcgcacctacgctgccctccgtttggtcgtccgcccgcttcgacgggactggtccggccgtcggcgctcggcctgtcgacccaccagcccgctcccgtggcagtggtaacagatgtttgtaatgcttcaagcacacctcaagaaaataggcttgctggtgacagcaacaccatttcagaaaatgcccaggaatcattgagttctttaccagaacaagagtcaaatgatgctagtgttaacacagaaaagcaggaacctggcatttcaaaatgcaaatctgtggacgaaattccaaaaacagtaactgtaaagagatgcaagaacgttgattcaaaaaaagtctcctcaaataacaataataatccaagatttactggcagtccagctctgaaaaagcatcccacaaagggggaccatctttttgaactatgtgaaaatggcatggctcaagacacaaagcctcctagcacaaggatatgcataaattcagcctgcaaagctgtcttcaactcagataacacattttgtaagaggtgttcatgttgtatttgccatggttttgatgataacaaagatcctagtctttggctggtatgctcatcagagactggtgatcaggattgctgtggatcatccttccacgttgagtgtgcactcaagcaccgaaaggcaggatgcatagaacttgcacaatctatacagcttgatggtaactactgctgtgctgcatgcggcaaggttattggaatacttgggtgagtgattttgcatctaccttggggaattatcttaggttcagatgaaaaaggttttatatgtggcttgtttgtaagtagacatgcatgctacatgaagcattgctggctactctaacctccatatgtcattttacctatattatccttacccctcattgaactggtgggctttaaaatacatattgtggatgttcttcatataggtgaaccttgttgcattcaaaacattggttgaaccatttatcaaattgatatttcatatctgtagttacttacagcattatgtgcatatgatgtctgctatgtttaactcttattcctgtctccttttccttttttttttgtttttggcaaacactctttgttatattttggatctaacagtgtctttgagtattttgagcaggttctggaagaggcagctagtagttgctaaagatgctcgtagagttgatagtctctgttcccgcatatatctgagccatagacttttggatggcacaacacgttttaaagagttgcatcagatcgtagaggatgcaaaagcaaagttggaaagtgaagttggcccccttgatggtacgtcatccaagatggctcgtggtattgtaggccggctgcctgttgctgctgatgtgcagcaactttgctctttagcaattgaaaaagctgatgagtggcttagttcaaacattcaatctgaaactaaacaaaatgatacacttccttctgcctgcaggtttaaatttgaagatattacagcttcatctttggtgttggttctcaaggaagctgtttcctcgcagtatcatgctatcaaaggctataaactctggtactggaatagcagagaagcgccttacacaggggagcctgctgttttccccaaagaccaaagaaggattctaatatccaatcttcagccctgcacagagtattccttccgtattatttcatttactgaggatggtgaactgggccattctgaatcaaagatctttaccaagagtgtggaaatcattcataagaacacagagcatggagcagaaggttgctcatcttctgccaagagagctggtaagagacaaaatgctaggtcatcaggcttccaggtgcgccagttgggtaatgtcttccgaagagcacagactgagaatggttaccccagtacgttgtgtaaatatgagattgaagattcatgtgatcagagtgagtccgtgataccagataaggaccagtttcgatgtggtgcctcccgcaaactcgatcttaatgagacctcagtcccggacctaaatgcagaggtagtcatgccaacagagtgctgccagaatgagaacggctgtacttctggaaagaatgcattcacaaagtcgaacggttgtggtgactctgagacctgtgcagaggggcatgtaggggatgcaccagccatggaatcccggtcccagagtcgcaagcaggcatcagatttggagcaggagacctgtcttgatgacagcaatttggtggcccgtgcagctaggctcttcgccccgaggttaggacagttagatgacaactacgagtactgcgtgaagattatccgttggttggaatgttcaggcctcattgagaaggatttcaggatgaaatttctaacatggttcagtttgagatcgacagagcaggagcgaagagttgttatcaccttcatccgcaccctaattgatgaacccagtagtctggctgcgcagcttttggattcctttgaagaaattgttaccagtaagaggccaagaacaggtttctgtactaagttgtggcactagccaggtaacaaaggggcaccaagcattaaaaggatcagccaagtttacatcatacactggagcaatacattcaaccgaggtgttggataaagaccattgtttcagctttcggctcagcatcctccagggccatgatctctgagatttttctgcaagaaacctctggtctgtctgctccaagatcacgctccaaccgacgcaagaaaccttcttcaacctcactcagatgatcgtcgacctcttgttcgctgtcaaaacagcattcggcgtcatcatgcttactggatgatgctggagatgagtatggtgtgtactctccg

SEQ ID NO: 2911 - DNA, 1935 bp, Zea Mays
tcccaggctctcaactcccagtagaaaacttcaccggctgcctgcctgcccacagaaattgcgcccggccgccccccattcaccttcaaaaaaggagccaggcttcccatcaacgagggtgtcggccatctgagcagctcccctgcccctcgcagcggctactctacaggtctagcgactctttcgccatccatagagggaggaggcgcggcggagatggtgggcggtggcggcggcgggccgctgcggcgggtgggcaagtacgaggtgggacgcaccatcgaggaaggcaccttcgccaaggtcaagttcgcgcagaacaccgagaccggggaaagcgtcgccatgaagattaagagagaaatatccataatgaagcttgtcaggcatcccaatgtcgttaggctacacgaggttttggcaagccggaagaagatatttataattctggagttcatcactggcggcgagctattcgataaaattattcgtcatgggagactcagtgaagcagatgcacgcagatactttcagcaacttattgatggtgttgatttttgtcacaagaaaggagtctaccatcgagacttaaagcctgaaaatctcctccttgattcccaaggcaatcttaaaatttcagactttggactgagtgcatggcctgctcagggatctttccttctacgtacaacctgtgggactccgaactatgttgccccagaggttctcagtcataagggatataatggcgcacttgctgatacatggtcatgtggagtaattttatatgtattgttagcaggttatcttccatttgatgaagtggacctgactaccctttatggaaagattgagagtgcagaatattcattcccagcctggttttcaggtggtgcgaaatcactgattcgtagaattcttgacccaaatccagagacacgaatcaggatagaagagatcagaagtgatgaatggtttcagaaaaattatgaacctatcaaagaaatagaaaatgaggaagtcaatctcgatgatgtcaatgcagcttttgatgatcctgaggacgataatgaggatgcttttgaagatgaaacaggtcctctaacacttaatgcattcgacctaatcattctttcgcaaggattgaatcttgcagcgctctttgaccgcagacaggactgtgacaagcttcaaaatagattcttatcacgcaatccagcaaaggttatcttgtcaagcatggaggttgttgcgcaatcaatgggatttaagacacacattcgcaattataagatgagggtggaaggtctaaatgccgacaagactagccatctctcagttatggttgaagttttcgaagttgctccatcaatcttcatggtagaactacaaagagcagcaggagatacttcagagtataacacgttcgtaaataactactgcagcaaattagatgatatcatctggaaatttccaactgagaagggaaaatcgaggataccccggttatcaaagtctcattcataatctagtgctgtgtgttatcaattactatggacttaagtggatatatttgcagagtgtatcgcaattggattatgatattctaagtgtagctcttcgagtagtatatgtttgtatattcagagtccccatgtacaaagaggccgttttaattgaggtttccgtacctcgattccctgtgcaaagttttcatcgatgttttagactacacatctgtatattttgtcgagagcatcagtttcttagacaccacctatgtatcatgcgtttgttgccatctagtgtcattttgtaagatctaacttgtgatatacttggattgagtggtatggttgaaaagagtgaaagtcctttaaaaatcttagtgaaaaatacaaacttacacaaagttgatagaacatttttgagtta

SEQ ID NO: 2912 - DNA, 2246 bp, Zea Mays
aaacagaagcaacagcgcaccgccaagacctctccctctccgtctcgtctctccccgcacggtcgcccctcttccggttctccctgatggatcccaaggcagcggcgaaatcgaagcgctcgcacaccgtgcgcggccgccgcgtccaccagacccccgccgccgcggcagcgcacaggcagaagcgtgccacagccgccgccgccgccgccgccacctcgtccggcccccgcagccgcaacctcccctcgaactgggaccgctacgatgccgagggcgaggcggaggactccgcggccgcgggggaatggacaggcgaggtggctccgcgcagcaagggtgccgacttcggattcctgctagagcaggcccgagcgcagccctccggggcccgagacctcatcgcgccgtgtgtcccctcccaggacttgccatttggcttctacctctatgctcgaagttaaaggtgaaggaatcttgtcctggtgtgctgatgataactttatattagaggacgacctagcaccagattttgaggtgccttttctctccatggatctgaatgcattggccaatcacctttcaaagattaggctttctcggagactttttattgaagatgatctatttcctgaggctatggctgatgcatcagaagacaatgaaatagcgattgaacttgacacctctgtggaaattgacgctaaaggcagttcagttggacataacttgaactttgaacccagaaaagatacaagtcatcatgagtctgccagcaacatctgtgctgatgatcagataaaaacagaacgtcagccgcaatgttttgcacgagaaaatacagcatctacaaaggttagtactcattcagtgaattcagatagtgaagacaagagctacaagcaagtcatggatactgatcctggtacaagccatagcaaagggttgatgtttgaggtgggcgctgcagaagaagaacttgacatgctcctcgattcatttggcggaactcacctttccagctccaacttggacgaaccatttgagcccgtttcaactttgcaagagatcagtcggtccaatgagaaggttggacctagcttgtcttccggaccacctttgcttgcacctctcgacgatgctctagatgacttgctttcagagacttctcatactgctgcacagaacgaaggctttgctacgcaatgtataacttctcaaccgacggctgattctggccagaacaccgacttcagatacactaagaaaattgatgtgacaccatcaattcatgattcggtggatgatttgctcgaagacacttcaccatgcttaaatgagccgaaacaaactacaactgcacaagcatcgaacagcaccccgcttgatagcgtacccatccgttctggtccatcaaatgcatctgcatcggaagattttgattcatggtttgattctctataggacagaagaaggtcggtgccgtgaggaagtaatggctggcttcagggcatcttctcggacatgcatagtacctttggcctttatgtactccattactgaattaaacttcgtaacagtacggcgaacttgatttcagtgttagcatctttgtatggagagcagccactagataacaatatatttttccttgagagatgacaaaagctctttattttaagagatgacaagaggttgttgcgggcgggcgccggactgccactcctcgtccttcacggtgccgtacttcttccttcgatgttgagccagctttaaggcctcctacgacgagatcttcgatggagaacgcgggaataccacggtcccaccgaacgccttttgaactaacaaatcggacagaaaaaaaaagcccatgcttatgatcaagtctgctgtaaggagaaagaaacaagacgacgtcatgggaggactggaagcgcccaactttcacgcatgtgcaagtgcaacgaacacctcatgattcttgctagcggctctgctctatgattagatccagatgtttagtctgtgtgctgctgcttcgtgggtaggtagccactggtttggagccgaaggccacctcgacgcgtcactcgtgctcattagtcattagtgctcatgcttttgttagtgtgttcgtttgttttggaaagggtaaagaaaacgcaatgtttggtactgctacaaagattcgatcagagtgactcaatgccatctatttagcgtttccgaaaaaaaaaaaaaaa

SEQ ID NO: 2913 - DNA, 1550 bp, Zea Mays
atccactttttatcgttgaagtctaatattcccatcaaataatgtttcgcttgaggccctccaccatttgtaatgagaaggcaatcttcatcacagcaacattagagtggaagctttaatgagcacgctctaagttctagcctgtacatatcaaagacatagaagattaccaaccaagtactagggaattccggctcgctttcctcattcacctagtttattgaaagggtgagggaatgttcatgctgcaaggaaagaggatgaggtgtcaatctgacagacaagtcaaaaggcagaccacttttcaggagcatatcatgtctagctagggtaacactgtaacagatatagggaataagtgagtgcagtcatcagattttattcaccaatgtggggttaccatggacactcctgtttttttttctgtaagcccagatagtggacatacaggcctacactgtccagtagtgacgaccgatataaatatatgcatcttaaagctgagattctaaggcatctagagcacacgactcctgatatcatgaaagccttcagcacttcaggttacaagtataaataggacacgtacctgcacccatcagtgcacccaacttcacatttgaggccaaatcagcttctttgttctctagagagcgggcctcaaaatagcattcttgactaaccatgtcaagggacccactagtagtaggacatgtagtaggtgacattctggacccatttattaaaacagcctcacttaaggttctgtacaacaacaaggaactgaccaatggatctgacctcaagccatcacaagtagcaagtgaaccaagggttgaaattggtgggcgcgacatgaggaacctttacactctggtgatggtggatccagactccccaagtccaagtaacccaacaaatagagaatatcttcattggttggtgacagacatcccggaatcagcaaatgctagctatagaaatgaaattgtcagctatgaaaacccaaagccatctgctggaatacatcgctttgtctttgtactcttccgccagtctgtccagcaaaccgtttatgcaccaggatggagacaaaatttcaacacgagagacttttctgcgctctataatcttggacctccagtggctgcagttttcttcaattgtcaaagggagaatgggtgtggaggaagacgatatattagataaataccatctcactgactgtgcactgcaagaaggaatattaattaaattttaaaaaaaacatggccagccacttcacaaagccatgataaatgctgggccttgaaatgtagcttcatttgaaaattacttcgccacatctgcaagtgcaatgaatttagcttacagtttcaccatcttgaacaatggtctgtcccaagtgaggcaaacctgcatattaaaattattgttctggtcgtgttcaaaagcatatacccccttcatcaaactaataagttaactacattgtagtagcgacaaaataaatcatgcttttgttttaatgtaactgcataaccattggc

SEQ ID NO: 2914 - DNA, 1233 bp, Zea Mays
cagcgagaaactcacgaaaagagaggagccgggaagcaaagcgccgacgactacgccgcaagtcccaacccaacccaccctatccagaatccagggactggactgggaacgcaaggttctgggaaggcgtatgtaggcgttgccgtcttggtgcctcatcccggagctgctacttctcccctggtcgttggtcgattggagccggtagcgcgggggggatatgcacgggaatttcgggccccaggagcagattctgtggccggcgtcggttctcgccggcatcgtcatgtatatcagatgactcgacatgtcagttctcgatgtttcaaatgctacagtatgttaaataacaggcaaaaggttgagtggaacaataggggtttctctacactccatgcattggtagctgctgccgtttctttctacctggtcatgatctctgacctcttcaatgaagatgcgcacaatagcataataattgacagaaaatcatggctatccgattgcatgtttggggtctcgatcggttactttttgacagacttgacgatgatcatgctgtattttccttctttaggtggaaatgagtatctcttgcatcacggactttctatgtatgcaattggtcttgctttattgagtggcaaagcacacatgtacatcctcatggtcctcttcaccgaaatcacgactccctttgtgaacctcagatggtatttggacgttgctggtcagaagacttgcaatctttacttatacaatggtgtggctctatttgttggatggctgattgctcggataatcttattcatatatatgttcacccatatgtattttcatcttgatcaggcgagatccatcttcagcttagggttctacagcttggtggcagtgccgtcggtggttgcggtgatgaacgtattttggttctggaagatactcaaggggatggtgaaaaccctttctaggaggaagcacagcgaaaatgggagaacagattagaaggaatgaaggaaggatgctactgaactgtacacatgttcatctcaacgcacttacggcactcgcattcatttctcacacagatgtaattatcttgtcttgccgtcaaagattcaaagtcggaatcccgcaactcttaaattgttgcaacagtgccacatgcaccgttactgaatatatattggccactgtcagtgtcagcgtgctcgcttgggagctgattacacgcgc

SEQ ID NO: 2915 - DNA, 1405 bp, Zea Mays
cagcgagaaactcacgaaaagagaggagccgggaagcaaagcgccgacgactacgccgcaagtcccaacccaacccaccctatccagaatccaggtatatcagatgactcgacatgtcagttctcgatgtttcaaatgctacagtatgttaaataacaggcaaaaggttgagtggaacaataggggtttctctacactccatgcattggtagctgctgccgtttctttctacctggtcatgatctctgacctcttcaatgaagatgcgcacaatagcataataattgacagaaaatcatggctatccgattgcatgtttggggtctcgatcggttactttttgacagacttgacgatgatcatgctgtattttccttctttaggtggaaatgagtatctcttgcatcacggactttctatgtatgcaattggtcttgctttattgagtggcaaagcacacatgtacatcctcatggtcctcttcaccgaaatcacgactccctttgtgaacctcagatggtatttggacgttgctggtcagaagacttgcaatctttacttatacaatggtgtggctctatttgttggatggctggtacaacaactgctctcacgagtcatcaatttcttttaaagaacaaatttctatacagtcataatgcacatggttcaggaaagttgtctctaaatgctagaacattgcatagttaggttacctggcagctgtagttgctacttttactatttctgctgcttactcacaccagactgcacacagaaatatcccacactgtcaactgcaggattatccttttttaggtttttgaccagattaagtgaaaaatgtaccaattttttatatattttttcatttacaaatcaaatggaaatctaaaacttctgatggaggagcagcttccttgatatgatttgttttgaagatgtgatagctgggggtaatgattagtgatggcttcactatacaaattggtatgggtatttgaattttccaccccgagaggcgagatccatcttcagcttagggttctacagcttggtggcagtgccgtcggtggttgcggtgatgaacgtattttggttctggaagatactcaaggggatggtgaaaaccctttctaggaggaagcacagcgaaaatgggagaacagattagaaggaatgaaggaaggatgctactgaactgtacacatgttcatctcaacgcacttacggcactcgcattcatttctcacacagatgtaattatcttgtcttgccgtcaaagattcaaagtcggaatcccgcaactcttaaattgttgcaacagtgccacatgcaccgttactgaatatatattggccactgtcagtgtcagcgtgctcgcttgggagctgattacacgcgc

SEQ ID NO: 2916 - DNA, 1984 bp, Zea Mays
cagcgagaaactcacgaaaagagaggagccgggaagcaaagcgccgacgactacgccgcaagtcccaacccaacccaccctatccagaatccaggtatatcagatgactcgacatgtcagttctcgatgtttcaaatgctacagtatgttaaataacaggcaaaaggttgagtggaacaataggggtttctctacactccatgcattggtagctgctgccgtttctttctacctggtcatgatctctgacctcttcaatgaagatgcgcacaatagcataataattgacagaaaatcatggctatccgattgcatgtttggggtctcgatcggttactttttgacagacttgacgatgatcatgctgtattttccttctttaggtggaaatgagtatctcttgcatcacggactttctatgtatgcaattggtcttgctttattgagtggcaaagcacacatgtacatcctcatggtcctcttcaccgaaatcacgactccctttgtgaacctcagatggtatttggacgttgctggtcagaagacttgcaatctttacttatacaatggtgtggctctatttgttggatggctggtacaacaactgctctcacgagtcatcaatttcttttaaagaacaaatttctatacagtcataatgcacatggttcaggaaagttgtctctaaatgctagaacattgcatagttaggttacctggcagctgtagttgctacttttactatttctgctgcttactcacaccagactgcacacagaaatatcccacactgtcaactgcaggattatccttttttaggtttttgaccagattaagtgaaaaatgtaccaattttttatatattttttcatttacaaatcaaatggaaatctaaaacttctgatggaggagcagcttccttgatatgatttgttttgaagatgtgatagctgggggtaatgattagtgatggcttcactatacaaattggtaaggatcattttggatttcttttttttatggaacacaagaagagtcattttgaattttggaatacgggtttttgtcgtaaaaaacttttatgatcttgtttgaattaaccataagcgaacagatgtgtagtctagttggtagtaccttaggtcttaaggttctaatccctacggtagcaaatttaaattaaaaaacatccctcatcggttgtgttccctgatgagccgctttcagcgaaatgcacatggtccgatggccgcagacatgtctcgtaggcacttggtggcgtctagcgcagccgacttttgaggtgtttcttgatatatgtgggagaagtttcttcctgatgcaatgccgtggggacagtttcccctggtattcgagttctttttttgaattaaccataagtatttggatgccgcttctcagttttcaaatataccctaaacattctctttaagtgacccgtttgctctgatggatagttttgattaacttgtctttcgtctgatacagattgctcggataatcttattcatatatatgttcacccatatgtattttcatcttgatcaggtatgggtatttgaattttccaccccgagaggcgagatccatcttcagcttagggttctacagcttggtggcagtgccgtcggtggttgcggtgatgaacgtattttggttctggaagatactcaaggggatggtgaaaaccctttctaggaggaagcacagcgaaaatgggagaacagattagaaggaatgaaggaaggatgctactgaactgtacacatgttcatctcaacgcacttacggcactcgcattcatttctcacacagatgtaattatcttgtcttgccgtcaaagattcaaagtcggaatcccgcaactcttaaattgttgcaacagtgccacatgcaccgttactgaatatatattggccactgtcagtgtcagcgtgctcgcttgggagctgattacacgcgc

SEQ ID NO: 2917 - DNA, 2035 bp, Zea Mays
cagcgagaaactcacgaaaagagaggagccgggaagcaaagcgccgacgactacgccgcaagtcccaacccaacccaccctatccagaatccaggtatatcagatgactcgacatgtcagttctcgatgtttcaaatgctacagtatgttaaataacaggcaaaaggttgagtggaacaataggggtttctctacactccatgcattggtagctgctgccgtttctttctacctggtcatgatctctgacctcttcaatgaagatgcgcacaatagcataataattgacagaaaatcatggctatccgattgcatgtttggggtctcgatcggttactttttgacagacttgacgatgatcatgctgtattttccttctttaggtggaaatgagtatctcttgcatcacggactttctatgtatgcaattggtcttgctttattgagtggcaaagcacacatgtacatcctcatggtcctcttcaccgaaatcacgactccctttgtgaacctcagatggtatttggacgttgctggtcagaagacttgcaatctttacttatacaatggtgtggctctatttgttggatggctggtacaacaactgctctcacgagtcatcaatttcttttaaagaacaaatttctatacagtcataatgcacatggttcaggaaagttgtctctaaatgctagaacattgcatagttaggttacctggcagctgtagttgctacttttactatttctgctgcttactcacaccagactgcacacagaaatatcccacactgtcaactgcaggattatccttttttaggtttttgaccagattaagtgaaaaatgtaccaattttttatatattttttcatttacaaatcaaatggaaatctaaaacttctgatggaggagcagcttccttgatatgatttgttttgaagatgtgatagctgggggtaatgattagtgatggcttcactatacaaattggtaaggatcattttggatttcttttttttatggaacacaagaagagtcattttgaattttggaatacgggtttttgtcgtaaaaaacttttatgatcttgtttgaattaaccataagcgaacagatgtgtagtctagttggtagtaccttaggtcttaaggttctaatccctacggtagcaaatttaaattaaaaaacatccctcatcggttgtgttccctgatgagccgctttcagcgaaatgcacatggtccgatggccgcagacatgtctcgtaggcacttggtggcgtctagcgcagccgacttttgaggtgtttcttgatatatgtgggagaagtttcttcctgatgcaatgccgtggggacagtttcccctggtattcgagttctttttttgaattaaccataagtatttggatgccgcttctcagttttcaaatataccctaaacattctctttaagtgacccgtttgctctgatggatagttttgattaacttgtctttcgtctgatacagattgctcggataatcttattcatatatatgttcacccatatgtattttcatcttgatcaggtatgggtatttgaattttccaccccgagaggtactaccagttagcctgggcatctgtggaaatccattgacttctgacaatgcgagatccatcttcagcttagggttctacagcttggtggcagtgccgtcggtggttgcggtgatgaacgtattttggttctggaagatactcaaggggatggtgaaaaccctttctaggaggaagcacagcgaaaatgggagaacagattagaaggaatgaaggaaggatgctactgaactgtacacatgttcatctcaacgcacttacggcactcgcattcatttctcacacagatgtaattatcttgtcttgccgtcaaagattcaaagtcggaatcccgcaactcttaaattgttgcaacagtgccacatgcaccgttactgaatatatattggccactgtcagtgtcagcgtgctcgcttgggagctgattacacgcgc

SEQ ID NO: 2918 - DNA, 1005 bp, Zea Mays
attttatcccaggagaggtcgctgcgggcgagctggctcgctcacccacccttgcccgccgtttacggtttagccgcgtgctctctctgtctccctccctccctgtcggggacaattcggctaccgctgccgccctacgccaggttcccagctcttcgccaggcccttctccggcgacgagcacccaccaggccaccagttgacacttaatactacctgaatctaatgcttatcaatatgcctaatatttgctggcggagctttactttgtgcaacacatattctccatctaatcaactacaaggaggttgtactcaaagaatggatttatggattacttcttgctcacaagcagcgagacatcatgcaaggataggttcagttgattttcctgttaagaagaacgtgaagtcatcccaagtgcaaaacgcgacatgttttgttggtttagtgcggcagttgcagtgcagacggtcagcaaaaagccatatcctgaatgtaaagtctgatacagtagcccaccaaaaggtttctggtgtaagctggagtttggaaaatatgccacgaagaataggatgtgtagtctctggactaggttttgcagcgtatgggctggcgagtgctgagggtcctgttaacaacaacatagatagcactgaatctgccatgtcatcaacaaatttatctcatgggaaagaagttcacacagactattctgttactggcattcctggtgatggaagatgcctgtttcgttctgtggttcacggtgcctacattaggtcaaggaagcccatacctaatgaggatcatcaaagaaggctagctgatgagttgagaacaaaggtcgcagatgaatttatcaagaggcgggcagagactgaatggtttgttgagggggacttcgacacgtacgtatctcagattaggaagccacatgtctggggaggcgagccagagctgttgatggcttcacatgttcttcattatttcgtggacgaggat

SEQ ID NO: 2919 - DNA, 1500 bp, Zea Mays
attttatcccaggagaggtcgctgcgggcgagctggctcgctcacccacccttgcccgccgtttacggtttagccgcgtgctctctctgtctccctccctccctgtcggggacaattcggctaccgctgccgccctacgccaggttcccagctcttcgccaggcccttctccggcgacgagcacccaccaggccaccagttgacacttaatactacctgaatctaatgcttatcaatatgcctaatatttgctggcggagctttactttgtgcaacacatattctccatctaatcaactacaaggaggttgtactcaaagaatggatttatggattacttcttgctcacaagcagcgagacatcatgcaaggataggttcagttgattttcctgttaagaagaacgtgaagtcatcccaagtgcaaaacgcgacatgttttgttggtttagtgcggcagttgcagtgcagacggtcagcaaaaagccatatcctgaatgtaaagtctgatacagtagcccaccaaaaggtttctggtgtaagctggagtttggaaaatatgccacgaagaataggatgtgtagtctctggactaggttttgcagcgtatgggctggcgagtgctgagggtcctgttaacaacaacatagatagcactgaatctgccatgtcatcaacaaatttatctcatgggaaagaagttcacacagactattctgttactggcattcctggtgatggaagatgcctgtttcgttctgtggttcacggtgcctacattaggtcaaggaagcccatacctaatgaggatcatcaaagaaggctagctgatgagttgagaacaaaggtcgcagatgaatttatcaagaggcgggcagagactgaatggtttgttgagggggacttcgacacgtacgtatctcagattaggaagccacatgtctggggaggcgagccagagctgttgatggcttcacatgttcttcagatgccaatcaccgtctacatgcacgataaagccgctggtggtctaatagcgatcgcggaatacggccaagagcacgggacggaagctcccgtccaagttctttaccatggctatggccattatgatgcgctgcagataccaggagagggtggtccgaggtcaagactgtaacgttagtggctctgaatctaaatggcagcgacatccgctttggtggcaaagagcagatggtccttcgacgcgcctggaggtcggaggtggaccgacatccgctgatgagctctcacgatcttcagactcctgattccagagcttattcttctgtatatctccgcgtggctctgtttctcctagccaacaaacaagccgtgacagaagaacgacgctgagaatatgagaccatgctcggtcgtcctcgatcgatcgatcaaacaaacaagcagaagaagaaaaaaaattccaggcccatgccgtccgctcatctcagccgcagccgtgacgaagtgccaggta

SEQ ID NO: 2920 - DNA, 1606 bp, Zea Mays
attttatcccaggagaggtcgctgcgggcgagctggctcgctcacccacccttgcccgccgtttacggtttagccgcgtgctctctctgtctccctccctccctgtcggggacaattcggctaccgctgccgccctacgccaggttcccagctcttcgccaggcccttctccggcgacgagcacccaccaggccaccagttgacacttaatactacctgaatctaatgcttatcaatatgcctaatatttgctggcggagctttactttgtgcaacacatattctccatctaatcaactacaaggaggttgtactcaaagaatggatttatggattacttcttgctcacaagcagcgagacatcatgcaaggataggttcagttgattttcctgttaagaagaacgtgaagtcatcccaagtgcaaaacgcgacatgttttgttggtttagtgcggcagttgcagtgcagacggtcagcaaaaagccatatcctgaatgtaaagtctgatacagtagcccaccaaaaggtttctggtgtaagctggagtttggaaaatatgccacgaagaataggatgtgtagtctctggactaggttttgcagcgtatgggctggcgagtgctgagggtcctgttaacaacaacatagatagcactgaatctgccatgtcatcaacaaatttatctcatgggaaagaagttcacacagactattctgttactggcattcctggtgatggaagatgcctgtttcgttctgtggttcacggtgcctacattaggtcaaggaagcccatacctaatgaggatcatcaaagaaggctagctgatgagttgagaacaaaggtcgcagatgaatttatcaagaggcgggcagagactgaatggtttgttgagggggacttcgacacgtacgtatctcagattaggaagccacatgtctggggaggcgagccagagctgttgatggcttcacatgttcttcagatgccaatcaccgtctacatgcacgataaagccgctggtggtctaatagcgatcgcggaatacggccaagagcacgggacggaagctcccgtccaagttctttaccatggctatggccattatgatgcgctgcagataccaggagagggtggtccgaggtcaagactgtaacgttagtggctctgaatctaaatgaaccgaatgtaagtaaaatacaaaagaagaaggaaggccgaattgaaagaatcgaaagtggaagaactggacgtgccttcaaacaattagaagacaatcctagcaggcagcgacatccgctttggtggcaaagagcagatggtccttcgacgcgcctggaggtcggaggtggaccgacatccgctgatgagctctcacgatcttcagactcctgattccagagcttattcttctgtatatctccgcgtggctctgtttctcctagccaacaaacaagccgtgacagaagaacgacgctgagaatatgagaccatgctcggtcgtcctcgatcgatcgatcaaacaaacaagcagaagaagaaaaaaaattccaggcccatgccgtccgctcatctcagccgcagccgtgacgaagtgccaggta

SEQ ID NO: 2921 - DNA, 1719 bp, Zea Mays
atagaattgagtctcttattttaaatctcaatttcacgtgtaactaaacaacataatttagtaaaaaactgatttcaattcctaattctacgctcaaatatctggaagtctttgcgctagaaggagttccatcagcaatagacgatttttacgagaatagcaaacgaactccatcttctgtatgttccatcagaaatcgacaaaaatgacaaaaaggtcccctcggtctcccaacgcaatacaatcgggtcaacaaagactcgggaggagcgtagtagcgtaaaccgtccgttattgggctcctccccgctctgaccgctgccccgtcgacccggtcggcggtcgcccctgatcgctgcttgattattcctcgcagtgcgtgacccgtcagctggtatacgagagcacgtcctgctgcacaagtaaacaagtcactcgtagccaaccgcgcagataataatcaatccggagtcacggtaatccagcgaccgtaccgcaacagtcaccagcgacaagcaacggcgtggcacgggcacgggctccatcggaccatctccttctcccagagtcccagccccacactcccacgcccgccgtccccgagagccgcttcttctttctccgtgactcggagctgtctacctcaccctcactgcctctgcgtgcgtgcgtcactgccgggacgcgccttgacttctcacgtcgtgtcgtgtgtgagcgccgcagcggtgctgctgatctgcgattcctccacgccacaccctacctgaccacccgacagggaatcctactccctcttgcgcgccgcggcggcggcgccggcatcttcggtctccgtgcgggtgtttccgttcggcgtttactggccgggcgagcgcggcattggaggagtcgggaggagggagaccggaggcgtgatcgatggggaactgcgtggcgagcgggggcgcgacgacggtcacggcggcgggggaggacgggaggcggcgggggaggaggtggaaggcgccgcgggaggagcagctcggctcggtccccggccggatcttctccaacgacggccgcagccgcaccgccgccgtgttcacgcagcagggccggaagggggtcaatcaggacgggcacggcccgcatggccacctggtggcgcgcagggtccgcgacgcgctgccgctgaagctcatggccgcggtgcgcgagtccaagcccggcttggacatggccgccgccgcgtggaggaaggcctttgcgcgcgcctacaaggccatggacaaagatcttcgctcccacgccaccctagactgcttctgcagtggcagcaccgccgtcaccgtcctcaagctcggctcggatctctacatggccaacattggtgactcgcgcgccgtgctaggctcaagggacggcggcggcatggtggccgtgcaactgactgtcgacctcaaaccagatgttcccagcgaggcagaacggatcaagaagtgcaggggcagggtatttgctctgcaggacgaaccggaggtgcctcgggtctggctgccgttcgacgacgcccctggcctggcgatggcccgggcgtttggggacttctgcctcaaggattatggtgtcatttcggttccagagttcttccactggtcgctcacggagaaggaccagttcgtcatccttgcatcagatgggcagtcgtgatctaagtagccgcacatggtgggcctt

SEQ ID NO: 2922 - DNA, 1429 bp, Zea Mays
cccggaggtccccccaatgtcggacggacgacgggttcacccacaccccctgctggcggatcccccccctcgcctgcctgcccgcgcgccaagaactccattcacctccccccacactgccaggagcttcgcccggcccccgggtgccggacggccaccaggttcacccgtgcctgctgccggcggattcccccctcccccggtggctaggagctccatctgtgttgtcgtcgtgtgctgctgggcgtctcccccaatggcgttacagcatgggcattagagaactctatgacggatggggagctactctggcgcgcgtcgttcaccccggcggtacctattctgacgcgtatggaaggttgccttcatgttcctcacgcaagggcaggtgccgctcagggggtgcctcactactacatctacgtccacgcgctatcggccaatttcaccttcgaatcaatcttctcccaacgccaaatacctagtaagactcagactcaagtttgattgattgctatttgctaccaacaaaaaataggtctcgacaagaaagttttattgtacttcagatttgtatatatgatcaacatctctgtgtgcagtatgcttgagaatagctttaaggctgagtaacaaggttcatcatttttaatgcagcaacaccaatgagccccttctcagcacaatgacattgtttacatacaaagtacgtcaaaaggcaacgtctaagtaatatgttgatacacaaagatagaaggttacatgtgcgttgttactatctcacgccaactcagacctctactggataacgttgcacaccatgcgactagacagacactaaatttgggtacctctacaaagcacttaatttattgtgcctctttcgaaaaaggccagttgcgagcaacatatgggttgttctcgtgaaggaagttgaacacctcgtccaacagctgcaacagaaaagctcaaggtcaaatttcaaaaaaagaacgtgggcatgagcgtgcgcaatacactagtgttgggaccatgcttcgtcgccgaaggtcctgcaaaaagaaacagcttcggctgaagctgcttgaacatgatgccgaagacaccgttcacgaagcttcggagctacaacatatccgaagacgaagggtcgaaccgacttaaagatagaatgaccatttagcccataagggtctgagtcattgttgtaaacttttatgaggggcataattgtaattcctcatgagttgtgtcctgtgcctataaatagtgaacagtattcctttactgttcacggattcctgtaattgccaacgcatcactcgggaattattgtttgtcaaggcaaaggtataaatgtacctaaacattgtgttcagatattcaaaattcatttaacaagatatgtgaatgatgtcgtttattttca

SEQ ID NO: 2923 - DNA, 3130 bp, Zea Mays
cacattgcccggaggtccccccaatgtcggacggacgacgggttcacccacaccccctgctggcggatcccccccctcgcctgcctgcccgcgcgccaagaactccattcacctccccccacactgccaggagcttcgcccggcccccgggtgccggacggccaccaggttcacccgtgcctgctgccggcggattcccccctcccccggtggctaggagctccatctgtgttgtcgtcgtgtgctgctgggcgtctcccccaatggcgttacagcatgggcattagagaactctatgacggatggggagctactctggcgcgcgtcgttcaccccggcggtacctattctgacgcgtatggaaggttgccttcatgttcctcacgcaagggcaggtgccgctcagggggtgcctcactactacatctacgtccacgcgctatcggccaatttcaccttcgaatcaatcttctcccaacgccaaatacctactttcaaaaaagcccttcacgggcctgataaatcaaggattgattttatgagagaaatagattgagtatactgcaatagagacaatgaaggcagatgggtttttgcagactcagactcaagtttgattgattgctatttgctaccaacaaaaaataggtctcgacaagaaagttttattgtacttcagatttgtatatatgatcaacatctctgtgtgcagtatgcttgagaatagctttaaggctgagtaacaaggttcatcatttttaatgcaccaacaccaatgagccccttctcagcacaatgaaattgtttacattatcttcagggccagtctacaaactttcacagcctgaagtttatgaacagttaatacacatcggttctaacttctgtgtttgtaaggatgctaaaagtactcagactctgttaatgtcttcttagataaaatagatttgatttataagtgccagtattttgggagcataatagacactaagcttcaaacgtttggtcaggttcatcatttttaatgcagcaacaccaatgagccccttctcagcacaatgacattgtttacatgtatgcatttttttcttgctattgttatgaagaagctttatttctgaaatattgatttccaatttatgaaatattgattttaatttctgatagtacctttggtgcatttcttaacttctttattccagccttgggatactgtataatcttaccaaatgaacatagataggtctatgtttggtttatgttcattactgtcatttttctgttgtgtgctctgacaaggtggacttaacacaccctaatctactatgacaaacagagcagggcctgctgtagccaatgagttggatacagtggacacaatcacatcaattttgcggttcaattactttgcaaaaggttgtatatgcagcctctcttttgtagtcaactcttttataatggctaaacctagaatttcttttacgcaaactcgacatgatccaaatcagttgctcccagtcaggagctgatttgagtctagcgccaaatcacctcaaacttttatagcccaatttgtctctctgtgttggcatcatgagccatccgtcccattcagcttgatagcaggttatgacacagccaggcagaaacctggaaggattacccaggtctaaattggaccattgcatcagcacacatctcttgctctcgccctattttagatatattgttattttgttctcacacattcgtgctttgctccttgttttgcagttatgcatatatctaataaaagtggaaggataccatatgccacttttttctaatataagataacccttcatatttcatttttctcttaatgtaggacaactagatttatatactctccatagtagctgctcttgacagaaaagaaagcaacagaagtgccattcatacatgtcaaaagattaatttgcagcaataaattataattccacaggtctgaattgtgtgtacatacatacatgtaaaaaaataatttgcaaggacaggtaataattccacatgtccgacttggtgggttacacatcctactatccccttgtttgttttttaaataatctggtcggatgacaattctactatttgcttctatattttctccaaatctccccttctcttgttctgttacagcttgttaatatcacttgctgcagacaaagtacgtcaaaaggcaacgtctaagtaatatgttgatacacaaagcactgatccttagagacttcatccaacgagatagaaggttacatgtgcgttgttactatctcacgccaactcagacctctactggataacgttgcacaccatgcgactagacagacactaaatttgggtacctctacaaagcacttaatttattgtgcctctttcgaaaaaggccagttgcgagcaacatatgggttgttctcgtgaaggaagttgaacacctcgtccaacagctgcaacagaaaagctcaaggtcaaatttcaaaaaaaggacgatgaccaatatagaagttatcttaacaatgacagactgtcatcaccacctaaaaagtatgtggcacaaagcacatataggatcaaggctagccaacttcacaaacttcaatcagattttactgaccctgaaaacgataaccattagatcgttgtgaattacatgaagaacgtgggcatgagcgtgcgcaatacactagtgttgggaccatgcttcgtcgccgaaggtcctgcaaaaagaaacagcttcggctgaagctgcttgaacatgatgccgaagacaccgttcacgaagcttcggagctacaacatatccgaagacgaagggtcgaaccgacttaaagatagaatgaccatttagcccataagggtctgagtcattgttgtaaacttttatgaggggcataattgtaattcctcatgagttgtgtcctgtgcctataaatagtgaacagtattcctttactgttcacggattcctgtaattgccaacgcatcactcgggaattattgtttgtcaaggcaaaggtataaatgtacctaaacattgtgttcagatattcaaaattcatttaacaagatatgtgaatgatgtcgtttattttca

SEQ ID NO: 2924 - DNA, 3758 bp, Zea Mays
cccggaggtccccccaatgtcggacggacgacgggttcacccacaccccctgctggcggatcccccccctcgcctgcctgcccgcgcgccaagaactccattcacctccccccacactgccaggagcttcgcccggcccccgggtgccggacggccaccaggttcacccgtgcctgctgccggcggattcccccctcccccggtggctaggagctccatctgtgttgtcgtcgtgtgctgctgggcgtctcccccaatggcgttacagcatgggcattagagaactctatgacggatggggagctactctggcgcgcgtcgttcaccccggcggtacctattctgacgcgtatggaaggttgccttcatgttcctcacgcaagggcaggtgccgctcagggggtgcctcactactacatctacgtccacgcgctatcggccaatttcaccttcgaatcaatcttctcccaacgccaaatacctagtaaggcaaggccacatctctatcatatatgaaagttggttctgtctatcatacactttcgttatgaaaatgtgtgtagctttcaaaaaagcccttcacgggcctgataaatcaaggattgattttatgagagaaataggtgccacaaatttctaccagaatttctacatattcatgaatgattttattgttgctaatgaatattgtaatagattgagtatactgcaatagagacaatgaaggcagatgggtttttgcagactcagactcaagtttgattgattgctatttgctaccaacaaaaaataggtctcgacaagaaagttttattgtacttcagatttgtatatatgatcaacatctctgtgtgcagtatgcttgagaatagctttaaggctgagtaacaaggtttgaagaaagttatttcattttttttctgaacatatattgtttgattcgtaatttagtttacatggtatgacatcatttatttttggtttaaactttagagtatatatgctaattgtatgctctagatcagtttaaaaaggatgcagatgtctagtcgtaataggccaatctacaaactttcatagcctgaagtttatgaacagtgaatacacatcggttctaacttctgtgtttgtaaagatgctaaaagtattctcgctctattaatgtcttcttaggtaaaatagatttgatttacatgtgccagtattttggaagcataatagacactgagcttcaaacgtttggtcaggttcatcatttttaatgcaccaacaccaatgagccccttctcagcacaatgaaattgtttacatgtatgcatttttttcttgctattgttatgaaaaaagcattatttctgaaatattgacttccaatttatgaaatattgatttccaatttctgatagtatcttcagggccagtctacaaactttcacagcctgaagtttatgaacagttaatacacatcggttctaacttctgtgtttgtaaggatgctaaaagtactcagactctgttaatgtcttcttagataaaatagatttgatttataagtgccagtattttgggagcataatagacactaagcttcaaacgtttggtcaggttcatcatttttaatgcagcaacaccaatgagccccttctcagcacaatgacattgtttacatgtatgcatttttttcttgctattgttatgaagaagctttatttctgaaatattgatttccaatttatgaaatattgattttaatttctgatagtacctttggtgcatttcttaacttctttattccagccttgggatactgtataatcttaccaaatgaacatagataggtctatgtttggtttatgttcattactgtcatttttctgttgtgtgctctgacaaggtggacttaacacaccctaatctactatgacaaacagagcagggcctgctgtagccaatgagttggatacagtggacacaatcacatcaattttgcggttcaattactttgcaaaaggttgtatatgcagcctctcttttgtagtcaactcttttataatggctaaacctagaatttcttttacgcaaactcgacatgatccaaatcagttgctcccagtcaggagctgatttgagtctagcgccaaatcacctcaaacttttatagcccaatttgtctctctgtgttggcatcatgagccatccgtcccattcagcttgatagcaggttatgacacagccaggcagaaacctggaaggattacccaggtctaaattggaccattgcatcagcacacatctcttgctctcgccctattttagatatattgttattttgttctcacacattcgtgctttgctccttgttttgcagttatgcatatatctaataaaagtggaaggataccatatgccacttttttctaatataagataacccttcatatttcatttttctcttaatgtaggacaactagatttatatactctccatagtagctgctcttgacagaaaagaaagcaacagaagtgccattcatacatgtcaaaagattaatttgcagcaataaattataattccacaggtctgaattgtgtgtacatacatacatgtaaaaaaataatttgcaaggacaggtaataattccacatgtccgacttggtgggttacacatcctactatccccttgtttgttttttaaataatctggtcggatgacaattctactatttgcttctatattttctccaaatctccccttctcttgttctgttacagcttgttaatatcacttgctgcagacaaagtacgtcaaaaggcaacgtctaagtaatatgttgatacacaaagcactgatccttagagacttcatccaacgagatagaaggttacatgtgcgttgttactatctcacgccaactcagacctctactggataacgttgcacaccatgcgactagacagacactaaatttggaattttttgtgtcatggagatacaaattaaaagccagttgcgagcaacatatgggttgttctcgtgaaggaagttgaacacctcgtccaacagctgcaacagaaaagctcaaggtcaaatttcaaaaaaaggcacaacacatgtttgcatattcccgtgctctaaaagaatacagaggacgatgaccaatatagaagttatcttaacaatgacagactgtcatcaccacctaaaaagtatgtggcacaaagcacatataggatcaaggctagccaacttcacaaacttcaatcagattttactgaccctgaaaacgataaccattagatcgttgtgaattacatgaagaacgtgggcatgagcgtgcgcaatacactagtgttgggaccatgcttcgtcgccgaaggtcctgcaaaaagaaacagcttcggctgaagctgcttgaacatgatgccgaagacaccgttcacgaagcttcggagctacaacatatccgaagacgaagggtcgaaccgacttaaagatagaatgaccatttagcccataagggtctgagtcattgttgtaaacttttatgaggggcataattgtaattcctcatgagttgtgtcctgtgcctataaatagtgaacagtattcctttactgttcacggattcctgtaattgccaacgcatcactcgggaattattgtttgtcaaggcaaaggtataaatgtacctaaacattgtgttcagatattcaaaattcatttaacaagatatgtgaatgatgtcgtttattttca

SEQ ID NO: 2925 - DNA, 3584 bp, Zea Mays
aaactcccgtttggaaaagctctcgtcgtctcgcaccttgagctccgattggaacagacgttgtgacttcatttagaagcatcaagctttagtatcgggcctgccacacccaccgtactccgatccatggcggcacctgggaatgaaggcgtcagcaataacacggacagtacacagatcgggaggtagaactcacgagtcacgagggagctggcggcaaactcccctccatagctgtatccatcggctggtgaaggtcaaaacactttgccgagaaggtagaaggatggggaggaagaactcaccggacctctctgcactctgcagtgagcaggacatggagtcggcgtccatatgagcggtaatggtggtgacggtgctttttcaatcgggagttttgggccgtgtctcgttgctaagcccatggcattgtttccaaagaagtgaagcccatggcatctgcattgcagttgcagccacgccaacaactgggcagcggcgacatctgcatctcccacctcgtctccctcccgtatctgcaagccttgatcccgccgccagccatccatccaagggagccatgtctccatccggcgagctgctggcttccatctcctccgtcttcactgtcgccttcgtcctcctcgcctgcgtcgagctcggcgacgccgccgccgccgccgtcggcgtctaccgcctcatccagtacgacctcgccggcgctccgctcggctcccgcgccgcggtcctcaaccaccacgctgccgcgctcccgctccccgccggcgcagacctctcccgctccgccctcgtcgcgccgctcctcgacctcccgctctctttcctcagagagtacctggtggagaaaaaacatctggggggattactcattctgctcccgacaaataatgacagtgtggatgacaaggggcaattcaaaggtgtactgactgagctggagaagttgcttctgcatgaacaagttccatatccagtgtactttgctttgcatgacgacaatcttgataacctgctggcagatatccatagaattgcctccacaggtcaaccagcctctgcaacaacaggaggggatggttacctggatttaaaggagagggtgatagcgaacagcttccgactattgccatagttgcaaactatgacaccttcggtgctgtacctgcactttctgtgggaagcgacagcaatggaagtggagttgtggctcttctagagattgcgagactattttcacgtctgtattcaaatcctaagacaaggggcaagtacaatattctctttgggttaacatctggtggaccctacaattacaatggaactagcaagtggcttaggagttttgatcagcgtgtacgcgagagcattgactacgcaatttgcttgaacaatgttggttcctggggcaatgacctctggatgcatgtatcaaagcctccagaaaatccctatatcaagcaaatctttaaagaattttcagatgtttctaaagaaatgggtgtttcagttggaatcaagcacaagaagattaatgtctcaaatcccagagtagcatgggaacacgaacagttctcaaggtttagggtgactgcacttactctttcagaaatgtctacccctcctgattttttggaaagcactggcggtcttcatgacactagagaatctacagatgctgagtcagtaatccgagctgccagattagtttctgagagtcttgcgagacgcatctatggactgaagggaaggaacatagatgtttttgcagagaatagcagcttagccattaatcctcactatatccggtcctggttggatctgttgtcacggacaccacgggttgcaccttttctgcagaaaaatgaccccttcatagcagcactggaaaaggaactgtctgcacacactactgatgtgcgtgttcaaagtgatgcgcttgatggcatgttcactttctatgatgcgacgaaagcaactctaaatgtctaccaggttgcaggtgttacttttgatctgctgttccttctggtgctcggctcctacctgattgttctcttctgtttcctagtgattactacacggggtgttgatgatctcattaacatattccggcggcctccatcacgcaaactcaagggtgcataggctaggctgtgttttgtgtattagcgccagccaagagaccgcatgcctagtagtcattagaagaagagatagagatgaggatgacaggcaggcaggcaggctagcttgcttcccacagcacatagacaaacattttttttcctttttgtgtcaggaatttcgactgtaatttagctgtattttggttacaattctggcttattcggggtggactggtggcggtgtctgatgagagacagagaagcacacaccaccacgccgcctctgaactttggatgctgagaaattcttgtctgaaacacaaacactgaaggcctgccgtgcctgtgtttacttgttgtctgaaatataaaaaataatagagaagaggaatataaagtcaaagcgaaacgaagcacctaccttgcaggatgagatactggaacatggagataggccaagaagatcgtgattgaatttcagtcccttgattttagatcggacggccgatagatagatagtaggatggataaggcagtgagtgatccagggccaatgggccatccaacaaagagtcagccgagtctgctctgctgctccatcggatctcccgcgcgccaaaccatgccgacgcagcaagcatgttctgctgcggcagcattgagatcgcggcggccttcccctgcatccacgacgacgacctcccggcagctgcggctgcgtccgcctcgtgccgccaccgcgggcgtgcggctgacggtgtcggacgcggagctggagtcccgcgggttcgctgtgcggcgcacggcggagggcatcgacgtggcggcgctgaacgaggtgttcgtgcgcgtgggcttcccgcggcgtcaggaggagcggctgcggcgcgcgctggagcacagccgtgtggtgtggctgtcggccggggaggaggaagggcggcccgtggcgttcgcgcgcgcggccggggacggcgtgttcaacgccgtggtgtgggacgtggtggtggagccgtcgagccagggcctcgggctgggacgcgccgtcatggagcgcctcgtcgacgagctgcggcgcgacggcgtggccaacatcgtgctctacgccgagacgcgcgtggtggggttctaccgcctgctggacttcgccatggaccccgacggcatcagggggatggcatactaccgcaagtccactactaccgccgcttgattcgtctcgtctgtcttgaactcattcatcaatgaaggaagtcgatcgaattccctaaagccccccatgtttgtatgatgtagatatgacatggtttatttttatcactcatctcatagttgctcgtttattacctttcattttatattccgcgaaaacgatctagctagaacatgtacttatatttcccgcaaatcaagcaatataaaaacctcacttctttc

SEQ ID NO: 2926 - DNA, 1366 bp, Zea Mays
tatctcccctccagacctccacacgccgcgatggcctccgccgaaatccccaactccagccctgatgccaccaaccccgccgccgccgccgccaccgccaccgccactgccaccggccccgacatctcctcttcgccgccactcccgccgcggaagcgccgcctttcgccttcctcatctcccacgcgctccgcgtcacgctctcggtcgccccgctcccgctccccgcgcggccgccgctcccgctcccgcagccggagccggagccggagccgcagccgcagcccgcagtacccgcccgacggcaagcggcagcggcacaacgaccttaccgtggaggcgtgccgcgacttcctgcgcgataggtgcacccgctccgacctcgagtgcagatacgcgcaccctcacaactcagcttccgtcgaccggcaattgctgagatcaattggtatggaagatccaaatgtgaagacgatctgcagagattttacacgtgggaagtgttcaaggtcagcaaatgagtgccgattcttgcaccattcatctgttgaagatgctgcaattgtttgccaagattttttgcgtggacaatgcaatcgcatagcatgtaggtactctcatgtagtagcacatccggtgccaccaatgagccatgttcctatgccataccctgagatgctttacatgccaccaccaccaccaccacctcttggagtaccaatgatggggcctccgccttcaccatttgctgataataagaacagggttgaagtttgtagggacttcttgaagaacatgtgcaatagagaatcctgccggtttttacaccctgggacacatacagcggctgcgagcgccaatgttgaagtatgccgtgattttaaacgaggagaatgcaatcgacctgcctgtcgctttttgcatccatatacaagttgaagttttctgttagctaaacttgagtgctctgcccaccgccgccgctactgctgtgctgctgctgctgccgccgccgccgccgccgctgctgcgccaccaccacccattctgcttctgccaccaaagagctgctgcgctggctgttgcgtcgctaaggtgccatagagcaaggaagccatagaaggcgctatgtatgcatcgaataaaagattctaatatcctgggatattcagatggttgcttgaacttgctttactcaatgcttgagcagtgcccccttcactataggggctgtgtgtggttttgtatttgttgtcataaaagatattttttgactctagctaatttgatgtctacgctattgccttccccttagcatcacactttattgtttgtataagttattgagcaaatgtttcgccacggc

SEQ ID NO: 2927 - DNA, 1382 bp, Zea Mays
caggacatacacatgtggcagaagcgctaaaagtaccaattcatatactgtttaccatgccatggacgccaactagtaaatttcctcatcccttttctcgtgtgaagcagcctgctggatatagactttcatatcaaattgtggactcgatgatttggcttggaataagggatatgataaatgagttcagaaagaaaaagttgaagctgcgtccagtaacatatctaagtggttctcagggttctggcaatgacatccctcatggatacatttggagtcctcatctagtcccgaaaccaaaagattggggtccaaagatcgatgttgttggattttgcttccttgatcttgcttccaattacgtgcctcctgaaccacttgtgaaatggcttcaagctggtgacaagcccatatatgttggttttggtagccttccagttcaagacccacaaaagatgactgaaattattgtcaaagcgctggaaattactggacagagaggtatcattaacaaaggctggggtggccttggaacctaaccaaaagattttgtatatctactagacaactgccctcatgactggctttttctgcaatgcaaagcagtggtgcatcatggtggcgctggaacaacagccgcaggtctcaaagcagcgtgtcctacgactattgtacctttctttggtgaccaacctttctggggcgaccgggtgcatgcaagagggctagggcctccgcctattccagttgatcagtttggtttgcagaagttggtggatgctataaagttcatgacgaaaccagtggtgaaagacaaggctgtagaggtggcgaaagccatggaatctgaagacggggtgacaggtgccgtcagggcattcctcagacacctgccttcgaaaaccgaggaaccgagcccaccgcaaccgtcaggctttcttgaattcttcttaggcccactaagtaaatgtttgggatgctcttagtgcagaacgcaatctgtcacggattggcgccttggcggcataccacaagagtttgccgtgatatcccatgcaaagaagctctggctcttcttttctttgtttccttttcctttcctgcgggtatttgtagtgtgcaaagagtggttgcttgtggtgtgcatggtctgcagcggatggcctgcgccctgtggtgcgtgtcattttgatgtttgccgtggagcaggcgacgatttcacgtccaacccgtacgttctgtatatttatgaaagaaagaaacagaggctaggttttccttgttctaatatggttaccgctaaatagctgatagcggctttgtaatggaaagtgagcgctatagcggacattgggttttaatagcagaatattaaaaataga

SEQ ID NO: 2928 - DNA, 1384 bp, Zea Mays
aggacatacacatgtggcagaagcgctaaaagtaccaattcatatactgtttaccatgccatggacgccaactagtaaatttcctcatcccttttctcgtgtgaagcagcctgctggatatagactttcatatcaaattgtggactcgatgatttggcttggaataagggatatgataaatgagttcagaaagaaaaagttgaagctgcgtccagtaacatatctaagtggttctcagggttctggcaatgacatccctcatggatacatttggagtcctcatctagtcccgaaaccaaaagattggggtccaaagatcgatgttgttggattttgcttccttgatcttgcttccaattacgtgcctcctgaaccacttgtgaaatggcttcaagctggtgacaagcccatatatgttggttttggtagccttccagttcaagacccacaaaagatgactgaaattattgtcaaagcgctggaaattactggacagagaggtatcattaacaaaggctggggtggccttggaaccttggcagaaccaaaagattttgtatatctactagacaactgccctcatgactggctttttctgcaatgcaaagcagtgcatcatggtggcgctggaacaacagccgcaggtctcaaagcagcgtgtcctacgactattgtacctttctttggtgaccaacctttctggggcgaccgggtgcatgcaagagggctagggcctccgcctattccagttgatcagtttggtttgcagaagttggtggatgctataaagttcatgacgaaaccagtggtgaaagacaaggctgtagaggtggcgaaagccatggaatctgaagacggggtgacaggtgccgtcagggcattcctcagacacctgccttcgaaaaccgaggaaccgagcccaccgcaaccgtcaggctttcttgaattcttcttaggcccactaagtaaatgtttgggatgctcttagtgcagaacgcaatctgtcacggattggcgccttggcggcataccacaagagtttgccgtgatatcccatgcaaagaagctctggctcttcttttctttgtttccttttcctttcctgcgggtatttgtagtgtgcaaagagtggttgcttgtggtgtgcatggtctgcagcggatggcctgcgccctgtggtgcgtgtcattttgatgtttgccgtggagcaggcgacgatttcacgtccaacccgtacgttctgtatatttatgaaagaaagaaacagaggctaggttttccttgttctaatatggttaccgctaaatagctgatagcggctttgtaatggaaagtgagcgctatagcggacattgggttttaatagcagaatattaaaaataga

SEQ ID NO: 2929 - DNA, 1845 bp, Zea Mays
cgtacaaattctcagtatactcaaagtattggacgcccagcccagcccaccagaagaggacaaaccagattcgattcctcctcctgtcctccatctccccaattcgcacggccatcggaccatggattccggcgtgcctgcctctgcgcctgcccctcccaaacacaagacatgccggaagtgcaaggcgagctatgacccctcggccaacacgcgcctctcctgcaggttccacccttccttcttcgtctgccgccgccacgacgaccagaagaggtactacgagctccgcgacggcgatcctccctacgccgccaagttctacgactgctgcggcgccgaggaccccgacgctccgggctgcaccactgacttgcaccgttcctacgacgacgcccaagactagcaaacctttgctgcttccacaggcctcatcttaatctcaaggacttcaagggaaggtggtgcatcacttttaacagcaagggcacgtgggtatagatctgatcggcgcgatttttttctttctttctttccggacagcggcaccgcaccgggagggcgtcctcgccgacgtgccgccgtccaacaagctggtcttcatcctggcggggcagtccaacatggccggccgcggcggggtggtggcgaaccgctgggacggcgtggtgccgggcgactgcgcgccgtcccccgcggtgctgcgtctctcgcccgacctgcgctgggaggaggcgcgggagccgctgcacgccggcatcgacgccgccaaccacgccgtcggggtgggccccgggatggcgttcgccaacgcgctgctgcgctcgggccgcgcggggggcgccgtggtagggctcgtcccctgcgccgtgggaggcacgcggatggcagagtggggcaggggcaccgagctctacgccgagatgctgcgccgggccagggtcgccgtcgagacggggggccgcatcggtgcgctgttgtggtaccagggggagagtgacaccgtccgctggtccgacgccaccgagtacggccgccggatggggatgctcgtccgtgatctccgcgccgatcttggcatcccgcacctcctcgtcatccaggttggtgtgtgtgtgtgtgtgtggtaggagtagttagttctttcccgttctcacaagcaatcaagcaagcaagcaacctcaattcagtaccactgtactgtactggacggcttttattttgcattgtcaagcgagcggcacctggttcgggcatcttccgctaccatgaaggcatgaacaaaccaaccatattcaccaattcctttcttttgtctttctttcttcatccaggtcgggttagcatcgggcctaggacagtatactcaagtcgtgagagacgctcagaaagggatcaaacttcgcaacgtcagattcgttgatgcgatggggttgccattgcaagacggccatctgcatctaagcacccaagctcaagtccagcttgggcgtatgttggctcagtcctatctaaattatggacatgcacactctccaacccctaaaccatggtggctgcaaatcgttttggtattttgcttcatttttgtttgaaacggagcatgcaaatcgttcaggtgagcagaagaagaagaagaaacccaaatgagtttaacataggcatccaggacttattctgtcaatcaataagtctcattgtctgactagttgtaatgtaaaaggagaacacagagagtagtcgacagtcttgataagcatttgaaatttgcctaactttggagttggtcagaattcaatcagatagatatacatatggaatctcttttagaggggcattgctacc

SEQ ID NO: 2930 - DNA, 2224 bp, Zea Mays
aatagccaatatgttcagatgtctattcccgttcagcttgtagcagcttcctagtcctagggttagatttccaagcaccacgccacccgtacacggtttccagcagagcattccggaaggagggggcgcgatgtggcacgaggcgcggcggtcggagcggaaggtccacgacctcatggacgcggcccgccgccgggcgcagcgccgagccgtctacctcgcccgccgccgcggcgacccgcagcaggcgctccaggtctccggcacgcggtgccgcgttcaccgcgacgacgccctgtaccaggccaccgaggaccagcagggattgatacaatggaatggaaagcaagatgttttgattgacagatttgatggccgtgcattgcttgattttatccgagactcgagctctcgcccttttcgagtccaagggaaatctgaagaagaggaagagttagaggaatttgttaattttgaacgttaccgggatttgattaagcatcgtcgcagaggatgtcgtttctgatgaggccggtttgcagcatgttgtgcaagagttggaggcaaaagctcttcttccttttagctttgacaaaccacaatcctcacagcctcctgctagcaaaggcgcatattcacaggttggatactcatacaagggagacggaaatgaggaatctgaagacctagacagtgatgacgacgacgaagaggaagaagttgatgatgatgacaaggacttcagtagtgatgatagcagtgatgaacgaatggaaagtatagcgaaagaatttgggataaaaagatataactggcttgtttacatggataaaaaaaacaaagaacaggagaagaggcagaaagaaattgttaaaggcgacccatctataaaaaaaatgagccgtagagaaagaaggaaggcttctcagattgagcgggaaaaggagcgggaggcagcacgttctgttggaagggtatcttatcgtgatccttatagggaacaaaggagaagcccatcatatgaagcatattcaaggggcagaagatcaagatcgagatcaagatctcgttcaccatcccattctaggcgtcatggccgtgggatacatgctgaaagcaattattggagcaagcaaaaggctcctagggttgaatatattactgaatttggaggttccgatgataccagtgaaccaaaagtttcagggatctctccgccttcgtctccaatacgaattgacatacctaaccggtcgggaaactcgacttttaatatttgcaaatatacattgggcgaacttttctctgatggagcttattacctcaatcctggtgttctgaagatgactatgtcaggaataggatagatcaagacatggtcatgatggtatctatggtgtaaaaaatagttgttttgtagataggcatgcattttatggttcgttttatttttgctaagcaggaagaagatttaacacacatatatctacagtcagctgtggagtttatgacctgtgcatctttgccatgtaaattattatggctataataccccatattttgcaggttgtctggtggtcaaattcttgaggcacttcacagtgatcctgcctcttctttgtctgtggaacaggaaagaactgcaaaacttttgaaaccttcccccagtacatcatcagcattagctaaactaagcaaggttgcttctgggggaactggtaaaactccccagactgaaaagaaagaaacaccacaagaaagacttaagaggataatgagcaaacagcttaacaagcaaattaaaaaggacacggctgctgagattgccaagaaacgagaacaggaacgacaaaggcaggaaaaacttgctgaagttggtcgatacaagcgtcgtagccgcagtagaagtcttagccgttccccaccaagaaggcggcgatatagcagaagccgtagtaggagcagaagcccaagaaggtaccgatcccgctcgctctccagttcccggtcgccctctcgctctccaagcgatgtgtactcatgagaagcctccgtttttgttttcttagtcctattatcgacagtgtgtgttccttgtgtttcagaaggtttattctctgttcctcatggcttgcccctttcaagcaagcgtaattttagggcatgtttggccagaccagcttccaggccgaatttagtagtattgccaagcagttcttttatt

SEQ ID NO: 2931 - DNA, 1229 bp, Zea Mays
accaaatagccctcgagaaccctatgctgctgtagccaagcagatgcccgctagtccctcgctttctctcttccacccgctcctcacgccgccacagcgccactgctccttcggcctagttgaggagagatacatccatcctggcctggattggctggtgctggtccttctgctgaatggcagaatttgttctatggactttcacagcaaggctaccaactatctcgtgacagctagcgatgatgaatcaatccgtttatacgatacccaagatgcagtcaaaaaatatggggttggacttgtgtgcttcactgataacccatctattgtcttatattcatcgaacaatggctgggatgaatctctgcgtctgctctcaatgaatgataaccggtttattagatattataaaggtcaccttgatagggttgtctgcatcgcactttgctctggaaaagaaaactttctctcatgttcgcttgatcgtaccattctcttatgggaccatcgggctgaaaaaccgcagggcttactgcgcgcgcaaaggaggcctacagtttcgtacgacgcccagggcatggtatttgctgtcgcctatggtggccgcataaagatgtttgatattcggaaattcggaatggggccttttgcgaccttctctgtcggcactgatgattcggaagcccatgtcgtacagttcagcggtgatggcaggcggattctgttaaccactaaagctgggcgtgttcatgtgctagattcttttgaaggcaacagcattgcatcgtttcgcgcgaagccaatattaaccaattcgacactggaggcatcgttctgtcccgagggaaaccatatcgtatctggctccggtgatggtagtgtctatgcttggaacgttgagagcggaaaggttgcatgctgggaaagcacagatgtgaaaccgccgcgggtaaggtggtctccaggatccttgatgttcgtgacaggaacgtcggagctgtcctgctgggtgccggatttgtccaagctggagtccttcaccatcagccacaccaacaccaggtccagctcgtccctgtaggcttggaccgatttgcatgccgtgtggccggttgacgcgaaggaggaacaagaaagcatagcggagcatcttgtaccaattgagtttgtgatctgttcctgatggcccggtaagctactattgcaacgattgtggtctgcggcaacgg

SEQ ID NO: 2932 - DNA, 1352 bp, Zea Mays
accaaactagaaaaacaattgcgtggagaaaaggaagggccatgaaaagcacggctcaggaaaaacaacggcggacagcccgcctccaccgccgtggcgccgttcaccccgccccgcgttctctctccctcggcgacggctcgacgaccgccgcgccgccctacgctccagcctccatgtgcttcgcggggcccttcgccgtcgactaacacaccaccaccaccattcggccggcacctggcccaagggttgagcatggagatcacgaacgagatgcttaagagactgccgagactacaatggcagaatttgttctatggactttcacagcaaggctaccaactatctcgtgacagctagcgatgatgaatcaatccgtttatacgatacccaagatgcagtcaaaaaatatggggttggacttgtgtgcttcactgataacccatctattgtcttatattcatcgaacaatggctgggatgaatctctgcgtctgctctcaatgaatgataaccggtttattagatattataaaggtcaccttgatagggttgtctgcatcgcactttgctctggaaaagaaaactttctctcatgttcgcttgatcgtaccattctcttatgggaccatcgggctgaaaaaccgcagggcttactgcgcgcgcaaaggaggcctacagtttcgtacgacgcccagggcatggtatttgctgtcgcctatggtggccgcataaagatgtttgatattcggaaattcggaatggggccttttgcgaccttctctgtcggcactgatgattcggaagcccatgtcgtacagttcagcggtgatggcaggcggattctgttaaccactaaagctgggcgtgttcatgtgctagattcttttgaaggcaacagcattgcatcgtttcgcgcgaagccaatattaaccaattcgacactggaggcatcgttctgtcccgagggaaaccatatcgtatctggctccggtgatggtagtgtctatgcttggaacgttgagagcggaaaggttgcatgctgggaaagcacagatgtgaaaccgccgcgggtaaggtggtctccaggatccttgatgttcgtgacaggaacgtcggagctgtcctgctgggtgccggatttgtccaagctggagtccttcaccatcagccacaccaacaccaggtccagctcgtccctgtaggcttggaccgatttgcatgccgtgtggccggttgacgcgaaggaggaacaagaaagcatagcggagcatcttgtaccaattgagtttgtgatctgttcctgatggcccggtaagctactattgcaacgattgtggtctgcggcaacgg

SEQ ID NO: 2933 - DNA, 1523 bp, Zea Mays
accaaactagaaaaacaattgcgtggagaaaaggaagggccatgaaaagcacggctcaggaaaaacaacggcggacagcccgcctccaccgccgtggcgccgttcaccccgccccgcgttctctctccctcggcgacggctcgacgaccgccgcgccgccctacgctccagcctccatgtgcttcgcggggcccttcgccgtcgactaacacaccaccaccaccatgtacgaccgccccatctcttcccttcctgctctacgaagcctagcaccaaaccctaactgtttgttttattcggatttgttccaaactacaaatgtggtgtatgtagtattgtgtccactaactttgctctctttttttttccctttttctttttgcaaaaaaacatcgggtgtacatgtgttcacccgtgccgtttactgggtcggcagtcggccggcacctggcccaagggttgagcatggagatcacgaacgagatgcttaagagactgccgagactacaatggcagaatttgttctatggactttcacagcaaggctaccaactatctcgtgacagctagcgatgatgaatcaatccgtttatacgatacccaagatgcagtgtgtttgaatactattaatagcaaaaaatatggggttggacttgtgtgcttcactgataacccatctattgtcttatattcatcgaacaatggctgggatgaatctctgcgtctgctctcaatgaatgataaccggtttattagatattataaaggtcaccttgatagggttgtctgcatcgcactttgctctggaaaagaaaactttctctcatgttcgcttgatcgtaccattctcttatgggaccatcgggctgaaaaaccgcagggcttactgcgcgcgcaaaggaggcctacagtttcgtacgacgcccagggcatggggccttttgcgaccttctctgtcggcactgatgattcggaagcccatgtcgtacagttcagcggtgatggcaggcggattctgttaaccactaaagctgggcgtgttcatgtgctagattcttttgaaggcaacagcattgcatcgtttcgcgcgaagccaatattaaccaattcgacactggaggcatcgttctgtcccgagggaaaccatatcgtatctggctccggtgatggtagtgtctatgcttggaacgttgagagcggaaaggttgcatgctgggaaagcacagatgtgaaaccgccgcgggtaaggtggtctccaggatccttgatgttcgtgacaggaacgtcggagctgtcctgctgggtgccggatttgtccaagctggagtccttcaccatcagccacaccaacaccaggtccagctcgtccctgtaggcttggaccgatttgcatgccgtgtggccggttgacgcgaaggaggaacaagaaagcatagcggagcatcttgtaccaattgagtttgtgatctgttcctgatggcccggtaagctactattgcaacgattgtggtctgcggcaacgg

SEQ ID NO: 2934 - DNA, 1590 bp, Zea Mays
accaaactagaaaaacaattgcgtggagaaaaggaagggccatgaaaagcacggctcaggaaaaacaacggcggacagcccgcctccaccgccgtggcgccgttcaccccgccccgcgttctctctccctcggcgacggctcgacgaccgccgcgccgccctacgctccagcctccatgtgcttcgcggggcccttcgccgtcgactaacacaccaccaccaccatgtacgaccgccccatctcttcccttcctgctctacgaagcctagcaccaaaccctaactgtttgttttattcggatttgttccaaactacaaatgtggtgtatgtagtattgtgtccactaactttgctctctttttttttccctttttctttttgcaaaaaaacatcgggtgtacatgtgttcacccgtgccgtttactgggtcggcagtcggccggcacctggcccaagggttgagcatggagatcacgaacgagatgcttaagagactgccgagactacaatggcagaatttgttctatggactttcacagcaaggctaccaactatctcgtgacagctagcgatgatgaatcaatccgtttatacgatacccaagatgcagtttttcaggtgtttgaatactattaatagcaaaaaatatggggttggacttgtgtgcttcactgataacccatctattgtcttatattcatcgaacaatggctgggatgaatctctgcgtctgctctcaatgaatgataaccggtttattagatattataaaggtcaccttgatagggttgtctgcatcgcactttgctctggaaaagaaaactttctctcatgttcgcttgatcgtaccattctcttatgggaccatcgggctgaaaaaccgcagggcttactgcgcgcgcaaaggaggcctacagtttcgtacgacgcccagggcatggtatttgctgtcgcctatggtggccgcataaagatgtttgatattcggaaattcggaatggggccttttgcgaccttctctgtcggcactgatgattcggaagcccatgtcgtacagttcagcggtgatggcaggcggattctgttaaccactaaagctgggcgtgttcatgtgctagattcttttgaaggcaacagcattgcatcgtttcgcgcgaagccaatattaaccaattcgacactggaggcatcgttctgtcccgagggaaaccatatcgtatctggctccggtgatggtagtgtctatgcttggaacgttgagagcggaaaggttgcatgctgggaaagcacagatgtgaaaccgccgcgggtaaggtggtctccaggatccttgatgttcgtgacaggaacgtcggagctgtcctgctgggtgccggatttgtccaagctggagtccttcaccatcagccacaccaacaccaggtccagctcgtccctgtaggcttggaccgatttgcatgccgtgtggccggttgacgcgaaggaggaacaagaaagcatagcggagcatcttgtaccaattgagtttgtgatctgttcctgatggcccggtaagctactattgcaacgattgtggtctgcggcaacgg

SEQ ID NO: 2935 - DNA, 673 bp, Zea Mays
ccaaggaagcttctatccactggttaggcacgttcaagcttaccttgcagtttacagaagattacccaaacaagccaccaactgttcggttcgtctctaggatgtttcatccaaacatatatgctgatggaagcatctgcttggatatcctacagaaccagtggagtcctatatatgatgttgctgcaatcttgacttctattcagtccctgctgtgtgatccaaacccgaactcccctgcaaactcagaagccgcaagactgttcagcgagaacaagcgggagtacaaccgcaaagtccgcgagattgtggagcagagctggacagccgactagtgcaggaggatgctcatcgtgcccgaaagggcacaataaggaaccatgaaaaaacatccttgtgtttgtggttcgccagacctgtcgaaacattgaagaactctagttctagtctgtcgttgtcatggttttggtctgatccagagcaccggttgctcatggtggtggctgtcgtaatgtagcggttgttgttgacatatatcttcttaaaatgatcctgcttgtgtacaaaaactatagcgtgggaatggtggttcgatggaccgatggaaccatgttcttgcattgaggtttcacaaagtctaaatggcttctttctttcttttttttattaaggt

SEQ ID NO: 2936 - DNA, 943 bp, Zea Mays
ttgcagtataccgttaagtttccggcccaacaacctttccgactggcccaaaccaactcccaagtcccatcccaaccgaggcgacgcagccgccgccggctgaacctaaacccctcgacgcagccgccgccggcgtaggggagaggggcacgggcacggcacggggacggaaatggcggaggggaacggcggcagtcgcgccgaggctggcgtccgcgagtcctccgagccctcgccgaagcgctcctcgatccccgccatgccgcacgaagaatgcgtcgagggcatccgctccgcgctcaaacatcccacggtgcggttcctgagggagcggatggagagtgccgggtgcctggtgtggccgcgcctcatccgggcggcgacctgctcctccgccggcggctacgctagccagcaagggatacaagtttgctgcaatcacatgacctgtcaagatgagataactcaggtcatgattcatgaactgatacatgcttatgatgactgtgttgccaaaaatctgaactggacgaattgtgctcaccatgcttgctctgaggaatgtgtcaaaaggcgggctctgatgtctgtgaaaaacaacccatactgctcagagggtgctgcaaaagatgcaattgatgctgtatgggatatatgctacaatgacacacgcccatttgatagagccccatgaaatattttcagaacctgggatacattagctattttgtgcacacctgcattgatattctgagccccttcagaaacttgtatttcagcaacctgtgtcagcaaagtacagaaattttctgctgtagccaaggcgtgctgcatcccgcgatgagtctgcacacactaacgatttaattcgtgtaattcaattcttttacacgatatcccgacaaagtttaataaattataaacgtaaagtttgttggtggcg

SEQ ID NO: 2937 - DNA, 600 bp, Zea Mays
aaccaaacgctaatttattagctctactagaggagcccacagccgtttttcccgtccacagccctcagcccaccacaaacgcgcctccgtaccatccgtcgccgccggcgcaccgcgatggctgcctccgccacggccgcgaggcctctcgccgggaccgccgtcccgctcccgctctcgacgcggacgcggcctgccagggtcgccttgctctccctgattcctcctgctccggcccagcgccttgctctcaggcgtggcgcgtggctctcacccccggagcgcagccggtcggtgcggtgcctggcggctatgagcccggagatgcgggcaacgctggacaaggtcgtaggatccagcaaggtggtgctgttcatgaagggcaccaaggacttcccgcagtgcggcttctcccacaccgtcgtgcagatcctgcgctcgctcgacgtgcccttcgagacgctcgacgtgctcgccaacgaggcgctccggcaggggctcaaggagtactccagctggcccaccttcccgcagctctacatcgacggcgagttcttcggtggatgtgacatcaccgttggcttccaaagtccactgatc

SEQ ID NO: 2938 - DNA, 1343 bp, Zea Mays
gtccaacgcagccaggatgcgacaatgcgaggcaggctgcttcatgcgtgaaaccaatcgtttcttcggcccggcacatgcaagcagccatgggcgagaaagaataggaccgccgccgccgctttgtccctccgttcacaaccttgtcgcacgagtctcttattcgtgacgaggatgacatcaacatgtgcggcaagggtaccgtctctgcggtgggcgccacaacgtggctgggtgggttcgtgggtttcagtacgcccagcgaaatgcaggacatcgggaggacatgccgttgtgtgcgctgctgttagcttcagaccatgcattgacattcacaagggaaaagttaaacagattgttggctctactcttcgggatttagcaaatgatagcatggaacttgtgacaaactttgaatcagacaaatctcctgcagaatttgctaaattttataaagcagatgaacttctaggaggacatgttataatgcttggcgcaaatccttcaagccaggctgctgcactggaggcactacgtgcatatcctgtatgtgtttagtgatggcaagatgaacactgaaaggttaagaaaacttgtcgagctggttgggaaacagaggctcgtgctggacctcagttgtcgaaaaaaggatggccgatataccattgtaactgacaggtggcaaaagttcagtgatgtgtttgtggatgaaccaacattagaatatctcgctgcctttgcagatgagtttttggttcatggtgttgatgtggagggcaaaaggttaggaattgatgaggaacttgtggaactattggggcactattcaccaatcccagtcacttatgctgggggtgtgtcaacaatggacgacctagagaggataaagaaagcaggcaaaagtcgggtagatgtaacaattgggagtgctctagatatatttggaggagatttgccttacaaagatgttgtcctttggcacaggaagcaaagtatggttggtcaagtgtgaagaaacacaagatcctctatctcatctcctatttcaaactattttgcgtcccctattttacactacactggagacagtcttcagtgatgtaattcaaatctgaggagcatgacttgtttgggtttggacaccagggttggcgctaactcaaaaggtggtcaatttgtgagtaatgtactgttcttgacagtttctgacctcgatttgtctattgtaactgaataggctgaattgatgctgatagatacattttgcctgctacaacactgacattctgatttttaagttcctcgtttgagaaaataataatattgatgcaaattttggctct

SEQ ID NO: 2939 - DNA, 4055 bp, Zea Mays
tgcagctacgtgagacatgccatactgataccacacattggcgtattttggcagcaactccccgcgcgcagctttcttaaaccccgaaaaccaaaaataaaaatccccctttcttctcccccgactcccctcttccttctttctcgtccgatcagagtcacttccacctagccgccgccgccgccgccgctaccagagtcaccgcggccgctgcttctagggctgcgccttctcgcgcctccggagccttccctgctccccgcgatccccgctgccccccatccccacccccacaagcttccttgacctgctcactccaaacgctgccgccatggcggagaagctcagggatctgagtcagccgatagacgtgacgctgctcgatgccacagtcgccgccttttacggcactggatctaaagaggagaggagcgccgctgatcagatactacgtgatctacaaaataatccagacatgtggctacaagttgtacatattctgcagaattcccagaatctcaacaccaagttctttgcactacaagtacttgaaagtgttatcaagtacaggtggaatgcattgcctgttgaacaacgtgatggcataaagaattacatatccgatgttattgtgcagctttctagcaatgaagttacctttcggcaggagaggctttacgtcaataaactcaatattattttggtgcaggtcctgaaacatgagtggcctgccagatggtcatccttcgtacctgatcttgttgcagctgcaaagagtagtgaaactatatgtgaaaattgcatggctatattgaagcttctaagtgaagaaatttttgacttctcaagaggtgaaatgacacaacaaaagatcaaagaactgaagtcttcacttaatagtgaattccggctcattcatgagctatgcttgtatgtcttatctgcaacgcaaaggccacagctcatccgtgctacattggcgacactccatgctttcttatcatggatcccaattggattcatttttgagtcaccgttgctggagacattactgaagttcttccctatggctgcttatcagaatcttacacttcaatgcctaacagaggttgcagcacttcagtttggtgatttttataacgtgcagtatgtgaagatgtatacatttttcatgattcagttgcaggctattcttcctcctgaaaaaatcccagatgcatatgctaatggttccactgaagagcaggcatttatacaaaatctcgcactcttcttcacatccttttttaagaatcacatgcgtatactggaaacaactcaagaaaacagtgctgctttgcttatgggtctcgagtaccttattggaatttcatatgttgatgatacagaggtttttaaggtctgcttggattactggaatgtatttgtcttagagctatttgaagcacacaatgaaatggaacctgcagcagccgtaagcatgatggggcttcagacgcgaatggttcctggaatggtagatgggactgtcactgctgttcatcagaggagacaactttactccgcttcactctcaaaactgcggatgctgatgatttgtcgaatggcaaagcctgaggaagtacttattgttgaagacgaaaatggcaatattgtacgtgagacaatgaaagacaacgatgttcttgttcagtacaagatcatgagggaaacactgatctatttatctcatcttgatcacgaggatacagagcaacagatgttgaagaaactaagcaagcaattaaatggagaagactggagttggaataaccttaatactctctgttgggctattggatcaatatcagggtctatggtagaggagcaggagaatagatttctggttatggttattcgtgatttgctaaacctatgtgaaatcacaaagggaaaggacaataaagctgtgattgcaagtaacatcatgtatgttgttggtcagtatccaagatttctcagggcccattggaagtttttgaaaactgtggtcaacaaattgtttgagttcatgcatgagatgcatcctggagttcaggatatggcatgtgataccttcctgaaaattgttcaaaaatgcaagcgcaagtttgtgacacaacaggtgggcgagaatgaaccatttgtttctgagcttctgtccaaccttgctacaacaatcgcggatcttgagccacatcagatccatacattttacgaatcagttggccatatgattcaagctgaatctgacaacactaagagagatgaatatctcaagagattgatgagccttcctaatcagaagtgggcagaaataattggacaggcaagccaaagcattgatatcttgaagaaccaagatgttatcagatcagttctcaacatcctacagacaaacacaagtgttgcgagctcccttggaccacacttcttcccacagatttctctaattttcttggacatgctaacagtctacagaatgtacagtgagcttgtatcaagcacgatcgctgaaggaggaccatttgcctcaaggacatcatttgtaaaactattgagatctgtcaagagggaaaccctaaagttgatcgagacttttgtggacaaggcagaagatttaccgcacttaggaaagcagtttgttccaccaatgatggatcctgtccttggtgattatgctagaaatgtacccgatgcaagggagtctgaagttctgtctttgtttgcaacaatcattaacaagtacaaaggggaaatgcttgaggatgtgcctcgtatatttgaggctgttttccagtgcactcttgagatgattactaagaactttgaagattatcctgagcaccgcctcaaatttttttctttgctccgtgcaattggcacccattgcttccaagcattaatccagctttcaagccagcaattgaagcttgtgatcgattcgattaattgggcgttcagacataccgagagaaatatcgcagagactggccttagtctattgttggaaattttgaagaactttgaggcttcaggattccaaaatcaattctacaaaacctactttttgacaattgagcaagagatttttgcagttctcacagacacattccacaaacctggtttcaagcttcatgttttggtgctccaacacttattttatgtgtaccatatcaatatacggataatgccacgtttgttcgagattacaccataaaactcttaggaacatcatttcctaacatgactgtagctgaggtgaccaagtttgtggatggccttcttagttcaaaacttgatcttccgagcttcaaaaaccatattagagatttcctggtgcagtcgaaggagttctcagctcaggataacaaggatctatacgcggaagaggctgctgcccaaagagaaagggagcgccaacgaatgcttgccattccggggctgattgcccctagcgaattgcaagacgagatgactgggaatggactagtcagttttgccgcaggggaggttcctggaaccgctgttgggtcttcagcagctgtgcttgcctggatgtgttaacagcggctcttaacattggtgcgtgtgctttgcccatggtatatcatcgtggtacagcattgtatgcttcttcagttgaagctcatagatggatccaggctgataggaaccttgatatatctgtactgtactattctcagatatctcatatatatatttttctttgcattggtgcatttctcaatgtgtagatttgctgtctcatcgacaagctgtgtatcgagaaactgttcggtatttctgccagctgtggaggcacattcgaaaacggaatagatttttttgttttttttgtgtgtctgtgtgtgtgtgtgttagggtttagggttcaataggtcgatccttactgtgttggtttgttagaaaccgcctgaataaacttagaatattcaacttagaataaacttagaataaacttgatggcttatgtaaataatctattaataaaatacatgggtttttatttaaaa

SEQ ID NO: 2940 - DNA, 1405 bp, Zea Mays
ctttctgtaaatgctttctttatttgctttcctgagacatgaacttaaaggcgctaaagttcatcctgacactctgatcggccagcaacttgacacacaattagtaaagtatgggatgcacttactggggatgagctacattcatttgaacacaagcatatagttcgggcatgtgccttctctgaggatacacaccttttactcactggaggcatggaaaagattttgcgtgtgtatgatatgaatcgtcctgatgcagctccaagagagcttgacaaatcacctggttccgtccgaactgctgcttggcttcatagtgaccaaactatattgagttcctgcactgacatgggtggagtaaggctgtgggatgttagaactggaaaaattgtccaaactcttgaaaccaaggcttctgtcactagtgcagaagtaagccaggatggcaggttcatcactactgctgatggctcaagtgtaaaattctgggacgcgaatcactttggccttgttaaaagctatgatatgccatgcaatgtggaatcggcttcacttgaacctaagtctgggagtaaatttgtcgctggaggagaagatttatgggttcatgtatttgatttcttcactggtgaagaaatagcttgtaacaaaggacatcatggtccagtccactgtgtccggtttgcaccttgtggtgaatcatacgcatcgggttcagaagatggcaccattcggatctggcagcttagcccggctaatgctgatgacaatgaggtggccaatgcaaatggcaagacaactgctggggtaaacgaagttacaaccaagatcgaaggcttccacattcccaaggaggggcagaccgaggggtaggatctcatgtgttttgtggtgcttgtggttcttattgcgaggagattgccatcagagctgcagtggtcattcagtttccctctgcggagtcatcatgtctgcgatccaagggtatcctggcttcatgagtcatcatcagcactggggaaaaacaagcaagcaaatggtggtgggtttttggatggggccctcgctttgatagaacatagcaattgtagcgtcaaaaataaacaagagttgggtagtttaggtaccgtgtttgcgttcattaaagtgaagtattctgtatcaccacagtcccctaaaaaaatacttgaggccttcatcgttggaacaccgaccttcaaagctgtagaccacttcttgatcctgaggtatcccataaggagaacatctgggatatggcacatgtttcgttttgcagcgaacatccctgctttcgcaaaagggaatcgcgtcacatgccccgccatgtgagtcaaacttggctgaacggtgaatgcatctgatcggcctttctgcgatggtttcg

SEQ ID NO: 2941 - DNA, 1743 bp, Zea Mays
cctgtccgtccccctcttccccccaccccatgtcaacggccaccgcgccgtctccgtccccgtccccttctccctcgtctggaactcgccctctgctccggatcggcgcggcccgtcgtttcgccatggcatttccgccatgggcggctctgctctttgcgggggttctggtggtggtgttggcggcggcgggagcggaagcgggaggagggagcgtctgcttcgaccggatgttcagcttcggagactcgctcacggataccggcaacttcctgctctccgtgcccgatgacttcccggaccccgcgcggaaccttccctacggccagaccttcttcggccgcccctccggccgttactccgacggccgcaacctgctcgacttcttcgcggaggcatttgggctgccgtatgtgccaccatacctaggcggcggggacttccagaatggtgcaaactttgcggtcggcggggcaactgccctcaatggctcgttcttccgtgaacgcggcgtggagcctacatggacgcctcactcccttgatgagcagatgcaatggttcaagaagcttctcacatccattgcaccgttggagacagggataaatctgttgatgagctacatgaagttgttcctaatgttgttggtgccataagctcggccatcacggatcttataaatcttggagcaaagaagttagttgttccagggaacttcccaatagggtgcgtcccattatatcttgcaatctttcagagccaaaaagaggattactatgaggaacaaacaggctgcattaagtggctcaatgattttgctgagtaccataataagatgcttcaggaggagttggagaaactcaggaatcttcaccctgatgtgaccatcatttatgctgattactatggtgctgcattgaacatattccgtgccccactccagtttggtttcacagtcccattgaatgcgtgttgtggaagtgatgccccatacaactgttccccttcaatattgtgcgggcgtcctggatctacagtgtgtcctgacccatcaaaatacatctcatgggacggcttacacttcactgaggcgagttacaaagttgtcattcaaggagtacttggggggtatgccaagcctcccctttcagaaacctgcaagggtgcggaattcaaagtttctcagcttcaccaatgtacagataatccaacaaacactgtgtcatacgatgctttgagctcttttatttgatctgctcgtaaaagaagtgcatttagagttacagtgggcagcatagatgatgttgcaggaccgaacatcttggacactttctcaaagccgagaagagatccatcgatgtagggtcattcagttctacaatctacaatccacttggctgctgggaggaggagaaaaaatgggaggggagtttgtagtgcagaaatttgcgattgcttagtgcactactttgctctgctatgtttttcttagcagcttactgctgcaggctgtagaagggacaacgaaagttgacagtctctgcaggtggtcatactactatataggaacctagatcttttaaatcagctcctgagggaaatgtatgcagtacttgatatggtctcaattgccttttaacggatacaagcatatatacattgtagcttcattgattcaaattgtctcgcttgatttataatgtaaaagtattgttcgaaataaaaaaaaatctaggatgtccg

SEQ ID NO: 2942 - DNA, 1971 bp, Zea Mays
cgcctccagcgcggcgccgacctgcctctccattatttatgcatttccgcccccacccttacctttcccaattcagccgaggaccgcaatcgcagggcactgggagcgattaaaaaaggcagcctcccccgcaagggtaaaaaacaaacaaccaccgcatcgcggcaggcaaggcatcgcccgccagccaccgagcggagggggaagcaaaagcttgataaaaaggagaggaggagacgagacgtgccgtccggacccaagcaacttcctcccaccacctcctccctcccatgcccgcatcgagatcttagcgggacagcgagaggagaggcgacgccgacgcgggcgccccctgatccctcctcgccgccgccgccgaccgaccgaccgggggaggaggaggggaggggaggacggacacgatggaggcggactccgggaagctcttcgtcggcggcatctcttgggagacggacgaggatcgcctccgcgcgtacttcggtcgctttggcgaggtcaccgaggccgttatcatgcgggaccgcaacaccggccgcgcccgtgggttcgggttcgtcgtcttcgccgattccgggatcgccgaacgcgtcaccctcgataagcacatgatcgacgggcgcatggtggaagcaaagaaggccgttcctagggacgaccagagtattgcgagcaagaacaacagcagcatagggtcacctggaccaggacgcactagaaagatcttcgttggaggtctggcctcaaatgttaccgaggtcgaatttaggaggtattttgagcaatttggtgtgataaccgatgtggtagtgatgtatgaccacaacacgcagaggcctaggggctttggtttcatcacatatgactcagaagacgcagtggacaaggcactgcacaagaacttccatgagctgaatggtaaaatggtcgaggttaagagggctgtgccaaaggagcagtctcctggtcctattgcacgttcacctgcgggagggcagaactatgctatgagcagggttcataacttcctaaatggcttcaaccagggttacaacccgaaccccctgggtggttatggcatgagggtggatggaaggtatggtctccttacgggtgcacggaatgggttctcttcgtttggtccaggttatggaatgggcatgaatgctgaaggtggaatgagtgcatattttggtgcaagttctggttttgccaatagctccaatgggcggcaaataggttcttacttcaatagtagttcaaacagattaggcagtccaattggttatgttggccttaatgatgattcaggatcaatactgagttcaatgtctagaaatgtttggggcaatggaaatcttaactacacagggcaaccctacaaacacgaattcttttgctccacctgtaggtggtgggggtattcctggtgatgaaattagttggggaaaccttacttctgttcatgggatgggcaacatttcaagccttggaccgggaaaccttggccgtggaaccggagataacaactttggattgccttctggaacctatgtgaggagcaactcaactggtacaattggcgagccattttctgcatcagccaatccatatgaatcgaacaatctaggtgcatatggcagcagttctatttatggtgactccacctggaggttcaactcatctgaggttgatatacctccttttggtcatgatcttggaaatgttgatccagatattaaatcagaaatatcagcaaactatatgggcaactatactgttaataataatcagacaagcagaggtatcacttcctaggaagagtattattatattcatacatgacttgggataggtgaaatacccactactatatcaggctttcaggtgcatgactgtgaattggtgatgtcagattaatatacaggtgatgatcacccacactaaaatgac

SEQ ID NO: 2943 - DNA, 3013 bp, Zea Mays
tcgctctttcgctcgctgcctctagcagtctcttgcacaagcaccccaaccagccagccagccagccattactcggaagcttgcttgctgctgctggctgctgaaggcgcagcagagctagcaaaggctttcccatccaaaggcggggcgggggagcgactctctcaggcaaaaataaaagcttggtaagcagtaagcacccgtctctgtacgtgtaggcagagctgagttgggtccggccggcgcgcgtctcttcttcctcttcctcctcccgcctcccatcacgaactcttcttcctcctccacctcctctggaccacaccgcagggcgcaggcgcaggcgcttggatcgcaagcgtcgctcatggctttctggccgacgacagggatctgcttcttctctctctgcattcactcttctctgagtgagtgagtgagtgagtgactgagtgagtggagtgagtgcgtgtatgtgtgtgcaaggacggtgttttactgcgcgccattaaagtcctctgtgtctctcactcacgcgcgcgcgctactgaatgagagccgtcttctccgacacacacccactcccccccacacccccacacacacactcacacacaccggccgccgggaaatgttgctgctgttcgtgttcttctcccgccgctgatcccagcgtttccgaaccagatgtgaagccgcttgctctgcgattgctggttgcggcgggctgcagcgttgtctgaggtgcgtggtcaagtcgaggcgaagatgagcaaggaggacgtgctcaagacttgcgtgctgaaagtgaatatccactgcgatgggtgcgagaagaaggtcaagaagatcctccacaagatcgatggcgtgtaccagagcagcatagatgcggagcaggggaaggtgacggtgtccggcctcatggatccggccaccgtcatcaagaagctcaacaaggcgggcaagccggcgcagctgtggggcgccaagcctggcgtggtgagccagctccagaagctgcagcttggcggcggcggcggtggcggcggtggcaaggacaagcagcccaagggtggcgacggcgggggcaagggtcagcagcctaagggtggcgacggcggcgggaagggccagcagaccaagggcggcggcggcggaggaggaggaggaggcaagggcgggaaagatgcgaacatggtgctgccgcagccgacaccacagcagatgcagcagctgatgcagatgaagggcatgaagctgcctcctgagctcctcatgggcatgggcggcagcaagatgccgccgttcccgtcgcccgcgcctgcacccggcccgccgccgccggcggccaaggaccccaagcccgccaagttcagctaccccgaggacgacgagttcggggacgaaggcagcgagttcgacgacgagttcgatgacttcgacgatgaggacgacttcgaggacgacggcttcgacgatgacgacctgtacggtgaccccaagatgatggcgaagcccgtggccatgccgccggccgccggcaagaaaggcgggaacggtggcaagaagggcggtggcggtgggaacgagatccccgtgcaggtgaaggggaacgcgcacaacggcggcggcaagaaggactcgggcgcgaagcagaaccagggaggcgggaagaacggcggcggcggcggcggctcgcaggcgccgcagaacggcaagggcggcgggaacgggaaccagcagggcaagaagggcggcggcggcggcggtggtgggccgcctgccggttctggcgccccgatgatgggcagcatggcaatgccagcgccgcggccgccgctgccgcagcagcaacagccgggcccgggcatgatgatgaggccgccgaacatgatgggcggcgccggtttccccggtggtggcatggggccgggcatgggccagatgggcggcgcgccgatgggccaccctcaccacccgcacccgcacccgcaccagcacatgggtgcgggtggcaatggcatgcagatgcagcctggcggtggcggtggcggtgccgtgcatggcatgccagccggcgccatgccgggacatgctgctgggttctaccaaggcggcggtggtgcagccggcggcggcatgccgtccgggccagagatgctgcaggcggccgggaaccccatggccatggcggcgcagcagcagcagtacatggcgatgatgcagcaacagcagatgatgaatggtcacggcgccggcggcgccggcgggtacccggcgatggggtacgggtacggccggccggcgatgcagtacccaccgccgccgccgtactactaccacccgatgccgcagcggcacccgcacgacaacatgttcagcgacgagaaccccaacagctgcacggtgatgtgatcatgtccctgtcatgcatgcgaggaggcaaaggtcgctgcggcctgtcgaagctttttctcctgctgcctgctattcttccggaggagggagagaccgatcatgggtcagcgtcaccatggttggaacaaagtccccggattggattggattggatctcagtatacatgagacatgcatgagaagcccccccctaccccttttttcttctttttttttctttttcactactactactagtatttctcttttttttctagcttgtttttcacctttactttctttggacaaagagggggaaaaagaagcaacttccttgaaggcgaaggtaggtatagtagtaattatcaatagtggtgggcataagacatgatggtggtggtggttcatggggtttatagtaaggagtagctcaagaagggtggctctcatggctccccccttcttgttgctccacaatgtgatgatggtatggaggtggcatggtagaaaagcttggtgaatctcaatgtgctttcgagtgccgtgtctgtccctagtggaatggaatgtctctggtgtccccccgttcattttttttaatctttatggctttctg

SEQ ID NO: 2944 - DNA, 567 bp, Zea Mays
tcgcgctcgtcccggaccggacctgcactccatccatctccagggaccagaactagggtttgcgaaatcgtgacgcgagcacttgaagattcgcgaaagacagcgcgaccgacccacggcgatggccaccgtccaccctcaatccccggcgggtcccacccatctcccgcaggaggagcgacacggggacgccccggtaccgcccgccgtctccggcgaacccgccgccgcagcggaggcgggcggcgagatcgccgcgctcgacaagcagctcgccgtcgtcggcggcggcgaggagaggaggccggccggggccggggccggggccgccagcgcaggcgggggagggaagctggtggcggaggccatgcgcaagtacgctgccccgcggtcgtcgcgcttccacggcgtcaccaggctcaagtggagcggcaagtacgaggcgcacctttgggacaacaccagccaggtcgaaggccgcaagcgcaagggcaagcacgctgatccttcatttaatgttgtgcattgggcctgacttccattcttggctgctgttgtggtcttcag

SEQ ID NO: 2945 - DNA, 1728 bp, Zea Mays
cacagcgatcaaccggacgccgcgggtgaccaacccacccgcgcttagccgcttacccccgtcagatccccagatccccctcccagctagccatggccgcgccccgctctggtcgccgcccgcactgccactgctagccatggccgccgccgccgcctgccggagcccgctggtctggctcttcgcgctcgtcaccgcactcttcttcttctcctggtacctcctcctcgactccgccgcgggcggcgctccggtcccggtaggaaatgcgaccccgcggaggcgctgctgcgagtgttcatgtacgacctgccccccgagttccacttcggactgctcgactggaagccccccggcttcggcggcggcgtgtggcccgacatcagggacggcgtgcctgactacccggggggcctcaacctgcagcacagcatcgagtattggctcaccctcgacctcctggcctccgagcagggcgcgcccacgccctgcgcagtggcgcgggtgcgccacgcggcggacgccgacgtcgtcttcgtgcccttcttcgcctcgctcagcttcaaccgccactcccgggtggtaccgcccgcgcgggacagcgaggaccgcgcgctgcagcggaggctcctcgagttcctcgccgcgcggcccgagtggcggaggactggcgggcgggaccacgtcgtgctcgcgcatcaccccaacgggatgctcgacgcgcgctacaggttctggccctgcgtcttcgtgctctgcgacttcgggaggtacccgcccagcgtcgccaacctcgacaaggacgtcatcgcgccctaccggcacctcgtcgccaacttcgctaatgacaccgccggatacgacgaccggccgacattgctctacttccaaggcgccatctacaggaaggacggtggtttcatccggcaagaactgtattaccttctgaaagacgagaaagatgtgcatttctcatttggaagcgtagccggtaatgggatcgagcaagcaacacaagggatgcggtcatccaagttctgcctcaacattgcagacgcagtcaagaaggggtttctaatgaacctgatcaaagggatcagccgagaagagtggacacgcatgtggaacaggctaaaggaagtggaaaagcactttgagtaccaatacccatctcagaccgatgatgccgtgcagatgatatggaaggccattgctcggaaggtgccgtctatccggctgaagattaacagactgcaaagattttctctgtttgagactaacaggacagatgagactctacccccatcttcttcttggctacagaatcaggctccttgattttggactagcaagctcaggctttcgccatgttttcaatctcgtagaatcaagagttgatactgaagaccaaatcttaatcgcttgactgggggcagatgttagtatgttacagctgcagacattagcggatagtaaagttgaaacactttagcatagcagaattacatatccagtggcacatcattttcttcatttttttttcttttgcttgcgattcatccaaagtgtcctcggctgcagactaaggacaatgaattttgtatgtgaagctgtatattctaggcggcaatatagttactgatcagttacagttgctgagcacttccgattcatgtccactaagtctaaagtcacgtagggaagggaggttctgcagctggagaaaag

SEQ ID NO: 2946 - DNA, 1596 bp, Zea Mays
cacagcaaatagtcagctgtactgcactgcagtaccagcaagcggtgggctagagcgtaagcgtagaagcaggcagccaggcaacgatggagatgcgggttgttcttctgctttgccaggtgatatgtatgcaggcggcggtcatcggcgccgtcgccgccgccgccggcgctcggccaccggcgatgtacgtgttcgggtcgtcgatactggacgtgggcaacaacaactacctgcgggggccggccgtcggcagggccaacagtccctacaacggcgtcgacttcccgggctccatccccaccggaaggttcagcaacggctacaacatcgccgactacgtcgcaaagagcatgggattcgcgtgcagccctcctccctacctgtcgctagcacaggcaccggcaccggcaccggcacagagctccggccctgacctggcccagacggctctcaccattggcatcaactatgcttctggaggagcaggcatccttgactccactaacgccgggaacacgatcccgttgtcggaggaggtgaagtacttcggcgccaccaaggccaagatggtcgccgcagcgggccccagcgcggtgaacccactgatctccaggtccatcttcctcatcggcatgggcaacaacgacctgtacgtcttcggggcttcggagcgggcgcggaacaggtcagacgcagagcagcggagggacgccgccgccgcgctctacgccagcctcgtctccaactactccgccgccgtgacggaagttcgccgtcatcaacgtgtggccgctaggatgcgtgccgggggagcgcgtgctcagcccgacgggcgcgtgctccggcgtcctcaacgacgtcgccggcggcttcaacgacgccctgcgctccctgctcatcggcctcgccgagaggctgccgggcctcgtctacgccctcgccgactccttcggcttcacgctggacgtcctggcggacccgcgcgcgtcagggtacaccgacgtcgcaagcacgtgctgcggcggcgggcggcggctgggcgcggaggcctggtgcacgcgcagctccacgctctgcgtcgaccgtgaccgccatgtcttctgggaccgtgtccatccgtcccagcggactgcgtttctcttggcgcaagcgttctacgacggaccgcccaagtacaccactcctatcaacttcatgcagctcgcccactcaagctagtgatgatatggttcatgcatatctgatactacttaacaatacatcggtcactttgtagagaaagggcgcgccgcctgctactagcagagaaaggcaattattagccgttaatataagggcctatgtgttcacgaccgacataatcttgggtgtcatccagcatagccactttccaccgaatcggccagaccggatttgcaaatgttatcaaatcttataatttgagttcaacattgtgttccctttatcattatgttggtccctcttgcccctaccactgctcctacagtgcacatagactgcagtaggatatgacctcagtctatagtcatatcaacttttctatttcagaattaacttatttcagaattaact

SEQ ID NO: 2947 - DNA, 654 bp, Zea Mays
gacatgaactagtttaactcctctacaattaataactttataaagggacagcgaggcataaatgccatttgaagtgaattgccagaagctagatcatctcatcttcttcctcagtaagctgagcagtagaaaccagcttcactatagctaaccaggctatggtcctgttgctgaaggaagacctgtgagaatgaggcgtctcccatgttgtggcctcggcttaggctggtgtctgttcataactgggtttttcttggctgccattccatggttcattggagctttcgttcttatatgtgtgcgggtacatgaccaacgagagaaaccaggatacgttgcttgcacaattgctgccgttgttgctgccgttgccatcctcttgggggtaactaaaggaacgcacgtgtggtgaattgcctccagagaaggcaatcaatgtgtatttgcgttgtatatctgtgtgtgctaaaaagtgtggagcaacatccatgtgatcttatgtccatatatattctactttgcaatgaagtttgaaatgtagtaatgtaccatctgcttcttgtaagcagcactgcatcatatataataagataccttttatttaaattgcggaatttctgttttcgaatgaagatgcagcactggacgtctcag

SEQ ID NO: 2948 - DNA, 2269 bp, Zea Mays
gaaaaaagggaccagagggccggaagcccggaaccaaaacctagacgaaccacacaggcagtcaggcacagcgcgggccggggagatagataggcagacaggcaggcaggggggcgacggcacggggcggggctagccaaccagaccaacccaaaccctagctcaccgctcgttccattccaatccatggaggtggcgctatgagccgccgccgggacggcgggacgtggagctggtgcggccggggaagacgagtcgaggatgacggccagatcggacgatcccggcgtctcgccagggacgtcggcggcggctggcggcgagatctggggcacgtgggaggagctcctcctggcgtgtgccgtacggaagcacggtaccgccagctgggactccgtggccatggagatgctgtcccgctgccctcccgccgcggccgacagcctcacgcccgctgggtgccgcctgcggtatcgcctgctccaccgccggttcaccgccgccgccgccgtaaacggtgacgaggagcccgacgcggcctccgccgactgctgcgtggaggagctccgcaagctgcgcgtcgccgagctccgccgcgaggtcgagagatacgacctctcgatcgggtcattgcaatctagagtggaaaggcttaaagaggagagagcgaggagcatctccggcgaggccaatccagtaccggcggtgaaggaggacggcgaggaggagccggcggaggggaggaaagaatctctggaggaggagggcgacgatgccggcggcggggaggaggatcgtgtctccggcggcgagtccgggcggtcgtgcaaggagtccaactcgtcagatctgaagcggccgcggccagcgcgagacgccggggacggcgacgcggcggcgaggagggaggacgagggggcaggagacgccgcccgcgagtcgtcggctgtgaagcgcgagcaggtctccggtgagtcggtggttgggtccaaggacacggtggcggcggctgacacggagaaggagagcagcgacgtgcagagctcggccagcccgtcccgtcgccgcgagcgggagatcggcgccggcgaggacgcggatgtggcctcagcgccgccgccgccagcgcccgcagcggcggtcctccccgctgcggaggccgaggcgttgcgcgcgttcctcgaggtggtgcgaaccagcaagccgggctccgtgttcgagcgccggctcgagagccaggacgacgcgaaatacaggtgcaccatcaggcgccacgtggacctggagacggtgaggtccaggctggacggtgggtccggcagctacgcctcggcgaccgagttctaccgcgacctgctcctgctgtgcgccaacgcgctggtcttctacccgcgcggctcgcccgagcgttccgccgcggcgcggacgcgcgcgctcgtcgccaagcacatgtccaaggaccagccggggccctcggggaaggctgtcgcggggccggcggcgtccaagaaggccaaggcggaggccgacgttgggtcgctgctggagaagacggcgcccatcatcgtgtgccggaagcggagctctatcgccaaggccgccgcggcggccaccgccaaagaggagagatcggagaaggcggagtccgacaaggagggcgagaagcagcaggaggcggtgggcaagaggaaggcggcggccgccgccaaggacagggcggcgtggggcccgagaacgaacaagacccgcggcgggcctgctgtccggaaggcgtcggctcagagccacaagggggcgtcggcggcggcggacaacggctcggacagcgacgcaccgcccgaggaggccaagaagcagcctgccgctgacaagaaaggtggtggtggcggcggtgtcgccaagaagcgcaacgccgtcaacttcctcaaccggatgaagcaaggtggctcggcgccgtcgacggagcgggtgtcgctactggagacgctgaagctctcggccgcggcggagcagaagaaggccgggaaaggcgagggcaaggagcccgcgggcgggtccggttccaagaaggccacgccggggaggaggaacgttggcaggccaccgaaacgcgcggctgcccctccatccccgccaccgtccaagagggcaaagggcggcggcggcggcgggaaacgcgggggcaggaagtgaagccaagtgggatggagtgggaagcattaggaagctgtaggcccagtctcagaccaaaaaaaaaaaaaattttttg

SEQ ID NO: 2949 - DNA, 3779 bp, Zea Mays
cagcgactacttttttaacagttgttcatcgcattgaggaagggaggccggctggtgctactgcttttctagtacctgcccacctgcacttgcatctcctgcttccctgagcggcctcccggctgcgaatccaccagcatttcccgaggcccagcgccgcgtgtgcctgtggggcggagtcaggaaatgctcggagctccattccacggctgaaacttctgggaaggtttaagtttagggagaccggcagcactaaagaaactagcctgagcctctctttcagcctctcacccactatcgtgagggcattttgtaccttccaagaaagagagtaaggagaacttgacctcagcgctagagaagaatatggcagccactgaagctgccacggacacaggcagttcaaggaggtcacaagatgacactacaacattagtcccacacagtgggaatttgggagaaccaatccagaagggcgtgaagaccaccagattcaaagatgatgacgaggttgtggaaatcaccattgtacagcgcgattcagtggcaatcgaagatgtcagggtagtcgatgatggtggctcagggcatagtaatgggtttgatggcctgtcacttgtgtcaccttcctcatcaaggagcggcaagctatcatcaaagattaggcaagtgaaaaatggactaaagatgaagaactcaagcactaaggcgccacagacacagttgggaaagaacatgaggaagagattggacagaagcaagagcggggctgctgtagcgctcaagggcttgcagtttgtgactgcaaaagttggtcatgatggctgggctgtagtggagaaacggttcaacgagctacaggttgatggtgtgctgctacgttcaagatttgggaaatgcattgggatggatggatctgatgagtttgcagtgcaattgtttgattcattagcaagaaagagagggataacaaagcaggtgctgactaaagatgagctcaaagatttctgggagcaactcagtgatcagggttttgacaaccgtttacagatattctttgacatggttgataagaatgccgatggaagaatcacagaagaggaggttaaggagattattaccctcagtgcatcagcaaacaaactttccaagctcaaggaacgagctgatgagtacacggcactcataatggaagaacttgaccgtgacagccttggatacattgagcttgaggatctgaaggcacttttgctgcaatcaccttctcaagttgttgcaagatcaacaacgcatagctcgaaacttagcaaagctcttagcatgaagcttgcatcaaacaaggacacaggtccattttaccactactggcaagagttcatgtacttccttgaggagaactggaagcgcatttgggttatgactctctggctctcaatctgcattggcctctttatttggaagttcatccaataccgtaatcgagcagtatttcacatcatgggttattgtgtgaccactgcaaaaggtgctgcagagaccctcaaattcaatatggccctggttctttttcctgtttgccgaaatacaatcacatggattcgatcaaagacaaagatcggtgctgttgtgcccttcaatgacaacataaacttccataaggtaatagcagcaggtgttgcagttggtgttgttttgcatgcaggtgctcacctgacatgtgattttcctctgctgctgcatgcaagtgatgctgcctatgaaccaatgaagcctttctttggagacaaaaggccaccaaattactggtggtttgtaaagggaactgaagggtggacaggtgtggtcatggttgtacttatgactatagctttcgtattggcccagccatggtttcggcgtaataagctcaaggattctaatcccctcaagaaaatgactggcttcaatgccttttggtttactcaccacttatttgttattgtgtatgcactgctcattgtccatgggacctgtttatatctaagcaggaaatggtacaagaaaacgacatggatgtaccttgctgtccctgtgctcttgtatgtaagtgagcgcattcttcggctatttaggagccatgatgctgttaggattcagaaggttgcagtatatccagggaatgttttggctctctatatgtccaagccacctggattcaggtatcggagtgggcagtatatcttcataaaatgcagtgatgtctctccatacgaatggcacccattttcgattacatcagcaccaggagatgattatcttagtgtccacattcgcacaaggggtgattggacttcacgtcttaggactgtcttctctgaggcatgccgccctccatctgatggagaaagtggactccttagagctgacccttccaaggggatcaccgagaccaacgcgaggttcccgaaactcttgattgatggaccatacggtgctccagcgcaagactatcaggaatatgatgtgctcctgctcattggactgggcattggagccacaccattgattagcattgtgaaggatgtacttaaccacatccagcttggaggatctgttgcaggcacggagcctgagggcagtggcaaggccaagaagaggccattcatgacaaagagggcctacttctactgggtgaccagggaagaggggtcctttgaatggttccgaggggtcatgaatgaggtggctgagaaggacaaggatggagtcattgaactccacaaccactgctcgagtgtgcaccaggaaggggatgtacgttctgccctcattgtcatgctccaggagctccagcacgcgaagaagggagtcgacatcttgtctggaactagtgtcaagacgcattttgcacggccgaattggcgaagcgtcttcaaacatgttgcagtgaaccacgagaaccaacgcatcggagttttctactgtggtgagcccgtccttgtgccacagctacggcagctgtcagcggacttcacccacaagacaaatactaagttcgagttccacaaggagaacttctaatggaggaactggagaaaagctctaggcgtggccctctaatggtttcagaatatgtgaattacgatggttgtaacatatatacgagtagaagaataagacgatgggagttgttttgttgtacatgtcaagagtagatgaattgtctttgcaagcatacaaccttaaaagttgtaacacatgtcagctggttttgacaggtctgtttgttttgtctgctcctgttggagtgttgggcatacactgcttctgtcttttaaagcaccaccactacattgaaagccctgaggaaggtattttacggcacaaatgagtcaggttcacttgtgaattgtgatcctcaactcctgatgctgagtaactggttgtgccttccgtaagtttgctcaaaatgtatgttaaattttatgttgcttgatctcttggcacttccaaaaagtttgtgtgataaatgataagaaatgagatttcccctttttttgcagaatgggtaggtgttctgctgtttcattaagttgaaagcatgtgcaatgtgtgcaaggatctgactgcaatactactcggctaaaatgaagaagaaaacgaaaccacaacaccctaccaaaacaaagatgaaagaaaagaaagaaaaggactgaatatagccactgtgactcacatccagcctctacatgctgcatactctgtcgatcactcgaattcttcacaggcaaagcctcaaa

SEQ ID NO: 2950 - DNA, 2236 bp, Zea Mays
acacatcaagggaactgtagacaaggactgtagcgtggcgctggcgctggccgctggcgatggcgacgccggccccacccacgaactgtgtgaaccaggcgtcgtcgtcgtgcaggacagaaagccacgcacagcgagcgagcgatctctccctcctccatccatcgctccgatctctttctcacacaaccacagtggagttaccacggcaccaccggcggcccgtagaggtagctagcctttgccctccttttccatcgtcttcatcccctccctctccctctctcccttttcctccctccaacagctgctttgcttgctttccggcccctagctccaaaacccgccttcttatctccgtcctctggccgtccgtccggccggccgggccgcccgctagctccaaaaaggcatgcaggagccaggtctttagtctttactacctctctggcatcgcatcgcatcgcatcgacggggcgacgacgtacggcacggcacatgagatcatgagctcggaggactcgctcaagtccctctcgctggactacctcaacctgctcatcaacgggcaggccttcagcgacgtggcgttcagcgtggagggccgcctggtgcacgcgcaccgctgcgtgctcgcggcgcgcagcctcttcttccgcaagctcttctgcggcctcgaccccaaccacccgccgccgccgcccggcgcccgcgcggccgcggccgcggcgccggagctcgtcatccccgtcagctccatccgctacgaggtgctcgtccttgtgctccagttcctctacagcgggcaggcctccgtggccgcgcccaagagcgggcccctccccgggtgcggcgcccgcgggtgctggcacacccgatgcggcgccgccgtcgacctcgccctcgacacccttgccgccgcccgctccttcggcgtcgagcagctcgcgctcctggtccagctggagagcatggtgaaggaggcgtcggtggacgacgtgatgaaggtgctgatggcgtcgcgcaagttcgagatgcaggagctgtgggccacctgctcccacctggtggcgcgctcgggcctctccgccgacctgctcgccaagcacctccccatcgacgtggtggccaagatcgaggagatccgcgccaagtcccccgtccccgccggcgcgccgcgctcgccgttcctcacccaccactacctccccatcaacgcggcgtcgtcggccgccgaccgcgaccacaagatccggcgcatgcggcgcgcgctcgacgccgccgacatcgagctcgtcaagctcatggtcatgggcgaggggctggacctcgacgacgcgctcgccgtgcactacgctgtccagcactgcggccgcgacgtcgtcaaggcgctgctggagctcggcgccgccgacgtcaactcccgcgccggccccacggggaagaccgcgctgcacctggccgccgagatggtctcccccgatatggtgtccgtgctgcttgaccaccacgccgaccccagcgccaggacgctcgacggcgtcaccccgctcgacgtgctccgaggcctcacatcagagttcctgttcaagggcgccgtgccggggctcacgcacatcgagcccaacaagctcaggctctgccttgagctcgtgcagtccgcggtgatggtgaccacgcgcgacgtcgacgccgccggcgacgacgccgggggaagcgacggcggcggcggcggcaacttccccaggagcgacgccgacgacagcttggtgagcctgacgatgaactccacgctcatgtaccagggccaggagatggcggctgccgcggtggccgccggtgaggcgaggaaagggaacggcggcggcggcggcggcggccgagggagcccgtccaacttgtacttccccaatggcggcttcccataagtattatattgtgcccttcccttctataatccatcgtcaagatgatctttcttcttcttcttctgttggattggatctttgtgagaccatggtgtagctagctactagtactatttattttgagtaggagacatgcatgcgcgagagcaagaatttcatggtatttgatgtggattgttcgatcgacgactgtgggagacaaagcaactgttgctttgttcaaatgcttcactgtgatgaatctttgtaatggggcttcaacaatagtagtccaacattaccaatttagagctagcttgcatgaacaa

SEQ ID NO: 2951 - DNA, 1128 bp, Zea Mays
ctaagccatcataaaagcctacttttcccatgcctctttcgtaaactcgaacgcagctgtgccattgcgagcacgattgcgtccaaactcggaatggcaaccccctagccgtccgatcgaccgccagccccgagtccgatcgaccgcggtctgcgccatcttgtcctcttcctcccttcctggacggctggagctggacctgctttattgattattgggtgcccacgcatcgggccgtgggaggcgggctctgtttcagcctcgtcagccgtgggcgatggcggcggcggctgggaaggcgcgggcggtgagcctggccgcggcggtgcgtgtggtggcggcgacggcgcggccggcgtctagcgcagccgcggcggcgggagtgggtgcgatggcattgatcgtgcagggggaggacacggccttcgggtctctggagtggtgggcgtacgcgggcatctcctgctttctcgtgctcttcgcagggatcatgtccgggctcacacttggactcatgtcgctcggcctcgtcgagctggagatcctccaacgcagcggcaccgacgtcgaaaaggctcaggctgctgccatccttccggttgttcaaaggcaacaccagcttcttgtcaccctgttgttgtgtaatgctgttgccatggaggcacttcctatatttcttgacagaatgtttcatcctattgttgctgtaatattgtcagtgacatttgttcttgcctttggagaggttataccacaagcaatctgtactagatatggtctagcagtgggtgctaactttgtatggctcgtacgcattctcatggtcatctgctatccaatttcttaccctattgggaagatcctggactgtgctcttgggcacaatgagtctgcactttttaggcgagctcagttgaaagctctagtttcaatccatagcaaagaggctggcaagggtggagagcttacccatgatgagactacaatcataagtggagccttggacctgaccgaaaagactgctgcagaagctatgacaccaattgagtcaactttctcactggatgtggattccaagttggattggaccattacaagtagcagccccaattagtttcctgaagtgca

SEQ ID NO: 2952 - DNA, 1449 bp, Zea Mays
gtggatagtggacacagagcgcgcacacatacccacagagatttgcactcttttcacttcatcgtgaacgggaagcgagcatacaatagactgaaacccaaataatggcctgttctacagcagcgaggaggcatcgtcgtccactcttcaccatcctggtcgctctctccttgctgcaagtatccgcgatgatcgtacccctagacgagcaggaaggcgaccgggtgggtctcctcccggggcagccgaggagccctgccgtctcacagttctcggggtacgtcaccgtgaacgagcgcagcgggagggcgctcttctactggttctttgaggctcagacgtcgccggctgaaaagccgcttgtgctgtggctcaatggaggtcctggctgctcgtcggtgggctacggagcagcttcggagctggggcctctcttggtcaatagcaacgggaccggattggagttcaacaagtttgcgtggaataaagaggccaatctgctgttcctggaatcccccgttggtgttggcttctcgtacacaaatacttcctctgacctagaaaacctcgacgatcgcttcgtcgccaatgatacctacaccttcctagtgaactggttcaacaggtttccacagtacaggagccatgatttctacatatcaggagagagctatgcaggccattacgttccacagcttgcagaagtggtgtatgagcacaacaagcaccttgaagcgaagcagcgaatccatctgaagggatttattgccggcaacgcagagactgacgattactacgactacacggggatggtcgagttcgcctggagccacacagtcatctcagaccaactctacgagcgagtaaaaaccgcttgcgacttcaggctctcgcccacttccacggaatgcggccatgtaatggaccttctataccacacgtacgatgagattgacatctacaacgtgtacgcgcccaagtgcaacactgacgatggatcagcgccactgccgtcgtcgtcgtctagtgctgatgacagcagcgcatcgagcaagcagcagtccaagaggcggttgaggatgtactcggggtacgacccgtgctactccagctacgtcgagacctacttcaacaggatggatgttcagaaatcactccatgctaataccagtggacggatcagggacagaaggtggagcctctgcagcgacccagtttttgacatctacgacatggaggtcttctctgttcttccgatttactccaagcttgtcaaggctggactcaaaatttgggtctacagcggagatgtggacggcagggttccggttattggatcccgctactgggtagaggcacttggccttccaatcaagtcacagtggcaaccatggtatttaaaagatcagaatccatgcattggtcattggtatcgacatgatgttaaag

SEQ ID NO: 2953 - DNA, 1571 bp, Zea Mays
gtggatagtggacacagagcgcgcacacatacccacagagatttgcactcttttcacttcatcgtgaacgggaagcgagcatacaatagactgaaacccaaataatggcctgttctacagcagcgaggaggcatcgtcgtccactcttcaccatcctggtcgctctctccttgctgcaagtatccgcgatgatcgtacccctagacgagcaggaaggcgaccgggtgggtctcctcccggggcagccgaggagccctgccgtctcacagttctcggggtacgtcaccgtgaacgagcgcagcgggagggcgctcttctactggttctttgaggctcagacgtcgccggctgaaaagccgcttgtgctgtggctcaatggaggtcctggctgctcgtcggtgggctacggagcagcttcggagctggggcctctcttggtcaatagcaacgggaccggattggagttcaacaagtttgcgtggaataaagaggccaatctgctgttcctggaatcccccgttggtgttggcttctcgtacacaaatacttcctctgacctagaaaacctcgacgatcgcttcgtcgccaatgatacctacaccttcctagtgaactggttcaacaggtttccacagtacaggagccatgatttctacatatcaggagagagctatgcaggccattacgttccacagcttgcagaagtggtgtatgagcacaacaagcaccttgaagcgaagcagcgaatccatctgaagggatttattgccggcaacgcagagactgacgattactacgactacacggggatggtcgagttcgcctggagccacacagtcatctcagaccaactctacgagcgagtaaaaaccgcttgcgacttcaggctctcgcccacttccacggaatgcggccatgtaatggaccttctataccacacgtacgatgagattgacatctacaacgtgtacgcgcccaagtgcaacactgacgatggatcagcgccactgccgtcgtcgtcgtctagtgctgatgacagcagcgcatcgagcaagcagcagtccaagaggcggttgaggatgtactcggggtacgacccgtgctactccagctacgtcgagacctacttcaacaggatggatgttcagaaatcactccatgctaataccagtggacggatcagggacagaaggtggagcctctgcagcggagatgtggacggcagggttccggttattggatcccgctactgggtagaggcacttggccttccaatcaagtcacagtggcaaccatggtatttaaaagatcaggttgctggaaggtatgttgagtacgaagggctgaccatggccactgtgagaggagcaggccatgcagttcctcaagataagccagcagaggcacttgtgctgatcaaagccttcctttcggggacacaacttccagcaaaaagtgggaagtgcagtattatgtttcagaaaggttcagcaagtgtttttccagagaagcatacctgttttgataagcttagagtagattggtaagatagaaagagaccaaaaattgta

SEQ ID NO: 2954 - DNA, 2547 bp, Zea Mays
gccggagcacggagctgtttcgtttccgctcgcaggcaggcacagcgccaagcggcgaccgagagtccgagacccattcccatccacgcgaccacgctgccgttctctccccttcctccccgtcgcttccattcccgtccctcacaatctcacccccgccagccgagccccaaccctaacgaaatttacacctgcttcgtcggcgtgagcggtcttaggcgccgggcgtcgctgcggtccagcggtgtcggatccgggtcccgcgccgttaggtcgaggtttcttcggcgacggtgcagccgctggatgttagtctggcagatcggggccgagctaggcagtgttgggttgtaaaatttgtatcgcgtgaatgaactcagagcatctcaatgttaaaactgtaaaaggggcagacctggtgccagaggctcccacatgagtgggttctagggaagggataatccgaagcaagcctcccccctgcaaatgcagagatgtggctttgaacccgtgacctggtgactcagtgagacacctctcaccactgcaacgggcgtgtccttcctcagcgttaaaactgagcatattaattcccctgcttaagcaatatgggagctaattgctgcgttgctgcaaaggagaggacacagccgtgcatcactcctatagaagtatcgacatacaggaatgtgaggcgctcgccatcatggaacattcgatgggacaatcgcacacatatagaagacataatggatattcctactctgttctccaaccatagtagtggaagcattcatcctgatacaaagagtggttccattgctccaactgaagggttctctaatggaaatagccttggaactagcccttccaatgtgttccatggagcaaagtggcacaaatctgataaaaaaatggaagcacgcaaggttacaaagtctgattctcgagctgatcgctccacagcaagtaactcttctcctgagacaaagctttccaggaaatcactggacatatcaagtgttgcttcagatttgaagacttcagtgtctgttccttcaacgccacccttagtatccagagcagatccgtcatcctccaaggggcattctcaacctacagattcagatttgatgaagaaagcatggcggtcaccagggtatcaattatacagacaggtttcggacagtaaaattccatctctcagatctctcaatgagataaggtctcctgaaggaaggcctccctcttccatgttatcagcctgcagcaacgacttgtcagcagcaggatcctatggtgagtcatccgatggttggtcaatgcgcacattttctgaaatggtctcaacatcccaaagagagaggtggtcacttgacagtgagctcttgggatccatttctagtaaaatgacaagatcaagtgcttcgagttctactacacgcccccctgaccaagacgtgtgcaagctgtgtttaaagctgctaaaggagagatcgacatggaacgcgcaggagctggctgttgttgctgttttgttgtgtggacatgcataccatgctgactgtctggacagcataactacagaagctgacaaatatgatcctccatgccctgtgtgcacgcacggtgagaaattttcagtgaagctatttgggaagctggaatcaaagatcaagaacaagataccaaaaaatgtgtcagttgatattaatctagatgggaatagtagtaataagcaccagaagaaaggtagaagagagcccaggttaggtacaagttcaagcatgaaggtcccatttagtcgtccatttttgaggagacatttctccattggatctcgaccacctcggtcggtctcagaaactgattccacaagaaagaagggattctgggcaagacactgggagagagtagaatagaatccaattgtcgttaggaaggatctttaagaagaggtgaactccccagtatacaagggctgccgagcaaccaacatatttggaagtttctctcagccatcgtattctgatactggtgcagagcgcacaacaaggtttcttataccatgcgaggcagggtcgttgtaggccccgcttgcatctaagtaatagtagtatcgatctaacagaaacggtgtggccttcctggatttaaggcccaatgctgggttataagattacacaaccagcatgctagattatttactgtacccgcagtttttttaattattggctaaggtatttgttggtggttgatggaatgcgtttaatttgaaggctttagtggtactgtagaacttttcaatcagattggctgaactgatcatccttgcgttcacatatactaaatatagacgcacttatagggtgtttggtttgaggagtgagttagtctcatctttttattccgtattttttgtttggtttgtggaatagaatgagctgattcatcatcaacttatttctcatagttagttaatactaatataataattctcatagttagttaatactaataatgattctcatagttagttaaaactaa

SEQ ID NO: 2955 - DNA, 2319 bp, Zea Mays
ggacttcgtgcttattgaccatctatacacagcacgcggtccaaccaacctaccaaaacctagctagatttagaggaaaaaaaaaactgtccccaaccgtgagatggctgagtacggcgagcgctaccagggcaacggcgacccggccacgcccgagggtggctacgcgcagaccgagtacgccgccgccggtggctcgccgcccgccgaccgcaagccctccgtgttctccgaccacgctgacggtcgctcctcccagccccagcatgagactcaatcacatggcagtggttcctccaaatctcgagaaagggaccgagaacgtgataagggaaaggacagggagcgaggcagagaccgtgtccgcgaaaaggagagggaccgagacagggacaaggatcgtgaaagaggtgacagagacagggatcgtgatcgccaccacatggatcgtcgcgagcgcagcgagataagggaacaccgtgatcgttctgatgatcgtgaccgtcaccgcgatgatcgtgaccgtcgcaggagtcatgattctgagaggagaagagatcgtgacagagatggccatcgtaggcatcgctcccgttccccttctatgagtcgtgaccgtgaccgcagatctagatctcgttcacgctctagatcgaagagcaagcgcgtgagtggttttgaccaagcacctacacaacaggcacttcctattgttgctgctggtgttatccctggtcagctgcctggtgtcaccgctcctattcctggggttggggtgcttccaaacttgtataatttggctgcaggacagttcaacccccttgctattcagccacaagccatgacacaacaggctaccaggcatgctcggcgtgtctatgtgggcggacttcctccaactgctaatgagcagaccgttgccatattcttcaatggagttatggctgctattggaggaaacacagctggtccaggtgatgctgttcttaatgtctacataaaccacgacaagaaatttgcttttgtggagatgagatctgtggaggaagcaagcaatgcaatggtcttagatggcataatgtttgagggagcaccggtcaagattagaagaccaacggactataatccttccctagcagctgctctgggcccgagccagccaaatccaaatctcaatctttctgctgttggcttaacacctggctctgctggaggattagaaggtccagaccggatctttgtaggtggtctacaatattacttcactgaggcccaagtgcgggagttgcttgagtcctttggacctctgcgtggatttgatcttgtaaaggatagagaaactggtaactcgaagggatatgccttctgtgtgtaccaggatcttaatgttaccgacattgcctgtgctgctcttaatggcatcaagatgggagacaagactcttactgttaggcgggcaaaccaaggagcttctcagcctaggccagagcaagaaagcatcctgttgcaagcacagcagcaggtgcaaatgcagaaattcgtataccaagttggaggtgccctgccaacaaaagttgtatgcctgacacaggtagtgacagaagatgaactgagagatgatgaggaatatgatgacattgtggaggacatgagggaggaaggacacaaatatgtcccgcataatgccattgcagattgttttgtagtccgaccttatgcaatagtggcaatcgggccttaacccacagaagacactattcttttgactttgattaatcattttattattagcgcgtcttgtctatatatatctactctgctcactaagatttggacaggtaacttggtgaaagttgcaattccacggcctgaccccagcggtgctcctgttgctggtgttggaaaggtgtttttggaatatgcagatgtggagggctcaaccaaagcaaagacagggatgcatgggcggaaattcggcgggaaccaggtggtggcggtgttctaccctgaggacaagtttgcagctgagcagtacgactgaaaagttttagaacccctattctagagttgcagttgtggcacacaatgtggttgttttgaccttttgtagttaagtttggtgattgatccgctgataagtgatataagtttcgtgctcaagtattatatcagctggtaagagtgatacaagtctcgtgcccaagtttcggtctatcaatcgactgcatgttgccctgttggcttcttgcacactgagtgatgtgatcttgtatgacatatacaacatctaggatctagtagttgctgcattagaatgct

SEQ ID NO: 2956 - DNA, 1484 bp, Zea Mays
gtcagatcagatcaaaccaactctcaacctcctctgcttcttgttccttgacttccttcacactccttctagaaccctctagaagcaatcgcaaaaatgccgctccatcaccctaagcaccgccaccatgacgaagatctcctcccctaccgccgctccgatgacgaggccaagccgcgccggccgtacacccccaccttcccctcctcccccgcctctaccaaccgcctcctcctcttcttcgccgtcgcctgcctcgtcctcgccgctgcctccttcgccttcgccgtttccaccagccgcaaccgtcagtccctgccgcagcctccgcctactgtcgccttccgctgtggccgcgccgaggattcgctccgttccttcctagcggcctcctcgcacggcaacttctctgccggcgacagggagaaggtgctcgctgtcgttggcgtacacacggagcatgggaatttctccgctgcccgacgcgctgcgctccgcgctacctggttcccgctcaaccccgaaggcatctttagaacatggaactggattatcatttaggtttgtcgctagacggccaaaggacaaagataaaatggaagatcttcagaaagaggcggatacttatcatgactttttgtttattgatgctgatgaggccacaaagcccccacagacgatgttagcatttttcaaagcagcttaccacatgttcaatgcagaattctatgtcaaagctagtgatgatatctacctgcgcccaggtacgaaagttcttgggaactgttgggtaacgagtacttcatgcatgcatctggttcactatatgctctttcttctgaggtggttgaagctctagctactgcaaagagtgatagcttaaggatgtttgattatgaagatgttacaatcggcgcatggatgcttgctatgaatgtaaagcatgaagacaaccgagcaatgtgtgattcagtatgtacccctacctccatcgctgtatgggacagtaagaaatgctcaggtacttgtaacgtcgctgacaaaataaagcagctccataacaccactgtgtgctcaaagagcccaacgttgccacctgaggtggaggaggaagaatagaaaccgaaacagttttggcccttgaaaaagctatggcggtgatactccaattagagcactggttttgtcgtcgactgcatttccatactgctgtatcattagtgacctttcaacaccagcgatggagagttcttggagaatcgacaccatcacattacatgtagtatttcgagtctacccaatatgggttcagatgacgtgttgtacttgtaccttttactaatcggtggaaccaatgagggcacagagacattcttggctgtatgatgtagtataaattgtacacagagtgacctatgtggtttcattcttcgctgaccagacggtgggcattccatggtttgttttctgagactcagtgcagg

SEQ ID NO: 2957 - DNA, 1632 bp, Zea Mays
gtcagatcagatcaaaccaactctcaacctcctctgcttcttgttccttgacttccttcacactccttctagaaccctctagaagcaatcgcaaaaatgccgctccatcaccctaagcaccgccaccatgacgaagatctcctcccctaccgccgctccgatgacgaggccaagccgcgccggccgtacacccccaccttcccctcctcccccgcctctaccaaccgcctcctcctcttcttcgccgtcgcctgcctcgtcctcgccgctgcctccttcgccttcgccgtttccaccagccgcaaccgtcagtccctgccgcagcctccgcctactgtcgccttccgctgtggccgcgccgaggattcgctccgttccttcctagcggcctcctcgcacggcaacttctctgccggcgacagggagaaggtgctcgctgtcgttggcgtacacacggagcatgggaatttctccgctgcccgacgcgctgcgctccgcgctacctggttcccgctcaaccccgaaggcatctttagaacatggaactggattatcatttaggtttgtcgctagacggccaaaggacaaagataaaatggaagatcttcagaaagaggcggatacttatcatgactttttgtttattgatgctgatgaggccacaaagcccccacagacgatgttagcatttttcaaagcagcttaccacatgttcaatgcagaattctatgtcaaagctagtgatgatatctacctgcgcccaggtgaagttagtgactatattgtacaattgctgtttcttagacctgttatatgactcgtatttctagggcagatagacttgctgctcttcttgcaaaagaaagacctcagcacaagacatacatcggttgcatgaaaaaaggaccagttgtcaatgatccaaatttgaaatggtacgaaagttcttgggaactgttgggtaacgagtacttcatgcatgcatctggttcactatatgctctttcttctgaggtggttgaagctctagctactgcaaagagtgatagatgttacaatcggcgcatggatgcttgctatgaatgtaaagcatgaagacaaccgagcaatgtgtgattcagtatgtacccctacctccatcgctgtatgggacagtaagaaatgctcaggtacttgtaacgtcgctgacaaaataaagcagctccataacaccactgtgtgctcaaagagcccaacgttgccacctgaggtggaggaggaagaatagaaaccgaaacagttttggcccttgaaaaagctatggcggtgatactccaattagagcactggttttgtcgtcgactgcatttccatactgctgtatcattagtgacctttcaacaccagcgatggagagttcttggagaatcgacaccatcacattacatgtagtatttcgagtctacccaatatgggttcagatgacgtgttgtacttgtaccttttactaatcggtggaaccaatgagggcacagagacattcttggctgtatgatgtagtataaattgtacacagagtgacctatgtggtttcattcttcgctgaccagacggtgggcattccatggtttgttttctgagactcagtgcagg

SEQ ID NO: 2958 - DNA, 1620 bp, Zea Mays
atagtaggactagagagtagagaggccccgcccccaggaccgaccgaccagggagtccagcggcgcacatcgcggcgacccccaccccaccgagcgcccgcggccgcgatggagagaggcgatggcgggagcgggaggccgccggccgagaggaaggcggcgtggagggacggcgccgtcacctacttccacctcctcttctacatcgccatctccggcggccagatcttcttcaacaagtgggtcttatcctccaaagagatcaactttccctatcccgtggcactgactctgctgcacatggtcttctcctctgtagtgtgctttgcaatcacaaaagttttcaagatatattacttcagtcattccaattggaggaatgtttgcaatgacactttggctagggaacagtgcgtacctctacatatctgtcgcatttgcacagatgttgaaggcaataatgcctgtagccgtgtttcttctgggagcagcatttggcctggaagaaatgagctataaaatgctttctatcatgtctgtcatcagtgttggagttattgtggcttctgttggtgaaattacaatcagttgggttggagtggtttaccagatgggtggagttgttgcggaagccctaagacttatcttcattgagatatttctgaagaaaaagggtgtcaagctcaacttgatatccatgatgtactatgttagcccttgcagtgctgtatgcctctttattccctggctgttcttagagaagccaaagatggatgatagtatttcatggaacttcccaccattcacattgttcttaaactgcctgtgcacctttgtactcaatatgtcggttttccttgtcatatcaaggactagtgcgctgacggctcgagttactggtgtcgtgagggattggtccgtagttttgctgtcagctgccatctttgctgatacacagcttaccttcataaacataattggttatgccatagccatagctggtgttgttgcgtataacaaccacaagctcaaggtaaaaccccaagcgaacccacagcaaggcgacgagaacaaggtcatctcaggaagcactcaagatgtggtgttatcagtgagctcagcaaaagaaacttcgtagcaccaaaagtagcacgattttgaaacaattttatttttcacaaaggagaattgtgctctctttcgttgggttggccagctctccttggactatacattctttttccttcccctgggtctggagggaagatattttgtacaatgatatgctcaagatgatgatacgctgccttcactgtcgtaatattgctgctcaaaaaagtgggagcacgccacagatggaaattaggccatgtaaagttgtgttttctcttgaactggtgtagcgactcatcaggtgctccaaaaatggcagccctgaatctttgtacatggttgcttggtggtggtcatgagatgtgatgtaaaacgatatatgtaagcctggcagatcaaagaattcaagatacgcaagtttctgtgtttttgaatccagcatttctcttgcgctgatagtttgcttgagatattgattctgcaatatatgtttttaaactatctgat

SEQ ID NO: 2959 - DNA, 2015 bp, Zea Mays
gactcacgaaggaggcgcgacgtgcgcgtgccgctgtgctgcactgctagtgttcctgcgcgccgtgctgtccggcccgcccgcgccgcgcaccgatgccgccaccgtcttcctcgcgctactccccgggccggctgctcgccgcgcgcccggcgtccgccaccacggtggggagatgggcgcgcttgtcgtgctcgctgtccatgaacgggtgcgcgccgggcgccggggaccgcggcgcggtgtgcgtgcgcgagacgcgggcgctgccggccgcgccggcgccgcacgacgcagtggggcggctcagggccgccgtggacgcgctctggtccaacgcagcgccaccggccgcgccctccggcatcatccgcatcgaggtgcccatcacgcagcgggtggacgccgtggagtggctgcacgcgcagaccacgctgccccgctgcttcttctcggcccgggcgccgttgcccgacgcgcccgccctcgccggcaacggcaacggcaacggcagtgtccatcggcagcagccggtgagtgtcgcgggcgtgggttcggcggtcttcttccgagggacggagcccttttctctagctgattggcgcgcaatcaagagatttcttccaagggactgtccactggtccgcgcatatggcgccatccgtttcgacgccacgagtgacgcttccgttgaatgggaggactacggctcattctacttcgttgttcctcaagtcgagttcaatgagctcgaggagagctcagtcctcgcgacgaccatcgcgtgggacgactcgctctcatggacatggcacaacgccgtggaggagctccaatcgactctgcgaaagatatcgccttgctcttctgttcaagcgaacaaggccagcctacagacagccatcgtaagtctcaatcatgtcccgaccaaggcgtcttgggatcttgcagttactaaagctctccatatgatcaagggcaggcaaagagaattggtaaaggttgtactggcaaggtgtagcagatacattactgacacttgcattgaccctgtggaactgctggcttgcttgaaggctgagggccaaaatgcttatcaattctgcatacagccaccgggtgctcctgcgtttgtcggaaatagcccagagcaactatttcatcggaagtacttgaacatttccagcgaggctctagctggtactcgggcaagagggaagacaagggcagatgactttcaaatcgtagcaaagaggacatcgaattcactatagtacgggacagcatcaagaacaagctggagatgatctgtgatgaggtggttgtccatcccagcaaggctctgcggaaacttccaagagtccagcatctgtcagcgcagttagctgcgcgaataaggaacgaagatgatgagtttgagattctaaacaccctccatccgagtccagctgtttgtggcttgcccactgaagaggcacgccaattcatacgggattgtgaaatttttgaccgtggaatgtatgctggtcctgttggctggcttggaggagctgagtgcgagttcgctgtcgggattagatcagcgttacttggaaaaggtcacagcactctggtgtacgccggtgcggggatcgttgaaggtacaaacccatcttttgaatgggatgagcttgatctcaaagcatctcagtttgcaaagctgttgcggtaccaagaacgacctattcgctaccaagaggctgaaaatctgggaacggtgatctgaatagagaagtacagaagaaactagaaagtcatcacaaagttcggcattcatttagcgagttatttatacaattgtttgtttgatatagtaagctagaagggggattcagttggatttgtgtaattatggaatccagaacagcggcagtgctgaaaaatacattgattgaacctgaatgggaaattgttcaatgtaacaaaaatatgtttacaacataaactatttgattgaatcagtgcgtgaatgtgac

SEQ ID NO: 2960 - DNA, 1118 bp, Zea Mays
gaccctgtctctctgttgtatcctttcccctgtctctgcagcagagcagttcctttcttgttgtcttgctctactccccagtccccagaccccagtcccccactcggacctggggggcatcgcaccgaggacgacctcacgctggggcgggccttgcggctcgaagctggaggaagcggacgggttcgccatggggtccgagggatcctcgggtccagttgtcgttcccagaaactttaggctgctagaagaactagaacgtggtgagaagggcattggtgatggaactgtgagctatgggatggacgatgctgatgacatatttatgcggtcctggacaggaactatcattggtcctcccaacactgttcacgagggacgaatctatcagttaaagctgttttgtgatacagattatccagataaaccaccgactgtccgattccagactcggatcaatatgacatgtgtgaaccaagaaactggattggttgaaccaagtctatttcctatgcttggaaagtgggaaagggaacatacgatggaggacattctgaccagcttaaaaagggagatgtcaactccacagaatcgcaggctgtaccaacctcatgaaggcaatgaagaccaaagagtagagcagaaaggggtgtctcttagatgtgtcatcatgtaatctatgtgcgttgcaatgtacagcattattgaattgagcagcgagatgccgaggtgagagaccctctcaggaaatcatgtggttcgccttaatgttaatggtgccaccatcgcaataaaagcgtcgatgattgttaaagtgcctgcacaccatgtaacgtgtaacccagttcgttcagattctgtgaaagacaacgagttcagtgtctgtttgttaagggctggctctaggcctggttattttctcgaggaaacaccgtgctctttcgaccatgcgtaacgaattgtaccgattctgaacaagtcgcgaaaggctgataaagtaccagagacacgcacgcatcaccttgagaagtcgggatgagctgagttaggcttgttcgtttgtgccggattggtggatcggaacgatttttatctagattgtttctttaatttatata

SEQ ID NO: 2961 - DNA, 963 bp, Zea Mays
cctgtcccacccctgccttcccatctcccatcgcaagaaaaaggaaatcaaaacaaagtaaagtggggggaaaagcatggcgatagctcttctcccatccgttcgtcttcttccacaaagtctctccagaaggccaccaccaacctcgtcgccattatccgttcgccgcccacggccaagagcccttcccctccctcgcgtccactgccgcgccggccggaccccggaccccctcaccgctgctagggaggctgctgccttttgggctgggaagctcgccggcgctgtgccatggaaggccgcggtctccggcgtggtcgccctcgccgtctccttcacctgccttgttggtttggccaatgccagaactggggaaaaccgtttgcgccaagagatagaagacctggagaaagatacagggtacaaactgcgagttcttgcacaaaattatcctgatacacctggattggctatcaaagatttttggcaggttgatgagcgtactattgtttttgttgctgatccaacctttggtaacataataaattttaacattggtccattagttgatttagacgtccctcggagcttttggagtcaggtttcagggaagtatgggaacatgttctactggaaagaaaagggagaggacgcctcaatcgaagctgctgtgacggcaatatctcgatgtctaaggaaccccgccgggacaaataactgttcggaggtattatagaaagtgatgagttatgccgcacaaaggaacatggaaatgacagatgcatgtgtacagaagtgaaatactagaacaacatagaggctaaagatgtctcatggtctccagagaactaaggcttcactctttgaaatcgagagcttttatctggtcgtgaatatggatagttttacaatgtgactggattttaaaatgtctaaataagagagaaatttgagatcttcaaa

SEQ ID NO: 2962 - DNA, 2500 bp, Zea Mays
tgtcaccgcatcgcctccctgtctgtccgcttccgccgcgcccgattccttccccgatcccgcacggccgtccgatcacggatcatcgtacgggtacggcgtacgccatcaggttccagcgttcttccccccgcttcaccttgtccccttcccttccccaccactattcctccaccacctccatccgccactctaaagtctccaagcttccccactccaccgcagcgaagaaatttctctacccccgcaacccccctaaaatcctcgtcgctacgacaggggatccctcccccaatgcggctgctcccgctcctcctgctcctcctcgccggcgccggcgcccgcgcctccgacgaccccttcctctccggcggtaggcgctccctagctcggcccctcctcccccttacataatacaagttttttcgttcgattcgcggctgcaatgcagacggcgcgagcgagtgctaacgccgtgtggtctcctccgtctctccccgggccgggcgcagcggcgaaccacagctacaacatcgactgcggcggcgcggcggacttcacctcggccttggggcgccggtggctcgccgaccggttcttctccgcgggcggggccgccggcatggtggcggagccgcaccgcttcccgcagccgcaggagcgcacgctccgcttcttcccgccctcctcggccggcaagtcctcctgctactcgctcccgcttccccccggccgctactacctccgcctcttctccgtctacgacaactacgactccaagctgcgcacgccctccttcgacgtctccgccgccgccacgctcgtgctctccttccgctcgccctggcccgagcccgccgcgcgctacggggcctactccgacctcatcttcccctccgccaccgagcccgcctccgacctctgcttctactcgctctccaccgacgcgcccgccgtcgcctccatcgaggtctcccccgtccacccgctcgcctacgacggcgccaccaccggcgccgacctcgtcctcgtcaactacggccgcgtcacctgcgggaacagcctcttcggccccggattcaccagggacgccgacgccttctcgcgggtgtggcaggcggacgtcgatttccggaacaacgacctcagctacgacgccatcactgcgggcgggaggaaggtctttggcagcaaccagccgcccaactacttccccaccaagctgtacgagtcggcggtcaccacgggcggtgacgccgccaatgagatcgagtacctcatgccggtcgacacgaggctgtcctacatggtctggctccatttcgccgagatcgatgctgggatcggctcacctggccagagggtgttcgacgtagtgctggctggggagaacgtcacgaggatcgacatcttcaagcaggtcggaggcttcacggcgttcaagtggacctacattgtcaagaatctgacaagctcgacgttgagcgtcaggcttgtgccagtggtgggacggccgattctgtgcggccttgagaattatgcgatggtgccacttgagatgaggacagtgccgagccaagtggctgcaatgaaggcgttgaaggagtcgctgaaaattcctgccaggatgggttggaatggtgacccttgtgcaccgagggcatgggatgcatgggagggagttacttgccatcgcggtgacaaagggcttgtgataacacaactggatctggcgagtcaaggactaaaaggttacatcaccgatgaaataagtcatcttaaagacttggtaagcttgaatttgagctataattcactgactggaagcttaccacctggtttaggtcaaccttcacttgtgtcactggatatttcatcaaatgagtttactggaagcattcctggaaccataggttcatccaagttacagactgcattactaaacaacaatcaactcgatgggcaagttccagaaagactttactcaattggcgtgcatggtggcgtgatagacctctcaggtaataaaggtttgtgtggcgtgcctaccttacctgcttgtgcattattctgggagaaaggagggttgaacaaaactggcaaaattgcacttggagcatcgtttgggtttgttctgctcgtcatacttatagtggtctacatactgtgcatcagaagggggccatatgactatgattttgacttccctcaagatttgacctccatatcagcaatatcagcgaaaaggaataggtaccagagggcaaaatccgtgatgcttgctgagatggaggcacataacccggatggtttctacacaaacgggagccctcactaaatggcatgctcagaagttggtcgccctgatggccatattctttgaggaagcactcaccgtggtcttgcatcttcactcaggttccatgccatggcaggtccgcaggtaatgaagaacactgaacaacactgcgaatataaggaagcattgttagtagagaga

SEQ ID NO: 2963 - DNA, 1858 bp, Zea Mays
cttgtacagcaactggattgtatggacggaggagcctgagttagattctggttctgcatgagcaataagttataaactgttcaggattccctcgtaggcttttcatgttctggtactggatgtgcagttttgggaggcattgctacagagataggacttctagctgaaattgttgcccattgatcacgctttatcctattcctaagttatttgatgaatgttcatgctgtttgtgttctcagttgtcactatcaaataggtagttatccgagggtggtctcattgactgcagatctctaggtgatagctgggcatgaaggaaccagtttgcatctattcagacctacaaccttcaacttgcattgtgtttgttcagtgtcttctaccttgaagtagttaatgattagggtcattattgcaggtcttactgctattttttgcttgggcttgtcatcgtggattatgtgttgggggggaacttggtacagccatccatggtatcagaatatgacctgggaggagaaggggacctgttcaaagctccagaagccatcatcgaggaaccgctgctcctgaactgtctgtctgattctgttcatttgttgttgtgtaggctgggcttgtgccaagcttgaatcctcttgtgaaggagtttctcaatgctgctgatgacaagcggaaggaagtcctctctaaaatagaagaggatgttgctaagctcagcggttctgcagccaaatctcgcgtctagaattgccgctagatgggggaggtgagcggctcctggtctcttcgatccaatctaagaagctacaagtgaatgccgaggagagcagcgatgacttggctaacccaccgaaggtagaggagaagcttggtgctgtccctcatggcctgtccaccgactctgaggttgcccagagggaagccgagtctatctctaggaagactctcaggagctcagccgagaagtttgagttccaagctgaggtttccagactcatggacatcatcatcaactcactctacagcaacaaggatatcttcctgagggagctcatatctaatgcctctgatgctggataagattaggttcctttcccttactgataaggaagttctgggtgaaggggacactgcaaagcttgagattcagattaagttggacaaagagaagaaaatcctctccattcgggataggggtattggtatgaccaaggaagatcttattaagaaccttggaacgattgctaaatctggcacttcaggtacttcaggtactgccttttcatctttccagctgattactgcactcataatatttgtttatgagtgcaggaacaggagctgctcgagtctcttgtcgaagctgatacgagaaggcaggaaagagctaaaaagatggaagaaaagaaagtgtatctgcaactatacgaagcaatggaggcgttggtcaagatcaatctggagacgaacaagatcatggacttcatcaagtttgacgtcggcaacgtggtcatggtgactggcgggaggaacaccgggcgtgtaggagtcatcaagaacagggagaagcacaagggcagctttgagaccatccacgtgctgcttggagctttttgctatgtctagttttctcctatttgttgtacaggaaaacatagaatagaattcaaatttggtggtcgcaaaagtgtggagactttaattcatataaagttaggcttaacattagtgcaaacagttgtattttagtttagatttagagtacacttatgtatgcattgtttgacaatgtttatttatgatatattaaatggtacttatttatattatattaattataatgttgttcaat

SEQ ID NO: 2964 - DNA, 2414 bp, Zea Mays
tgcgggcctgcggggtgctggcgctgcgccgctgccaacctgcccccactgcccgtgactgctgactagtgactagtctctcagtagccgctccataaaatggggccgagcgcgctcccacacccagactagttccgctgaccgcttgaactctcctccctcgcccgcgcgtctccgccgccccaccggccaccgcccgcgcctccgccgcggcagctgtccaaaagctgaaaatagatagaatcacgagggggggattgcctagacaacgatccttagttaatcaaacacgggctgccagattcgggggggcgttcgcgttcctaccctctcatcactctccccgtaaaaccccggctgggtttatctcatcgccgccgggcggcgagcggtgggaggcaatggcagggtgggggccctccaggctgccgacgtgcgggccgtggggccgcggcgtggcgctggagagggagctgtcgcgggacggcagccactacagcatctccagcggcatcctgccgtcgctcggcgcgcgcagcaaccgccgcgccaagctcaggcccttcatcgtctcgccctacgaccgccgatacagatgctgggagacttttctcataattcttgtgatatactctgcatgggtttccccatttgagtttggcttcattcggaaaccggcgggcgccctagctgcagtggacaatgtcgtgaatgcgttcttcgcagtggacatcatcctgaccttctttgtagcttacttggatagaatgacatacttgcttgaagatgatccaaaaaggatagcttggcggtatactaccagttggtttattcttgacgtggcctctaccatcccaagtgaatttgctcggaagatactgccaccaaacctcagatcatatggatttttcaacatgcttcgtctatggcgtctccgtagagtcagctctctctttgctagattggagaaagatagacatttcaattacttctgggttcgatgtgcaaagctcatatgtgtcacactttttgccgtccactgttcggcatgcttctactatcttctcgctgacaggtatcctgacccaacggatacgtggattggcaattcgatgccagattttcatcagcggggtttgtggattcgatatgtagtatcagtgtattggtcaatcactactcttacaactgtgggttatggtgatttgcacgcggagaacacaagggagatgatattcaacattttctacatgctattcaaccttggattgactgcctatttgattggtaacatgaccaatctggttgtccatggcaccagccgtactcgaaaatatagggatacaattcaagcagcaaccagctttgcactaaggaatcagttaccaagtcggctccaagatcagatgatctcacatcttagcttgaagttcagaacagattcagaaggtcttcaacaacaagagacccttgatgcgcttcccaaggctataagatcaggcatttctcagtatctgtttttcaatcttgtccaaaaagtttacttgtttgaaggggtgtccaatgacctaatttttcaactggtttctgagatgaaagctgaatattttccacctagggaagatgtgatactgcagaatgaagcacccacagacttctatattttagttactggtagcgcggagttgatagagttgcgaaatggcggggaacagatggctggagtggctaaggcaggagatgttgtcggagaaattggggttctttgctataggccccaactattcacagttcgaacaaaatcattatgccagcttctgcgtatgaatcgcactgcctttctcagccttgttcaatccaatgttgcagatggaacaataataatgaacaaccttatgcagttactaaaacagcagaaagacaacagtgtaatggtgggtgttcttaaggagattgagaacatgctagcgcggggtcgtctggacttgccaattaccctctgttttgcggtaaataaaggagacgatttaatgttacatcaacttctgaagcgtggtttggatccaaatgaatcagataacaatgggcatacagcactgcatatagctgcttccaaaggagacgaacaatgtgtcaagcttcttctagactacggagctgatccaaatgctagagtgcaaaatatgaaatacgatagagaatggaacaggagagctgctagagaagcggcctgcaagctttggatgggccagccctgtgtgggctagagaagcggtctgcaaatgggaaaatccccagcccaatcttggaaccttgcagtttgtcagcaataacaataatcagcatcaatattcattcagtcctctcataaaggaaatcaatcccgcgagtgtaaacagccaactaccaatctg

SEQ ID NO: 2965 - DNA, 2551 bp, Zea Mays
aatttactgagttgtttagttacgttacgtggatgctgggagacttttctcataattcttgtgatatactctgcatgggtttccccatttgagtttggcttcattcggaaaccggcgggcgccctagctgcagtggacaatgtcgtgaatgcgttcttcgcagtggacatcatcctgaccttctttgtagcttacttggatagaatgacatacttgcttgaagatgatccaaaaaggatagcttggcggtatactaccagttggtttattcttgacgtggcctctaccatcccaagtgaatttgctcggaagatactgccaccaaacctcagatcatatggatttttcaacatgcttcgtctatggcgtctccgtagagtcagctctctctttgctagattggagaaagatagacatttcaattacttctgggttcgatgtgcaaagctcatatgtgtcacactttttgccgtccactgttcggcatgcttctactatcttctcgctgacagggatacaattcaagcagcaaccagctttgcactaaggaatcagttaccaagtcggctccaagatcagatgatctcacatcttagcttgaagttcagaacagattcagaaggtcttcaacaacaagagacccttgatgcgcttcccaaggctataagatcaggcatttctcagtatctgtttttcaatcttgtccaaaaagtttacttgtttgaaggggtgtccaatgacctaatttttcaactggtttctgagatgaaagctgaatattttccacctagggaagatgtgatactgcagaatgaagcacccacagacttctatattttagttactggtagcgcgatggctggagtggctaaggcaggagatgttgtcggagaaattggggttctttgctataggccccaactattcacagttcgaacaaaatcattatgccagcttctgcgtatgaatcgcactgcctttctcagccttgttcaatccaatgttgcagatggaacaataataatgaacaaccttatgcagagttttgacatagaaaagttactaaaacagcagaaagacaacagtgtaatggtgggtgttcttaaggagattgagaacatgctagcgcggggtcgtctggacttgccaattaccctctgttttgcggtaaataaaggagacgatttaatgttacatcaacttctgaagcgtggtttggatccaaatgaatcagataacaatgggcatacagcactgcatatagctgcttccaaaggagacgaacaatgtgtcaagcttcttctagactacggagctgatccaaatgctagagactctgaaggaaaagtgcctctatgggaggctttatgtgaaaagcacaatgcagtgatagagctgttagtagagagtggtgcagagctatcatctggagacacggccttgtatgcttgcatcgctgttgaggaaaatgatgctgagctgcttgagaacgttatccgttatggtggcaacataaacaacccaacgaaagacggaaccacaccgctgcatcgtgcggtctgtgatggaaatgttcagatggttgagttgttgctggaacacggagctgacgtcgacaagcaggacagtaatggctggtcgccaagagatctagctgatcagcaaggccatgatgacattcaggctctcttcaaatcacgaaaagcacacaggaagcatgcctcaaatggcagagtggcacctatgctgatagggagattcaacagtgagccctcgatgccagatatgagccatgaaaacgccagagtacgcagcgaagttgttccgcagaagctcctccgaaagagggtgagtttccagaattctcttttcggcgtcatctcttcgtcccacgcccaccaggacaccggccgtctgctctcgaaaggcctcgctggaacagagggtccaaattgccgtcacgactccctcatcagggtgacaatcagctgccccgagaagggggggaacgccgcagggaagctcgtgcgcctaccgcggtcgatggccgagcttctcgaactaggtgcaaagaagttcggcatcaagcctggcaaggtcctgacagttgggggtgctgagattgatgaggtggagcttatcagagacggtgatcatattcttctcgtcagtgatgaatgggtgccagatgttgagcaaattaggccttaacaataagtgagccagctgtggtgctcttattgcaatttgacatgatatggggaaacatgcccctgtgaccctgtgtgcatcagtgcatgtcccccatttaaactgaagtgtagcttatgatggttttgaagctgtaggatgtatccagcttggaaatgaatttgtagtcagctggtctgtatgtagtttcgtcatctctttccatgggaagggattcacaaaatgtaattacatgatttcttttttttcctgtctttagatcaagctttctctggaagtgagaaatattcgtgagtcatgaattttgagatattgatcctatcagttcattttagttgct

SEQ ID NO: 2966 - DNA, 3194 bp, Zea Mays
gcggaatccgttgatggtatttctctctcggctgctgctgctgctggcgctgccgcactgccgctgccgccgccgccgctgcctgcggggtgcggccgtgcgggcctgcggggtgctggcgctgcgccgctgccaacctgcccccactgcccgtgactgctgactagtgactagtctctcagtagccgctccataaaatggggccgagcgcgctcccacacccagactagttccgctgaccgcttgaactctcctccctcgcccgcgcgtctccgccgccccaccggccaccgcccgcgcctccgccgcggcagctgtccaaaagctgaaaatagatagaatcacgagggggggattgcctagacaacgatccttagttaatcaaacacgggctgccagattcgggggggcgttcgcgttcctaccctctcatcactctccccgtaaaaccccggctgggtttatctcatcgccgccgggcggcgagcggtgggaggcaatggcagggtgggggccctccaggctgccgacgtgcgggccgtggggccgcggcgtggcgctggagagggagctgtcgcgggacggcagccactacagcatctccagcggcatcctgccgtcgctcggcgcgcgcagcaaccgccgcgccaagctcaggcccttcatcgtctcgccctacgaccgccgatacagatgctgggagacttttctcataattcttgtgatatactctgcatgggtttccccatttgagtttggcttcattcggaaaccggcgggcgccctagctgcagtggacaatgtcgtgaatgcgttcttcgcagtggacatcatcctgaccttctttgtagcttacttggatagaatgacatacttgcttgaagatgatccaaaaaggatagcttggcggtatactaccagttggtttattcttgacgtggcctctaccatcccaagtgaatttgctcggaagatactgccaccaaacctcagatcatatggatttttcaacatgcttcgtctatggcgtctccgtagagtcagctctctctttgctagattggagaaagatagacatttcaattacttctgggttcgatgtgcaaagctcatatgtgtcacactttttgccgtccactgttcggcatgcttctactatcttctcgctgacagggatacaattcaagcagcaaccagctttgcactaaggaatcagttaccaagtcggctccaagatcagatgatctcacatcttagcttgaagttcagaacagattcagaaggtcttcaacaacaagagacccttgatgcgcttcccaaggctataagatcaggcatttctcagtatctgtttttcaatcttgtccaaaaagtttacttgtttgaaggggtgtccaatgacctaatttttcaactggtttctgagatgaaagctgaatattttccacctagggaagatgtgatactgcagaatgaagcacccacagacttctatattttagttactggtagcgcgatggctggagtggctaaggcaggagatgttgtcggagaaattggggttctttgctataggccccaactattcacagttcgaacaaaatcattatgccagcttctgcgtatgaatcgcactgcctttctcagccttgttcaatccaatgttgcagatggaacaataataatgaacaaccttatgcagttactaaaacagcagaaagacaacagtgtaatggtgggtgttcttaaggagattgagaacatgctagcgcggggtcgtctggacttgccaattaccctctgttttgcggtaaataaaggagacgatttaatgttacatcaacttctgaagcgtggtttggatccaaatgaatcagataacaatgggcatacagcactgcatatagctgcttccaaaggagacgaacaatgtgtcaagcttcttctagactacggagctgatccaaatgctagagactctgaaggaaaagtgcctctatgggaggctttatgtgaaaagcacaatgcagtgatagagctgttagtagagagtggtgcagagctatcatctggagacacggccttgtatgcttgcatcgctgttgaggaaaatgatgctgagctgcttgagaacgttatccgttatggtggcaacataaacaacccaacgaaagacggaaccacaccgctgcatcgtgcggtctgtgatggaaatgttcagatggttgagttgttgctggaacacggagctgacgtcgacaagcaggacagtaatggctggtcgccaagagatctagctgatcagcaaggccatgatgacattcaggctctcttcaaatcacgaaaagcacacaggaagcatgcctcaaatggcagagtggcacctatgctgatagggagattcaacagtgagccctcgatgccagatatgagccatgaaaacgccagagtacgcagcgaagttgttccgcagaagctcctccgaaagagggtgagtttccagaattctcttttcggcgtcatctcttcgtcccacgcccaccaggacaccggccgtctgctctcgaaaggcctcgctggaacagagggtccaaattgccgtcacgactccctcatcagggtgacaatcagctgccccgagaagggggggaacgccgcagggaagctcgtgcgcctaccgcggtcgatggccgagcttctcgaactaggtgcaaagaagttcggcatcaagcctggcaaggtcctgacagttgggggtgctgagattgatgaggtggagcttatcagagacggtgatcatattcttctcgtcagtgatgaatgggtgccagatgttgagcaaattaggccttaacaataagtgagccagctgtggtgctcttattgcaatttgacatgatatggggaaacatgcccctgtgaccctgtgtgcatcagtgcatgtcccccatttaaactgaagtgtagcttatgatggttttgaagctgtaggatgtatccagcttggaaatgaatttgtagtcagctggtctgtatgtagtttcgtcatctctttccatgggaagggattcacaaaatgtaattacatgatttcttttttttcctgtctttagatcaagctttctctggaagtgagaaatattcgtgagtcatgaattttgagatattgatcctatcagttcattttagttgct

SEQ ID NO: 2967 - DNA, 3288 bp, Zea Mays
tgctggcgctgcgccgctgccaacctgcccccactgcccgtgactgctgactagtgactagtctctcagtagccgctccataaaatggggccgagcgcgctcccacacccagactagttccgctgaccgcttgaactctcctccctcgcccgcgcgtctccgccgccccaccggccaccgcccgcgcctccgccgcggcagctgtccaaaagctgaaaatagatagaatcacgagggggggattgcctagacaacgatccttagttaatcaaacacgggctgccagattcgggggggcgttcgcgttcctaccctctcatcactctccccgtaaaaccccggctgggtttatctcatcgccgccgggcggcgagcggtgggaggcaatggcagggtgggggccctccaggctgccgacgtgcgggccgtggggccgcggcgtggcgctggagagggagctgtcgcgggacggcagccactacagcatctccagcggcatcctgccgtcgctcggcgcgcgcagcaaccgccgcgccaagctcaggcccttcatcgtctcgccctacgaccgccgatacagatgctgggagacttttctcataattcttgtgatatactctgcatgggtttccccatttgagtttggcttcattcggaaaccggcgggcgccctagctgcagtggacaatgtcgtgaatgcgttcttcgcagtggacatcatcctgaccttctttgtagcttacttggatagaatgacatacttgcttgaagatgatccaaaaaggatagcttggcggtatactaccagttggtttattcttgacgtggcctctaccatcccaagtgaatttgctcggaagatactgccaccaaacctcagatcatatggatttttcaacatgcttcgtctatggcgtctccgtagagtcagctctctctttgctagattggagaaagatagacatttcaattacttctgggttcgatgtgcaaagctcatatgtgtcacactttttgccgtccactgttcggcatgcttctactatcttctcgctgacaggtatcctgacccaacggatacgtggattggcaattcgatgccagattttcatcagcggggtttgtggattcgatatgtagtatcagtgtattggtcaatcactactcttacaactgtgggttatggtgatttgcacgcggagaacacaagggagatgatattcaacattttctacatgctattcaaccttggattgactgcctatttgattggtaacatgaccaatctggttgtccatggcaccagccgtactcgaaaatatagggatacaattcaagcagcaaccagctttgcactaaggaatcagttaccaagtcggctccaagatcagatgatctcacatcttagcttgaagttcagaacagattcagaaggtcttcaacaacaagagacccttgatgcgcttcccaaggctataagatcaggcatttctcagtatctgtttttcaatcttgtccaaaaagtttacttgtttgaaggggtgtccaatgacctaatttttcaactggtttctgagatgaaagctgaatattttccacctagggaagatgtgatactgcagaatgaagcacccacagacttctatattttagttactggtagcgcggagttgatagagttgcgaaatggcggggaacagatggctggagtggctaaggcaggagatgttgtcggagaaattggggttctttgctataggccccaactattcacagttcgaacaaaatcattatgccagcttctgcgtatgaatcgcactgcctttctcagccttgttcaatccaatgttgcagatggaacaataataatgaacaaccttatgcagttactaaaacagcagaaagacaacagtgtaatggtgggtgttcttaaggagattgagaacatgctagcgcggggtcgtctggacttgccaattaccctctgttttgcgcatatagctgcttccaaaggagacgaacaatgtgtcaagcttcttctagactacggagctgatccaaatgctagagactctgaaggaaaagtgcctctatgggaggctttatgtgaaaagcacaatgcagtgatagagctgttagtagagagtggtgcagagctatcatctggagacacggccttgtatgcttgcatcgctgttgaggaaaatgatgctgagctgcttgagaacgttatccgttatggtggcaacataaacaacccaacgaaagacggaaccacaccgctgcatcgtgcggtctgtgatggaaatgttcagatggttgagttgttgctggaacacggagctgacgtcgacaagcaggacagtaatggctggtcgccaagagatctagctgatcagcaaggccatgatgacattcaggctctcttcaaatcacgaaaagcacacaggaagcatgcctcaaatggcagagtggcacctatgctgatagggagattcaacagtgagccctcgatgccagatatgagccatgaaaacgccagagtacgcagcgaagttgttccgcagaagctcctccgaaagagggtgagtttccagaattctcttttcggcgtcatctcttcgtcccacgcccaccaggacaccggccgtctgctctcgaaaggcctcgctggaacagagggtccaaattgccgtcacgactccctcatcagggtgacaatcagctgccccgagaagggggggaacgccgcagggaagctcgtgcgcctaccgcggtcgatggccgagcttctcgaactaggtgcaaagaagttcggcatcaagcctggcaaggtcctgacagttgggggtgctgagattgatgaggtggagcttatcagagacggtgatcatattcttctcgtcagtgatgaatgggtgccagatgttgagcaaattaggccttaacaataagtgagccagctgtggtgctcttattgcaatttgacatgatatggggaaacatgcccctgtgaccctgtgtgcatcagtgcatgtcccccatttaaactgaagtgtagcttatgatggttttgaagctgtaggatgtatccagcttggaaatgaatttgtagtcagctggtctgtatgtagtttcgtcatctctttccatgggaagggattcacaaaatgtaattacatgatttcttttttttcctgtctttagatcaagctttctctggaagtgagaaatattcgtgagtcatgaattttgagatattgatcctatcagttcattttagttgct

SEQ ID NO: 2968 - DNA, 2101 bp, Zea Mays
gtgccgtctagtcttccgcccctcttcttcccgggagagctcgagctcctcctcttcctatcgctgcgtgcctcgcagctccgccagctgcaccttccacccctccctagcggtatatggcatccccgtcctcctgcaacgccacgggcgtgccgttcaccctgctgggcgcgctcatcaccgccggacccgccgcctggccggcctgcgtcggcggcggccgcgccttcctccgggactacgcgcggcgcgggaccaacgcgctgctgtgggcgggcctcctcgccgtcacctggctcctgctcctccgcgtcgccgcgcttctccgcctctgggcgctcggctcccgcatcccggggccccgcgcgctaatcgccgaccccgggctcgcctccgtcttgcgcaacggcggcgacatctccggttttctatcaaaattgcatgggagatatggcccagttgttcgcctgtgggtgggaccctcccagctacttgtatcagtcgtagatcctactctagttaaagaggtgctgtcaaaggctaaagataagttaccattgactgggaggacatataatttagcttgtggaagacttgccttgtttgtgtcctcgttccagaaggtgaaaaggacaagagattctctgaaaatattcttgaatgaaagacttacagttggtactggtcaaagctcattcaaaattattgatgctgtcctgaatagaatcgactctattatgtccaaggattttatggacactagatctttctcccagcacatggcatttaatattatcagtgcaactcttctgggtgatgccttcttcgattggtctgatgctgctgcgtatgaggaacttcttatgttggtcgctaaagatggttgcttctgggcttcttacacaattcctccattttggaggcctagctataggaggtatcagaccctatgtgctaagctgaagatattaacagagagcgtcatcagaaaatcaagataccaaaatagttcgcttcaccattttgatcagagatcttgtcagaaaagtgaggggacagatccacatagaagtgttttagacaacatgatgcgaagtcattgcctccatggggctgctaaaggaccacttaatttagaagaggaaacatgtggaaacatcatgggtttgatgttgcatggtatttccacttctgctaacttgattggtaacattttgacaaggcttgtcttgtttcctgaattgcaagatcagatttgactcttggctcaggtgtcactgtgccagcgcgatcaatattagtagttcctctgcatctcgtgcaaatggatgcttctgtttggggtgatgatgccgaccagtttaatcctcatcggttccttaaaagggacattgatcttggagaaatattaggagcacctaaaggatcaactaggttaaatatttccagtgagtgtaccaaggccgaatcatttcttccatttggttctggaagtcgagcatgtgttgggcagaagtttgtggttctggcaatatcgatgttgattgccagtctgctccgcagctatgaggtacaacctcatccaagtttgtctaaagaaatggacacaacagttgatagcagccaccttcatcttccaaaccctaagatcatcctcaccaaaagaaggatctgaagggagagtttggcaaacgaaaatctggcacgtttgctttcactgtattgtttttcactggtgttacaccagtatatgatctttagtttcctaccgtcgtttggaccatgctgaagtttggaaaggcgaccttgacgatgcggaagtgccttttttcctccggatttttgacagaccctgtgtgcttcgttggatctaagtttttgtcaggtttttggagcacagggctgttagatcacaggagacgtatgctgatgtgtataaacagactcgttttttcagttggggttttctcctatctgtggagaatgtaattaatgtccaacgcatgatgtcgctcgccacatatattttattgtatcttacttgcatataaacatgtgagcttattgtttggaccataatttgtgataaatctgtgggagt

SEQ ID NO: 2969 - DNA, 3223 bp, Zea Mays
taagcatctggagaagtatggaattcctgtgcccagttatgctcttgtcaatagagaatatccggaccaagagctagactacttcatcgagcaagaagattttgttgaggtccatgggaagcggtttttgaagccttttgtggagaaacctgtcaatggggatgatcaccgaataatgatatattatcctagttctgctggtggtggaatgaaggaattattcagaaaggcgggaagaaagaaggttttgccgccaaacatgcaaaagcagcgcacacggcgcgcaacaacgcgtcgattcacgctaggaaattttacatgaggtgggtaaccgatctagtgaatttcatcctgatgttaggagagtgagacgtgaaggatcctacatatacgaggaattcatgcctactggtggcactgatgttaaagtttacactgttggcccaggatatgcacatgctgaggcacgtaaatcgcctgttgttgatggtgttgttatgaggaaccctgacggcaaggaagtacgataccctgtacttttgacccctactgagaaacaaatggcaagagatgtctgcaatgcttttagacagatggtttgtggttttgatctcttaagatgtgatgggagatcatatgtctgtgacgttaatggatggagctttgtgaagaactcatataagtattatgatgatgctgcttgcatcttgagaaaaatatttcttgatgcaaaagctcctcatctttcatcaaccatccctccaactcttccttggaagtctgaaccagttcagcccactgaaggtcttacacgacagggaagtggaattattggtacatttgggcagtcagaagaactgcgctgtgtaattgttgtaatacgccatggcgatcggacaccaaagcagaaggtgaaattgaaagtgacagaagaaaagcttctgaatttgatgttgaagtacaatggtggaaaaccaagagttgagacgaaactaaaaagtgctgtacagttacaagacttgctggatgctacaagacaacttgtaccaccaactaggtctggtcgggagagtgatagtgatgctgatgatattgagcatatcgagaaacttcgtcaagtcaaagcagtcctagaggagggtggacatttctctggcatttataggaaagtgcagctaaagccattgaaatggataaaagttccaaagcgtaatggtgatggtgaagaggaacgaccgattgaagccctgatgattctgaaatatggtggtgtgctcacccatgctgggagaaaacaggcagaggagctgggaagatttttcagaaataacatatatccaggtgaaggaactggtttgcttcgtctgcatagcacttatagacatgatttaaaaatatacagctcggacgaaggtcgtgtacagatgtctgcagcagcatttgcaaaaggccttcttgatttggaagggcagttgactccgatactggtatctttagtaagtaaagactcatctatgctagatggactagaagatgcaagcaccgagatggatgaagctaaggctagattgcatgagattattatttcaagtgagaaagcaaagaacacagaagggccagtggaatttccatggatggttgatggtgcaggattgcctgcaaatgcttcccagctcctgcctaagatggccaagttgacgaaagaagtgacttcacaagtaaagctgcttgctgaaggtgaagatgaaagacttgcgttgacgagcacattttcaaaatatgaccaggcaaaagctcttggaaagacaactattgatgtggctcgtattgctgccgggttgccatgtggtagtgaaagcttcctcttgatgtttgccagatggagaaaacttgagagggatttatacaatgaaagaaaggaccgttttgacattacacagatcccagatgtatatgattcctgcaagtatgaccttttgcataatgctcatctcaatcttaagggtttggaagagctattcaaagttgctcaaatactcgctgatggtgttattccaaatgagtatgggatcaacccaaagcaaaaactgaaaatcggctcaaagatagcgcgccgtttattgggaaaaatcctaatcgatctacgcaacactcgtgaagaagctatcagtgttgccgaaccaaaatttattgaagacgaagctctattcctaccaacaaaagaagcagagcaccagcagaaggttcatgttagaaatgaggatggaagaagatctagctctacgagtgagaagtcattggaccaagaagatgaagatgatagagaaactaaataccgattagatcccaagtatgccaatgtaaggacacctgagcgccatgtccgcactaggctttacttcacatcggaatctcatatacactcattgatgaatgtccttcgttactgcaatttggacgaaagtctacaaggagaggaaagccttgtctgccagagtgctttggaccgtctacatagaactagggagcttgattacatgagtaatattgtgcttagaatgtttgaaaacatagaggttcctttggaagatgagaagaggttcaggattgaaatgacgttcagtcgtggcgccgatctcagtcccctagaggacaaaaccagtgaaagttcttccttgctccaggagcacaccttgcccataatggggcccgagagactgcaggaagttgggtcctgcctgaccatggacaagttcgagaaaatggtgcggccattcgccatgccgccggaggacttccctcctgccgctccgccacaagccttgggctacttctccaaaggggcaggggtgcttgaaaggttggctagcctctggcctttccacaagagcgctaacgggaagtagctggaagctaacaaatccctgaaaccagttcatgtggttattcttgttctgtaacactttctgcacgccagcccaattttgacgatctgaatcatagtgaaaattttgctggttctttttcatgagcgcgagacataattgtgctatcatgttgcttgcatggatctgagatttaagggtgcgtttggttgctggatagccaaaacaggaatgtcccctggtatcctctcttgtccctccaattttaaggaacaactggggacaatactagaataattctgtctcaatccttgatcctgaactaaacaaacttattt

SEQ ID NO: 2970 - DNA, 788 bp, Zea Mays
tccgtatcaatccaagtcatcccagataagtaacttcagcagtggttttaaacccccaggtggaagggagcgacacttggggctttaagaagacactactgctgcaaccatgagcaccatgaagttttgtcgcgagtgcaacaacattctgtaccccaaggaggacagggacaggcgcaccctgttctttgcatgtcgcaactgcgagcatcaggtgcaccatactgctggggagcgaacacaggtcttgcaggatgtagcttctgatccaactcttcccagaaccaagactgtccgctgcaatctctgtgggcatggagaggctgttttcttccaggccgcagcaagaggggaggaggggatgaccctgttctttgtgtgctgcagccctgattgtggtcatcggtggagggaatgatgcgatgaaatcttcgctctaatagttgtttcatcagagcatgaaacttaacttgttttgtagttttcttggactatgtatttcgaatctgacctaagattaatgagagaatgtctttccaatattttatttaattctacgcatatatgatatgtagctgcaccacatagtacgtagtctcatatgcttgttctgccccaaaactccgaggaggagcaaagaaggtattcttaatgagttaggaggtgtttggttagctctgcctagagttttcctacggatcaatgccaaacaccccataaattggagactcacatactgctctcctaaatgggagactctttgctttatgtacattttttccctcttc

SEQ ID NO: 2971 - DNA, 2072 bp, Zea Mays
ggcccttccacaaaataaaacgcttacacaaatcctcaacccctccgcctccgcctcgccacttcaacaccttcgtccagtcctttcctcgcgatcgcccaaatcctttcctccccgcccgcgccggcgccgctccgaatcccgagacgcccccgatgcccgccgccgtcgctgctgctgcggccgctgcgtcggccggtgcggtcctgctctgcctgctcctcaactgccgcccacagccggcgctggacgcccagagggagagtgaaaggggggaggacgaggcgtcgccgctcctgtcgggctcggggccggggagcgaccgcgaggaggaggagccgtggccggacagggcacccgtgacctgctgcgaggcggccgcggtagccgcgcgcacggcgcggcgcacgtgggagctcaccgtcgggcggtggggcctccacgggctcgccttcggtatcaagcgccacatgaagcgccagggtaatttgcagcatgagtacagtggaaatgactgtctccaacttaaaggacatcagacatatactgaagtatcttctctccttgagcacttgaagctttgcatgttcttctcaaagaaatctttttcagcatttctgaagtttggtgggtacaaacaagaagacattcttattcacaaggctagggcgagggtgactcatgcagccttcttttgcattggtgtgtgacaaaagaaccaagtgcttgctgcttttcattcgaggtgctatcagcactaaagagcgcctgactgcagcaacttctgctgaagttccttttcaccatataattctatctgaaggaaagatcagcaatgtagttttagggtatgcacactgtgggatgcttgctggagctcgttggatcgcaaaacttgttattccccatcttcataacaaaatgcaggaattttctgggtaccacataaaggtcattgggcattcaatgggagctggcattggagcgattctgacttatattctccatgagcattatgagttcttgtcatgcagctgtctggcatttgctcctcctgcatgtatgacatgggagctggcggagtcaggaaaggatttcatcacttctcttgtcaatagaaatgatgtggtaccagcattttcgaaagtttcttcggagagcctgcgatctgaggtgatggtttcatcaaagctggatgatgtgcaggatcactttcaccatggtttattcgccactataagccagcgtgttgccttcatcaggtcccatatgctctccatctctcactcaacagggaagattgcagattacggctctagtatttctgagcctttgcttaaagatacaataccgcccacagcaaatggacacggcgttgactgcagccagcagcaacaggtggttgcctctgaagaaacggtcgttgtactggttaacaataacgaccatttcaccagtttgaaggccgctgattcaggcgtcacatcacaagaaggttcagacagcaacgcggcatcatcggacagtccacaacggccgcccccgccggcagacgaagccccgaaccagaatggcaccggaaaggataagcagaaagaaccggtctcagcgggctgctcgtcgtcgcgccagctcttccctcctgggaggatcatccacatggtcgcgctgccgccgcagcagccggacccaaactccgacgacggcacgagcagcggtgaggtcgttggcatatacgagacgccgaggggtttgtacgggaagatacggctcgcgcccaacatgattaaagaacattacatgcctagctatatacgtacgatggaatcgttgttggaacagctccagaaggacgacgatgatggcagtgtatgtacatgtaccgcaccaagtgacctgtgaattcttgtggagaactcgggcagtgattattccaattctttcttaaccatttcgtattgcattattggaaaggaaaaaaaaagtacaataatgtgggtgtgtgtttggtaaaatatgaacgaaatgaacctcgctcaagtctcgaacgttgggccctagccccaacctgt

SEQ ID NO: 2972 - DNA, 2073 bp, Zea Mays
ggccgcccgtttttgttgtttacctcgcgccaccacccaagtgagtgacccatcccctccatcggactctccactcccaccgtctcacgaccacgaataccgccgcccccggccctttcctcgtctcctcctcctttcatcgccaccatcgccgtcggtgcgccttgcaggaggtgcgagaggtcggtcgaaaagcacagccatggcggcggtcaaggtggacaaggccaccaacgagctgctgctgggccccgactggaccctcaacatcgatatctgcgacgccgtcaactccgatcacgggcaaggaaaggaggtgattaaagctttgaaaaaacgtattcaacacaagaatgcaaatgttcagtttcttgctttgacgctattagagactctaataaagaactgtggggatcatgtacattatcaagttgtagagcgcaatatactggaggaaatgatgaagattgtgaagaaaaagcgatctggtgttgaatttccaaagcggtcacctgatgctgcatcgatgtttatttctccggtcacacagccagaatctttgccaacatatcttcaagcagggtatggaatgccagttgattcttcctcaaggcttgatgaggcaatgtcatcaaatggagctcctctgagcatctcagacttggaacgaatgctgggggctgtggaactattaaatgagatgttgagagctgtcaatccaaatgaaaaagatgctgccaatgatgaaattattacagaacttgtgacccaatgccggtcataccagaaaaagatcatgagttcagtaagcttagtaagggacgaggacctcttgggccaagctcttgatttaaacgatagattacaaattctgcttgagaaacacgattcaatcgcatcgtgttctccttcatctgctgacgtgatagacgtggtgtgtgaagtgccatcgggaacagctccaaaccaaggaacaaatttccctccacaagctgcacttcgtacagccatagtaccgaccaatgttttggacgacgaagatgaggaaaacgaagacgacgagttctctatgctagctcgaagcccacaaacacccagagcacctcttcaccaaccgtccatgatgaaacagcaagctctacagcctctgttccctatacagcatcgccatcagttgcgaacaacgcattgcctccgcacgatcctccagccccgccagtgagggtctctccagaagagcaggtcatgagtgaccttctcgcactcaccgtgtcatcaaacccgtcaccatcctcctacaccccggtaacacctgaaccaggccgcctgaatcaaagcagcgcaccaacaggtgagcttccgcgggcttatcatggagaccaaggacacgtgtctgcaccttacgtcgctccgtgggctcagccgcagtcccagaccgcaggaagtcagcaaccgacacgcactcaggcacaggtatcttacagctcgtatgcttacccaccgccgccatgggcgtcacaggacagcaccgaatcgaacccttttgtagcggcagcatcgtcatctcagcaataccagtccacttcgagaacccctaccatgccaccgaacttgaggcctctactacagcagtcgcattcttttggagtaccacttccaaccgcgagtctggactcgccaataaatgggaacctgaagcaaccgctgtctgctggggctcgcaggccatcttatgtttcttccaacaagttcttcgacgacttgtttgagaggaactcggatggtagcctgaaagtaggcagcacaaggcacagtgatgtctatggaaaataaatgtcgttctcttgtcctgcctgcgtttgatgttatcagctgcctgcatattagaacgatttagttgatgcttctggcgaacttgcttgcctttccataaataattttgccaaaccaaactatgtggaagcttcagcctatgagctgtccactgtccagacattttgaatggcaaaaggcgattcttcctaaattgtgtaatgaaacgggtttgcttctaaatatagtgttctttagagc

SEQ ID NO: 2973 - DNA, 2035 bp, Zea Mays
  misc_feature (2034)..(2035): n is a, c, g, or t
gcaccgcacgcccccacatttcccgcgccaaccgaccaggcgaacggcggccacgcccacgccatgggcaagcccaagcagcaagtgctctcccgcttcttctcccccaagcccgcgcccgtgctctcgtccgccgcccccgacccgccgcctccgcttcctcccaaccccaaaccctccgcggcgcatccgcccgtctctaccgtcgcctccttctcccccgctaaacgcgcgcgcgcgctctcactctcccccaaatcccccgccgccaaacggcccaatcccacccctcctccttcccgagacgccgtccgccgcaggctcctggagccgctccaccaggagccgcctcgcctcctggaccctacaggtggcggcaagggctacaccccgctggagcagcaggtggtcgacctcaaagcccgccaccccgacgttctcctcatggtcgaggtgggctaccgcttccgcttcttcggcgaggacgccgccgtcgccgccgcggtgctcggcatcgtcgcgcacccggaccgcagcttcctcaccgccagcgtccccaacttccgcctcggcttccacgtccgccgcctcgttgccgcgggccacaaggtcggggtcgtgcgccagaccgagaccgccgccatcaaggccgcggccaggggcgtcggaggcgccccgttctcgcggggcttgtccgcggtctacacgcgcgccacgatcgaggccgcggcaggcgagctggagggtggcggcgccgccgcgcccgaggaggggagcagctaccttgtctgcatcgtggataaggaggtggaggcggcggggagggaggggctccaagtgaaggttgggttggtggcgattgaggtgtccacgggtgaggttgtccacggggagttcctggacagcgactccaggagcggactcgaagctttgctgcttggattggcgcccgtggaggtcatcctcgggacaccactctcttttgccacagagaagattatgatggcatatgtgggacccacctctaatgtgcgggttgagcgtgtatcatgtgaatggtttggcaaagatgctgctttggctgaactgataactttatttgaaaagtctgtaaacaatgcttctagggctgaagatgataggaagctgatagaaacaaatgatgataacaacaattttcatgggattgagggtatcatggcgatgccagagctagttgttcaagcattagcattatcggttcggtatctcaaagaattttccttatcagcaaatgctcttcaacaacttgaggaacaactcagatggtacaacagaagggtctctgttccaaattatgaacaatacatgcacatcttttgggtctagattgcttagaaactggttaacacgtcccttatgcaatagacatctgatttgtgctcgtcacgatgcggtatctgagatttttgaatcaatgggaccacaacattcagttaacaatctgcaggatggaggggatagatcctgcacagcttcagtgcttagtgatttgtgtattgtcctttcgtcagttttggcattgctgggaaggtcacctgacattcaaagaggaataagtaggatttttcattgcaaagctacagctaaagagtttgttggcgttatccagtctatcctcacatctgggaagcagctacagaagcttgttcttgaggatattggcattgtctcgtctccgcataaatctgtgcactcccctttgctaagaaggctaataaatacagcttcatcatccaccatacttaatagtgctgtgaaacttctgtcttgtcttaacaaagatgcggctgatcaaggagatatgctaaacctgttcattgcatctgtggatcagttcccagaggttgcagaaggtcatgtaaatgtaaaaatggctgaacataaacttgatttgttgattgtggagtaccggaagcaatttgctatgcacaacttggagtttaaaactgtagctggaaccacccatttaatcgaactaccagtagatagaann

SEQ ID NO: 2974 - DNA, 1159 bp, Zea Mays
agccgtgaagctacacaatccatgcggcggcatatggcgcccatcaaggagcaaaaacacacgacaagcgcagaacagcaggtgatgctggatgccgagctccagctgtggaaccacaccttcggctacgtcaagtccatggcgctcaaggccgcgatcgacctcggcatacccgaggccatccaccagcacggcggcacggccaccctcccacaaatagtcaccagggtcaagctccacccgtccaagacaccatgcctgcggcgcctcatgcgcgtgctcaccctcaccggcgtcttcggcgcgcaggagccgcacgatgacgacggcggctgtgacgacgagctcgtctacacgctcacgccggcgtcccgtctcctcgtcggctcaccggggcagaacgtgggccctttcctgaccctgatgctcggccccatcttcgtgtcgtccttcctcgacctccgcgggtggttccagcacgagacgccggacccgtcccccttcaagatgacgcacgggcgggacatatgggagctggccgcccacgacgccgccttcggcaggctcttcgacgccggcatggtcgctgacagcagcttcatcatggacgtcgtggtcagggagtgcggcggcgtctttgaggggatcagctccctcgtcgacgtcgccggcgggctcggtggcgccacacagaccatcgcgaaggcgttcccgaacctggagtgcagcgtgctggatctcccaaacgtcgtcgccagcgctcccgctgataccgccgtgaagtatgtccccggtgacatgttcgagagcgttccggcggcagacgctgtcttcctcaagtggattatgcatgactggggtgatgccgactgtgtcaagatactgaagaactgcaagaaggccataccggctcaaggaggcaaggatgatggtactggtggccatgatgttgacccagggcatgcagaagatggggcgcgcgccatgaagagcatgaatgcaggcctaggtctgccatgcacagcagctagaacacctccatcacttgagttaatgtccggtgatcatgcctgtgtaggcgtacatgttagttaacaacatggtcatgagcgtagttgtagtttattggccaaatggctaatgatacaaggaagcaaag

SEQ ID NO: 2975 - DNA, 1794 bp, Zea Mays
cccgtcggcgaaccgatcacagtcggcgagggccgaggggaggccttttttttttttttgacgcggacgccagaaatcccgtcatgtcaggtcccgccgtcccggcgcagaggagagcgcgagccccgagaagcgcggagcggaattgcaagagcagacgagcagtgtagacaacgggacagccattgacttccccgcctaccctgccccgtcccgtccgtctccgtcccaatcggatccacccgcccgtcgtcgcctataaactctccctcccatccgcctctcgaggggcccggcttcctcccaactgccaccgatttgtttgttcggcttcggccccatctccagtcacccgttcccacttcattggtcgctgctccctccctccacggccgatcccgtgccggcgagagggaccatggcggggaaagggaaggaggtgtacgtggccgccatcgaccagggcaccacaagcacccggttcatcgtctacgaccgccacgccaaacccgtcgcatcgcaccagctcgagttcaagcaacactacccggaggcagggtgggttgagcatgatcctatggagattatagagactgttaaggtgtgtatgaaagaggcagttggcaaagccaaagatggtaaacacaatgtggttgctggtttgaaggccattgggatcacaaatcagagggaaaccactgttatgtggagtaaatccactggccgtccactgtataatgctattgtgtggatggatgctcgcacaagccctgtttgcaggagattggaaaatgagctgtcaggcggtaggacccacttcgtggagacatgcgggttgccaatcagtacctatttcagtgctctgaaattattatggttgatggaaaatgtggatgctgtcaaggatgcagtccggactggtgacgctttattcggcacgatcgacacctggttgatttggaaccttacaggaggtgttgctggtgggcagcatgtcacggattgctcaaatgcatctcgtacaatgcttatgaatctaaagacacttgactgggataagccaacacttgctgtgttaggagttcctgttgagattttgccaaagattatcagtaattcagagaaaatcggtgtggtcgccaaagagttcccgtttgcaggagttcccatctcggggtgtcttggagatcagcatgctgctatgcttgggcagctgtgccagaagggtgaagcgaaaagcacctatggaactggtgccttcatccttcttaacacaggggaagagcctacccaatcctcccatggccttcttagtaccattgcttacaagcttggtccagctgcacccactaactatgctcttgaagggtccattgcaattgcaggcgcagcagttcagtggctgagggacagccttggaatcattcagtcagcagctgagatcgaaaagttggctgaaacagtgccagattcaggtggagtgtactttgtgccagcatttaatgggttgtttgcaccatggtggagagatgatgcgaggggaatttgcatcggaatcacaaggttcacaaataaggggcacattgctcgagcagtgctcgagagtatgtgttttcaggtgaatgatgtcctcagctccatgcacaaggatgctggagaggcaggagaagtaaagagcgcagaaggagagttcttattgcgtgttgatggtggtgctactgttaataatcttctaatgcagatccaggccatgctttcagttagtgcttttggctcgttggaaatggacgaagt

SEQ ID NO: 2976 - DNA, 2215 bp, Zea Mays
tgaagatctatgtatatctgtggattgtgttgctaccagtgaagttagtgtttctgtgtcacttgatccatcaaagatctggaagttttttcttgctcgcacccaaacctatttccaatgctcttaacccttgataacaaggtcaataggagatgtgtatctgaagaaaccagaatttaatagagaacctttgcacagcaagtttcgtcttcaggaaacttttaggagaccacttcttagttctgatccagcaattactgtccaccatcaccatttttgcatttcatggactctgggaacatcttagtaatcagtaagtggttgacacggtccaaagtagcccgcgtaatgtaccacaagtacaagagccctagaaggggatctatagacccaagcgatgagtcgttcttcattaagcactgcctctattcgagttctttgccactagcccactagagatctgtagaagctcaggaaccttaagtggctttcatcgggatgtcacaagtatttgtgatgaggagcagtagagatttagcgttttcgagctgcagcgtaacagtctggatttgagttccatggggactgcatgtcaagccagcagttggtcgatttcatccgcgagcatatagacacagttgtccacagatcattctgaaaaggcatttcgagtaaggatggcaaacaggtgcccatgaagttgctgctcgctcggatggtgctcgacctaattgtgttgccgaagttcttattgaggttattaagatttgccaactttttaggtaggtgttccagagcacggaaggcccttgagctaagccaacttttaggagtcaatatttctccaacaggtacttttgcagtagtcatgagtcattgcttatatgaagtaaggagagaaaattattgcttctcttttctgatgcgtgaagttgtacatggacattctacagagggctcggtgtgcctttcaagtactacatcaatgacttcttatttctttatggacttgtagcacctgaatggaacccgtgtttgaactctgcattttttgaagatgacattattgtcgtattgtaatataatttgatccgtatcaatttagttatgtattaattgttgccaaagaatttatgagatattgagatcgataatatatgtggtattttttttatataattgttgtgcaataacattttgctgaatattttgtataccgttgcaacgcacgggctcctaactagtttatcttgaattacattttttgtgtgtcaggtggtctttgttgaagcaactgaagcccaatacgcattcaaaaaaccactatatacacgatataagacctgtgctctaggtatgatgtgaagccgggcaatgccattcttgctgaggacaaacatttgccaatagaatgggaaacaaattcttgatgttgtcacattaagcacccatgagacggggagaaacatagtggactcctaatttttatggctagcttgcagtgaaagagctgcagaagattaattcctttaaagaaccacgtgagaagcttctgtgcatcatgagctgttgtcaagtcatcaataacttgcttctgaacatattatctaggctgatgagttccttcctattcttatctatgttactatcaaggcaagcaactcttagtcttggccactgtttattctttctgtttcttcttactggttcgctgcaactgagaagctttctgaaaaatttgatgtaggccaatcctcctcagctgcactcaaatctgaagttcgttcagctctttagaagagaaacaaagttaattttagaagtcgaatattatctgactaacctcatttcagcaaagatgtttataatagatgtcagtgctcactcgctctcaatggaggaaaacgagttttagaaacatatggaatcggcaagactagctactcaagtatctgttgcaagcccaagtagctcacaggggcttccaacatctgcaagggcaaatcaggaggaaactgatatggcaagtttgtttactatactattcgatttattcggagaagtttgtttgaccatgaatttgcattccaaaacagtttgttttttgccaccaagcaaaatgtgttcttttttgcttgaaaacaacatgatgtggtttttattgcggtcctgttcaggaaccattttacctatcaaataaaataaaatgctaagc

SEQ ID NO: 2977 - DNA, 4003 bp, Zea Mays
ctgctccgagcccccgcgatgggatcacccatctgcatcgcacccccttctccaccaaccctccggcgtctccagagcgcccagatcccgctccggcacctcgccagcacacaccacgcgcgcgccgatctgctcgctcgcccgccccaaatcccgcccggttcctctaccttccccacatcgggcgtcaacgttcgcggaccaaccttccccaaatccgccccggttcctctcccttccccacatcgcctgtcgacattcgcggacggggcttccccacattcggcacctgttgttactggggctggaaatctggtgctgtaactactttaggccgaggtggtaacgacatgactgctacaaccattggtatggaaagatgttgatggtgtacttacttgtgttccaaatatctacccacatgcaaataatgttccatacttaacatttgaagaggccacagaacttgcttttttggtgctcaggttgtactaactagcatagtgctcaagtcaaatgtcactatgttggacattgtgagcactcggatgcttggtatttgctatatttgaagatctatgtatatctgtggattgtgttgctaccagtgaagttagtgtttctgtgtcacttgatccatcaaagatctggaagttttttcttgctcgcacccaaacctatttccaatgctcttaacccttgataacaaggtcaataggagatgtgtatctgaagaaaccagaatttaatagagaacctttgcacagcaagtttcgtcttcaggaaacttttaggagaccacttcttagttctgatccagcaattactgtccaccatcaccatttttgcatttcatggactctgggaacatcttagtaatcagtaagtggttgacacggtccaaagtagcccgcgtaatgtatgtattcttatcttatattcagtttctgtaaattggtctttttgagacttggtgccaaatgttactacatatttaaaatagtataattaaggatatggttaggctctcgttgcggcatattttcctcctaactaatcatatccattcggttttagttttggcatgtaccattaattgttccgtttcaaatacgcttatgatattaaatttgtgattaagatcctaaatgacaagttgcttttctagacaccaattattgcagctgtatgtattgctgttgtagtgttctattttcaatttttgaaccaaatactactagcgattatttatatacaataaactgatactgtgcactttgggtgcgtttagttgctccctttttgtgctctgccaaatggttggctggccaattttaggcggcataggaatcagctgggcattatcctgaatgtactgtgcattggtcgcacgacgttgggcaaaacaaaacacgactagaatccaagctcctattctacatacagttactgaccaatgttttgattaagaacttgtaggcgcaatccaaacacaccctatacatgatgtttttcattatctcattctagatgccttattaggttatatgtatatgcaacctctcaatgaggcaagtctgttaaacattgtgcatatggattttctgtttcgttttctccttgtactatcttaaagtttcagttaggtacatatatttgattgttgcttctagcccacatctttgtccaggtaccacaagtacaagagccctagaaggggatctatagacccaagcgatgagtcgttcttcattaagcactgcctctattcgagttctttgccactagcccactagagatctgtagaagctcaggaaccttaagtggctttcatcgggatgtcacaagtatttgtgatgaggagcagtagagatttagcgttttcgagctgcagcgtaacagtctggatttgagttccatggggactgcatgtcaagccagcagttggtcgatttcatccgcgagcatatagacacagttgtccacagatcattctgaaaaggcatttcgagtaaggatggcaaacaggtgcccatgaagttgctgctcgctcggatggtgctcgacctaattgtgttgccgaagttcttattgaggttattaagatttgccaactttttaggtaggtgttccagagcacggaaggcccttgagctaagccaacttttaggagtcaatatttctccaacaggtacttttgcagtagtcatgagtcattgcttatatgaagtaaggagagaaaattattgcttctcttttctgatgcgtgaagttgtacatggacattctacagagggctcggtgtgcctttcaagtactacatcaatgacttcttatttctttatggacttgtagcacctgaatggaacccgtgtttgaactctgcattttttgaagatgacattattgtcgtattgtaatataatttgatccgtatcaatttagttatgtattaattgttgccaaagaatttatgagatattgagatcgataatatatgtggtattttttttatataattgttgtgcaataacattttgctgaatattttgtataccgttgcaacgcacgggctcctaactagtttatcttgaattacattttttgtgtgtcaggtggtctttgttgaagcaactgaagcccaatacgcattcaaaaaaccactatatacacgatataatacgtaattttgccagtggtgtgatgcggactcgagcatcaccaattcacctctctgttgtatctaacggcagttatggcctcatggagtcatgggtttaacctctggaaccctgaatctgaataagcaatccgtaccgtgcaactgaactaaccatcaatactcaagaccgagagcgcctttattgaagctaccaaggaaatcaatgtattagaagtactactgtccacttgggctcactttgtttgcttgcacatcgtattcccttatttttttcactaacctgtctaaactggtgtccgcgaaaaatatgcattcaattatgttgcttcatcagaacgatgtctgttagattgggacaacgctttgtcggtcgccttgttctgagtagtcaggctgcaccagtgcacctcaagttattccgaactaattaacacgtttgtcgcaggacctgtgctctaggtatgatgtgaagccgggcaatgccattcttgctgaggacaaacatttgccaatagaatgggaaacaaattcttgatgttgtcacattaagcacccatgagacggggagaaacatagtggactcctaatttttatggctagcttgcagtgaaagagctgcagaagattaattcctttaaagaaccacgtgagaagcttctgtgcatcatgagctgttgtcaagtcatcaataacttgcttctgaacatattatctaggctgatgagttccttcctattcttatctatgttactatcaaggcaagcaactcttagtcttggccactgtttattctttctgtttcttcttactggttcgctgcaactgagaagctttctgaaaaatttgatgtaggccaatcctcctcagctgcactcaaatctgaagttcgttcagctctttagaagagaaacaaagttaattttagaagtcgaatattatctgactaacctcatttcagcaaagatgtttataatagatgtcagtgctcactcgctctcaatggaggaaaacgagttttagaaacatatggaatcggcaagactagctactcaagtatctgttgcaagcccaagtagctcacaggggcttccaacatctgcaagggcaaatcaggaggaaactgatatggcaagtttgtttactatactattcgatttattcggagaagtttgtttgaccatgaatttgcattccaaaacagtttgttttttgccaccaagcaaaatgtgttcttttttgcttgaaaacaacatgatgtggtttttattgcggtcctgttcaggaaccattttacctatcaaataaaataaaatgctaagc

SEQ ID NO: 2978 - DNA, 3694 bp, Zea Mays
ggcatgcgttgaagacagtctcagatgtgtggcggcgcaggatcgtagcaccgagggtttccagtccacgttctagaagattcccgtctacattggccgaccccgcggcccacaccgtatatcaccgcctcctatccggcctctgcccttctcgccgaacggaaaaccctgcccggaccttcgttgcagcgctacgagcttcgacgggccgctcgatctccacctctgaagtggctgcttgtgatctagatctgaaagctgcagtggttgacagctgagtgtgaaactgtgaatcgaagatgagcgtggtgggcttcgacctcggcaatgagagctgcatcgtggcggtcgcgcggcagcgcggcatcgacgtggtcctcaacgaggagtccaagcgcgagacacccgccatcgtctgcttcggggacaagcagcggttcatcggcaccgccggcgccgcgtcctctaccatgaaccccaagaactccatttctcagatcaagcgcttgctaggccgcaagtactccgaccccgaggtacagagagatctcgcctccttcccgttccgtgtcacggagggccccgatggttttcccctggtccatgtacgatacctgggcgaggaacggacgttcacctctacccagctgcttgccatggtgctgtccaatttgaagggcattgctgagggtaacctgaatgctgcagttgttgattgttgcattggtattccagtctactttacggatctgcagcgcagggctgttcttgatgctgctactattgcgggtctccagccattgcgattgttccatgagacaacagccactgcactggcatatggtatttataagactgatctcccggagaatgaccagttgaacgttgcatttgttgatgtcggtcatgcaagcatgcaggtcagtgttgtcggttacaagaagggacagctcaagatgttgtcgcatacgtatgaccagtctcttggcgggagggactttgatgaggccctgtttaagcactttgcagctaaattcaaagaggaatataagattgatgtgtaccagaatgcgcgtgcatgcattaggttgcgtgtggcatgtgagaaacttaagaaggtactgagcgccaacccagaggccccactgaacattgagtgtttgatggatgagaaggatgtgcggggttttattaaaagggaggagttcgaacagatcagtgcctcggtgctggaacgcgtgaaaggaccactggaaaaggccttggctgaagctgggttgactactgaaaatgtgcactttgttgaggttgttggatctggttctcgtgttccggctataatcaagataataactgatttttttgggaaggagccaagacgaaccatgaatgcaagtgagtgtgttgcgcgaggatgtgctcttcagtgtgctattctcagccccactttcaaagtgcgagaattccaggttaatgatgggtttcctttctcaattgcattgtcatggaatggagactcccagaacaccccccaacaaacccttgtattcccaaaggggaatgcaattcctagcactaaagttcttaccttctttaaatccagtacatttgaagttgatgttttgtatgtcgacccaaacggcttacaaattccacaaaaaataagcacatacacaattggccctttccaaacctccaaaggagagaaggccaaactgaaagtgaaagtgcgtctcaacatccatgggaccgttacagttgattcagcaataatgctggaggatgatgtggaagttccagtttcatctgcaaatgaagctccaaatgatactatgaagatggacacagatgatgcaccaagtgatcctgctgttgcatctgatgtgaatatgcaggagcctaaaagcgctgataccgctgaggctgctcatgcagctgaaaatggaccacaagatactgaggaaaaatctgttccgatggaaactgatgcaaaggttgagccgtcaaaaaagaaagttaagaaaattactgttccggtccatgagttggtctatggggccttggctgcggctgacctgcagaaggctgtagagaaagagtatgagatggctcttcaagacagagtaatggaagaaacaaaggagaagaagaatgctgttgaagcttatgtgtatgacatgcgtaacaagctatatgacaagtacagtgattttgtcacgtctgaggacaaggaaggtttgattgctaagcttcaggaggttgaagactggctctatgaagatggcgaggatgaaactaagggggtttatattgctaagctagaagaacttaaaaaagttggtgatcctattgagctgcgcttcaaggaatgggagattagaagttctgctgttagccaactggtatactgcatcaatagcttcagagaagctgcacagtctaccgaccagaagtttgaacacatagacatgtcagaaaagcgaaaggtcattaatgagtgttcggaagcagagacttggctaatagagaaaaagcagcagcaggatgctctgccaaagcatgctaattcggtactccttgctgctgaccttaagaagaaagctgaaacacttgataggttctgcaagccgatcatgacgaaaccgaagccagctcctaagccgcagactccgcctgtggcagaaaaccaagctcctgagcctcagacaccagagcagcagcaatcaggtggcgaaagcacagccagcgagggagccgcagaggagcctcgagccgagcagatggagacagacaaacctgagggagccacagatccctcggcttagctttgccagtgatcaaacatttgtgtgattgaccctgttcacctgctgttatagtcggtaggggggagtgaactaagcgagaggttcgccacatttgatttgaggatgtgtgttgggacattcaaggtattctgtttcttgtccttgacaagggaggtggttgggtgtttgaaggataagagcagtggggtacactttctcacgtttttgtgccccacacgctcgatatctttattgatgatggtccgtaaaaccaaggtggccgggtggagcttaaacactcatacacagagcacgagagaacaacaagacggttggtgggaattgtagctttttgctatgcatgtcctatccctcattacaggactatgtctgtctgagggtcgaccatggcgcttctccgacgtgtgtcgtgtcgtcttctgctacaattagtcgcgttggtggaccgggtcgtgcgaattacgagttgggctggtcgaagacttcatggcggagtgaaggagacgaaatccttggggtactttcttgctggttacggccgagccatgggcgcagagactaccatgtctggatggcgaatccttcgtcttcgaggatttgttcctcgccggtcttcgctttccgtgccacaatttcggggtcgagatccttgataactacaaggtttagatcattagttgaccctgaacacggtggtgactttgagtaagtttgtgtgggccacgactacttttggcagaggcctatatgttgaggtgttcgcaaagcattattatttgcattggcagaagaggactaccagagggttggttgaccggtttgggagttgcatttttacctcgaagacgaggaagattaaagagagg

SEQ ID NO: 2979 - DNA, 5924 bp, Zea Mays
aattacaacttcccacagatagattccgcgggctgcgagcatcccccacctcatcggcccccgcgtgcggcggcgggcgactctacctgacctggcctgcgtcctcccgctttccagccagcaagccagactccgcccctctccgaaggctccgatcgtctggtttcgtccagatccggctccgctgaggctctagatcgcgtcgcgcacgatgcaacgcgacctgtcgcggtcgctgtctccgccgcgccggcgtcggcggtcgccatcacccgagcggtaccgcggccggaggggccgtagggaccgaagccctagccgtagcaggtccccctatcgcccctcgtatagaaggaggagccctttcccatccccgagaaggcgtgagagctgttctccatctcctaggaggcgcaatagtccacctccatcacggaagcgttacagaagaaagagcagtccgagtgtcattagctctccagttactgcatctcaaagttcccaccttgggttggaagagaataagaatgctattgatacgcaaaggctacaagaagaaaagaaaaggtgggaagtatctgctttactatgcagtctacattattttttcctacagagtcaaatgtttactgttgcaccctttgcataactcttctgtgatgctaacaatgaaattgtgctgatttagttgctatttgcactggaatgtgtcacaaggtcagctctatttgacaatctgttgtccatctgttttccagagtacatatgtgcaatattattttggattttgcaagtattacagatataaatacgacttgaatatctgacagctgtgtgtgaatcacttaggttatatgagacgattgtggcttaaggtgcaagtttaaattcagtagttgcgtctgtattccttgaaattgcagctttacgtacagctaccccaaaaaaatcatctatggttaacacactgcaacatatcttttttttctcgaattacacaggagagttgcgtgtcatttcatttaagaagaaaaagatacaacacccgaggggtggaaagaagccccccccctccccgcaacacatcaccaaaagcggcctgcagtccaacaaaacagaggattttggtccaagtctcccgggagaagacgcaagacactataatgtgttgagctgactcatcttcctggtcacaaaggaggcagacactaggatgtggcaacccatgtttcagcaagcgatccgtcgtccaaactctgttcttgattgccagccatatgaagaatttgcaccggagaggtgcccaagttttccaagtatttttgcaaggttcaatcgtaacagttcccaagaaaaaaggtgttataagcagatttactagaatactgtcctgaacttgtgaacttccaaaagtgatgatcaggaagggctggttgcaaggtaaaaccttccaccaacatccaaagcttcaggtattcgacaatcacctggactgtgagggctccctggatgtcagtgacccaacgcctgttagatagggcttgagaaacagcgcgttgtcttcttgctctcttaggaattaactgaaaaagattagggtccagttctcccacagagctaccgtgcagccaccggtcagtccagaatttggtatcaacaccatttccgacctttgtttgcaccgccacatgaaagagagctcaggccttatagggaacctgaatgggcagcccttcccaaggccgtgaagaatctgttttttttttgtagccaaagccatcggatgtgtaaggcccatcccattttttcaaggttgagaacccctaggccatcacactgcaacggcatttgaaccttctcccaagacacagggcaattgcctccattagcattttgatgacctccccacaagaagccccgtcacagcttatcaatagctttgatcacccatttggggagatccagagctagcatatcatggatagggatggcagaaaaaacagcacggaccatcacaagctaaccggctcggctcatgagagaagccttccattttgggaggcaagctgctattttatcaatcaaaggcagcaggcactcttggttggtttccgaatagtaagaggtatccccaggtaggtgcaaggtaaattcctgatttcacaatccaagagctcagaaatgaccttcaagtcttcaattgtgcaattaatggggcacactgagcttttagcgagattggtctggaggcctgacgcataaccaaaagccttcaacagctgagatatgagaagcagatcatctcgatttggcctgaggaacaagatggcatcatccacatataaagaaatccggtgcttagcctgctgaacagccagcggctgtaggaaatatgcttggacagctttagtgattaaggcattcaatgcctccatgactagcaagaacaacactggggataaaggacccccttgcctcagcccccgatgatgcagaatgaattctccaggcacaccattaaccagaagttttgtggaggaggtggagagaagaaggcagagcaggttataccactttcgtccaaaccccatgtgctgcaggacctcaagtaaagacgcccaagaaactgagttgaacgctttagatatgtcgagcttgaaaaggatataaggttcaacatgtctttcatgtaaaaaaaatgtatgggatataacaaatttctttgtaactttatgtctacaaatttaaattgtttctgagcaagaaggtttttttttattttccatgtggtatcttctaagaaatgctatgccctttttacagcctacgttgaccggtttttgaaggtactcttgtagtttgttttggacttgaattatagtttctttaattaactaatatctgtgatgtaatatttgttgtagaagttgtgattcaaagcatttatattcttgctggaaattagttttcaaaccaccatttaactgtgaacttgcctcagtagaatgtgatgaaagaaataaaagaggggtatgtgtgaaatattaccagtaccatttcataaagtttacatcagtttgtattaactattgtgcgcgtcaccccagaaaccagtaaaaattatttttgttaaaaaatcatgaatgctacttgagatgtgctatcagaagagttttcccatgtaaacacaaagttacagtagtgtcattagaagggcaagcctcaccaggtcgctggtttgaagcagcttctccgtttatccctctgccaatatgtgggagcctttggcactgggtttgcccctaagcacaaagttatagaaaaaatattcatgatttgtatttgactatttatttgagcacagagagaagttatttcaaggattattaaaaaaactagctcaacctaggaggacctaggtaccattttattattcagaagaaaataggcacataaatttgccttgacgagaacttgaatctaggtggtctgggctgggcacacatccgcatgctccacttactgagcatacagccaggactatgtcatatatgttggttggaattatatattatggttgcaaatgtttgttatttttttttgtttttgctatgtaggctaactatattggcatagatgttgtccgcagttgattttcaggattaaaagttgtttagtattagatcattatttagcagtgttccaaaaggtggtattctgcggccacttacgcacgattaggtttaggtgtaggcgccttggggtgtaggtgagcccttggtagcgacccgccttggggtgtaggtgagcccttggtagcgacccggtgtacctatgtgccgatcccggcaggcagggatgttgagcagcaggaaggaggcaggaataggtgaaaagagggtggtgatggggacgtggcgggagcagtgggcgccagtgccggtggcggaggcaggggcactgagtttggtagcgggggaggcagggacgggggtgatggcggtggtagcagatgcggccggaaggaggcagtcagtggtggaggtggcaggcatggctggaataggcaggtggtgctggaggcagcagagaggaggctggcggtggtcaaggtggtagggaggaagtaggcgcctgagagcagaggaaggtgcgacagggcagagagcggatggataagctgggaaggtataaggtgggctaggctgtttttgatggactaggctgcttttgatgggcctttctatccaaccctaggcctgtaatctcctgttttttcttttcctttgaggtaatatttgtatatgtttgtctatttgtgaaacacctaggcttgcctcgcctaagctttaggctgaaggtcactgcctagcacctaatgtaacattgttatttagttagcgctcttttttgtcggttcacttggtgtttgtggactgtaaggatggtatcatattaactaggcagtagaatgatagatggaggatatctgagttagtttgacctctgcgctgtaatgttatttttagaaggtaaggaaaccaacagggctaatttcaattatataacatggtgtcattgaaattcaatttattgtgctctaaatttgtaataaagtgattttagtttgtttcttatcgcagttctcctgcgtacttgaggaaaaaggaacttgtcaggataaattgtccacaaatggttcctgcttctgcagtttccactaattagcagtaggtagtttattctataattgcattgaagcttgaacattgattttggttgggcatgcagtaagtagcttacaagaacatggcttagttgggatactgaaatgcttcatcaatagctctaaacctgccacaaattacttgacattcttctctacaggcatttccgaagaaagatactgctgtagttccgcttgttatatttgatgatgcaactggtgatcctttatctactcttgatcagttttgataattcgtttttggatctggaacacactagaggtatgcctgaaatgcattagcttgtagtcactatgctgatgaaaggcatagtggatcatagatagtatttagatcttagatcatgtgctttgctttttgctgcttttatggccttgaagggtttgaataaaaaaaatcggctttggtcacgccttgcctttggtagtacatttcgttaacttgctatatcaactgcaggcgccggaaggaagttgaacttagactaatagaggaggacacagctaaaagagttgagcaagctattaggaagaaggttgaggagagtctgaattgtgatgaaattaagcgtgaaatacaacgtcggattgaggaaggacgaaaaaggatacatgaggaggtagcaatccagatggaacgagaaaaaaaggagcggaatgagctagagaaaaagcttgaagaagaacgaaagaaggctgaagaggcgttgaggaaagaggcgatggaacagcagcagaaagagctagagcggtatcaggagctggagaggcttcagaaggaaagagaggaggccatgaagcggaaaaaaatggaggaagagcagcagaggcaaaaccagatgaaactgctgggcaagaacaagtcgcggccgaagctgtcatttgcttttgggatgaagtagcgttcgagtcaccgaacgaaattagtgttttagtttcctgtaaccctgtatttcctgaaaccaccattgtctaactttggcagacaaattgggacgtcttaaatcctcctgatctgctttgtaagttgccgtctctcggtgatgtggttttctctgctcctttgctgttcactgttgagttgacgttgcgagaagactgccaaagaagaatccggttggtccatagggatggatagtcgaatgccaacacgtttttactcgatactggattatct

SEQ ID NO: 2980 - DNA, 3323 bp, Zea Mays
aggtaggcgtcgatgagtagtactcagacgccgccggcctcacgctgctgctccaggtcagcgccgtcccgaggctgcagatcaggaggtgcggtgcgtggatcagcgtcgaccccatccccgcgtgtttcgtaatagcaaaaatctccgtccatcagggaggtcggtcttgcagttggagttgggcacattcgcctctatcgggcgggcacattccctccgtcccgtgacttccaccttccttacccttcgtatggtgggggcccacctcgccgcccccaccccccgctgcccttctctcttccccgtctccgactccacacacctcccctttccactcgccgccggcgatcccgaaccgggagcagcgcacatggcaggccgggacgagaggtggggggcgcggggcggcccgggggacacgcacgcgtcgacgagccgcgcacccgcgggcaccgccggggagtcggagggcgcgtcgccggactcgctgcggaacacgccctccaacatcgcgcggctggaggacgcgatcgggcactgcgcggcgcggcgcaaataccttgcgcacaccaagagcccctccgacggcaaggacgtccgctggtacttctgcaatctccccctcgccgacaaagtgctctcttcgtccgtaccgcggacagagatagtggggaaaggagactatttccggttcagcgagagggactctctggcactggaggcgtctttcttggagagggaggaagtgctgcttgcatactggtggcgtgagtatgctgaatgcagtgcaggaccgagaggatccttggttgaaagtgatgattctgcatatctttataaggtggaggaagaacgggttggggttcctgtgaaaggtggactatatgaggttgatttgatgaggcggcattgcttccctgtgtactggaacggtgaaaacaggcgtgtcttgagaggccactggttcgctcgcaaaggtggtgttgattggattcccttgcgagaggatgtttctgaacaacttgagttagcatataattgtcaggtctggcatcgtcgaaaatttcaaccttcaggcctatttgcagcaagggttgacctccaaggaagtacactggatttgcatgctctttttactggagaggatgatacttgggaagcttggcttgtctttgatacgggtcctaagcttggtagtaacacaatcaaattaaggcgcggattttctccttctgaatctgcaagtacaaagccttcacaggatgagttgcgtcagacaaaagaagaggaaatggatgattactgctctcaggttccagttggtcatctggtattcatggttcatggcattggacagaggctggagaaagctaatcttgttgatgatgttgttgatttccgccgagtaactgctaacctagctgaaagatacttaacttcttatcaaagaagtacccagagggttctatttattccctgtcagtggaggaagggcttgaaactcagtggtgaaagtacggttgagaaactcactttggatggagttaaaggtcttcgagtcgcattaggtgccacagttcatgatgtcctatattatatgagtcctatctactgtcagcatattattgactcggtctctaaccagttgaacaagctgtacatgaaatttctgaagagaaatcctggttacagtggaaaggtttcattgtatggccactcattaggaagtgttctgtcgtatgatatactttgtcatcaagaatcccttttggccccatttccaacagagtatctgaacatggaaacatctgatcgaagtcaaggagcaaagtcagccaatgaagttgctctgcatgattcagcattgtcccatcatgtgtgctcgaggattcattaaataacccagaaactggtgtgccacgtggggcagttgttgctgagcaaaatgaaaaagaaaataggattgagaatcatcagacggtgtatactgaggaaggaacaacttcaggtgtaagcacaaaagatgctgaagcatcacacatttcaagatctgctgaggatgtccatgaagaggtccttgacaaagaaaaaatgatcatttcactagaagaagaggttgacacattctttgctgttggatctcccctgggtgtcttcctttccctgcgtaatgtccgtattggtattggcaaagggcgagattattggaaagataagaacataattgaagagatgccatgctgccggcagatgttcaatatttttcatccttttgatcctgtagcatacagagttgaaccacttgtatgtgaagattatcaaaagaagcgtcctgtaattgttccctaccatagaggcggaaagaggatacatgttggagtgcaggagttcacagaagatatttctgcacgttctcaagccattgcctgtcaattgaagtcactgaaggtcaaagcagtagctgctttgctagcattgagcagaaatgacacagaagaggatggtgagagtgctaatgaggaaggaagatcgtatggttccattatgatggaaaggttgaccggctcaccagatggtcgaattgatcatgtgcttcaggagaaaacatttcagcattcatacctatctgctctgggagctcataccaactattggcgagatcatgacactgctctcttcattctcaaacatttgtatcgtgatatacctgaggatcctccaagcgatgtcgttgaaaggatgcatattaaactgttttatgagagagatccggttgaggaagaaacgcccgtgacattttcggaccatgcagcaattaaggagttctgcagaaaggtgagagcctactcaacaaaaatggaggatgatgccaactgctaagcctcttgatggtgtcatttcctgatggaaaccatgttacatccccacgttcctcgccaagaaggaagatgcaggcatgggaagggagaacgattccacaaaatcgtgatcccaggataagaatcctaagaaatgtagttccacgcttgacaccagaatcaggacacttgagaaacgttgtacagagtcggttccccatgttgcttcacttgttcccgtcgtcaatgcagtgctgtacagagaacgtcctgctgtacctttctgtatatgtaatcttgcgtgctgtgcatacagaatatgatggatttagtttcaaacgacagcttacagcgacaccaggctgaaacgaagggactcgtgagagaaaatccataataatttagagacattaataacacagaacacctagctttcaaatgttgtgatgtcacaaagcttcg

SEQ ID NO: 2981 - DNA, 3579 bp, Zea Mays
ctcagcgtcgccgtcgagccgatcaaacgcgaacgtgaggttccgcacgaggcggcgctcgaggtaggcgtcgatgagtagtactcagacgccgccggcctcacgctgctgctccaggtcagcgccgtcccgaggctgcagatcaggaggtgcggtgcgtggatcagcgtcgaccccatccccgcgtgtttcgtaatagcaaaaatctccgtccatcagggaggtcggtcttgcagttggagttgggcacattcgcctctatcgggcgggcacattccctccgtcccgtgacttccaccttccttacccttcgtatggtgggggcccacctcgccgcccccaccccccgctgcccttctctcttccccgtctccgactccacacacctcccctttccactcgccgccggcgatcccgaaccgggagcagcgcacatggcaggccgggacgagaggtggggggcgcggggcggcccgggggacacgcacgcgtcgacgagccgcgcacccgcgggcaccgccggggagtcggagggcgcgtcgccggactcgctgcggaacacgccctccaacatcgcgcggctggaggacgcgatcgggcactgcgcggcgcggcgcaaataccttgcgcacaccaagagcccctccgacggcaaggacgtccgctggtacttctgcaatctccccctcgccgacaaagtgctctcttcgtccgtaccgcggacagagatagtggggaaaggagactatttccggttcagcgagagggactctctggcactggaggcgtctttcttggagagggaggaagtgctgcttgcatactggtggcgtgagtatgctgaatgcagtgcaggaccgagaggatccttggttgaaagtgatgattctgcatatctttataaggtggaggaagaacgggttggggttcctgtgaaaggtggactatatgaggttgatttgatgaggcggcattgcttccctgtgtactggaacggtgaaaacaggcgtgtcttgagaggccactggttcgctcgcaaaggtggtgttgattggattcccttgcgagaggatgtttctgaacaacttgagttagcatataattgtcaggtctggcatcgtcgaaaatttcaaccttcaggcctatttgcagcaagggttgacctccaaggaagtacactggatttgcatgctctttttactggagaggatgatacttgggaagcttggcttgtctttgatacgggtcctaagcttggtagtaacacaatcaaattaaggcgcggattttctccttctgaatctgcaagtacaaagccttcacaggatgagttgcgtcagacaaaagaagaggaaatggatgattactgctctcaggttccagttggtcatctggtattcatggttcatggcattggacagaggctggagaaagctaatcttgttgatgatgttgttgatttccgccgagtaactgctaacctagctgaaagatacttaacttcttatcaaagaagtacccagagggttctatttattccctgtcagtggaggaagggcttgaaactcagtggtgaaagtacggttgagaaactcactttggatggagttaaaggtcttcgagtcgcattaggtgccacagttcatgatgtcctatattatatgagtcctatctactgtcagcatattattgactcggtctctaaccagttgaacaagctgtacatgaaatttctgaagagaaatcctggttacagtggaaaggtttcattgtatggccactcattaggaagtgttctgtcgtatgatatactttgtcatcaagaatcccttttggccccatttccaacagagtatctgaacatggaaacatctgatcgaagtcaaggagcaaagtcagccaatgaagttgctctgcatgattcagcattgtcccatcatgtgtgctcgaggattcattaaataacccagaaactggtgtgccacgtggggcagttgttgctgagcaaaatgaaaaagaaaataggattgagaatcatcagacggtgtatactgaggaaggaacaacttcaggtgtaagcacaaaagatgctgaagcatcacacatttcaagatctgctgaggatgtccatgaagaggtccttgacaaagaaaaaatgatcatttcactagaagaagaggtgaaacgtcttaaagctaaactagatcagcttgaacagcataagcatctagtgactgagagcaccagtggtgttgagtatcatggaggcaaaaatggcaatcatgccttgaactttggcgaacttttcactgcacaaggaagtataaaccagccctactcaccacaaatcaaatacacaaaactaaactttaaggttgacacattctttgctgttggatctcccctgggtgtcttcctttccctgcgtaatgtccgtattggtattggcaaagggcgagattattggaaagataagaacataattgaagagatgccatgctgccggcagatgttcaatatttttcatccttttgatcctgtagcatacagagttgaaccacttgtatgtgaagattatcaaaagaagcgtcctgtaattgttccctaccatagaggcggaaagaggatacatgttggagtgcaggagttcacagaagatatttctgcacgttctcaagccattgcctgtcaattgaagtcactgaaggtcaaagcagtagctgctttgctagcattgagcagaaatgacacagaagaggatggtgagagtgctaatgaggaaggaagatcgtatggttccattatgatggaaaggttgaccggctcaccagatggtcgaattgatcatgtgcttcaggagaaaacatttcagcattcatacctatctgctctgggagctcataccaactattggcgagatcatgacactgctctcttcattctcaaacatttgtatcgtgatatacctgaggatcctccaagcgatgtcgttgaaaggatgcatattaaactgttttatgagagagatccggttgaggaagaaacgcccgtgacattttcggaccatgcagcaattaaggagttctgcagaaaggtgagagcctactcaacaaaaatggaggatgatgccaactgctaagcctcttgatggtgtcatttcctgatggaaaccatgttacatccccacgttcctcgccaagaaggaagatgcaggcatgggaagggagaacgattccacaaaatcgtgatcccaggataagaatcctaagaaatgtagttccacgcttgacaccagaatcaggacacttgagaaacgttgtacagagtcggttccccatgttgcttcacttgttcccgtcgtcaatgcagtgctgtacagagaacgtcctgctgtacctttctgtatatgtaatcttgcgtgctgtgcatacagaatatgatggatttagtttcaaacgacagcttacagcgacaccaggctgaaacgaagggactcgtgagagaaaatccataataatttagagacattaataacacagaacacctagctttcaaatgttgtgatgtcacaaagcttcg

SEQ ID NO: 2982 - DNA, 2728 bp, Zea Mays
agttatttgagtataatgtctctgcaggtagcaaatattaatgccaaagaagagacaccagttggtcatggagaagtaatatgctttagcatctattcagcaaattctgatgtacaggcagctgattttggaaatggcaaaacttgcatttgggttgatgttctagatggtggaaggggtgtcctgatggagtttgctcctttctttgaagattcatcgatcaagaaggtttggcataactatagttttgatagccatgtcattgagaattatggaatcaaaattgctgggtttcatgctgatacaatgcatcttgcacgcctttgggattcatcaaggaaaattgatggtggatattcacttgaaggacttacaaatgaccgtagagtcatggatactgttccagaggatttacctaagcctggaaagacatcaatgaaaaccatctttggcaggaaaaatattagaaaagatggatctgaagggaaagttgtatctgttgagccagtcaagaagttacaaagggaagacagagagttatggatttgttattcttctctagattccatgagcacattgagactttatgacagcttaaaaagcaagcttacaacaaggagatggatcttggatggttgtcctaggggcaccatgtatgatttctatgaacagtactggcgtccttttggtgccctacttgtgaaaatggagacagagggaatgcttgttgaccgtggttacctttcagagatagaaaaggctgctattgctgaacggaaacttgctgcagataagtttcggaaatgggcatctaaatattgtcctgatgccaagtacatgaatgtgaatagcgatattcaaattcgccaacttctctttggtggcattgaaaatagacacaaatctggtgaaacttggccacatagtaaaacttttaaagtgctaaatgaagaaagtgttgctacagagggtaagaagacgtcaaagtatcgtacaatcaaactttgcagtattgttgaagatctgaaaatcgatatgttcaccccgagtggctggccaacagtcagcggggatgcattgagaagtttggctggtaaaatacctacagaatatatttacacaatagatgatattcaagatgatgatgaatataccagtggttcagaaaacccagatgggaattcctcttatggaacagcatatgaagcatttggtggaggaaagaatggaaaagaagcatgccatgcaattgcagctttatgtgaaatatgttctattgattctttgatatccaatttcattcttccgttgcagggagatcacatatcatgtgcagaggggcgcattcactgttcattgaatatcaatactgagacagggcgcttgtcagcaagaacaccaaatctacagaaccaacctgcccttgagaaggataggtataggattcgccaagcttttgttgcagccccgggaaattctcttatcgttgcagattatggtcagctggagcttaggattttagctcaccttactaattgtaaaagcatgctgcatgctttcaaggcgggtggtgatttccattctaggacagccatgaatatgtatcagcatatccgtgatgctgtccaagaaaagaaagttcttcttgagtggcaccctcaacctggtcaagagaaacctccagtgccgctattgaaggtttctgttaaagaggcaagagatacactgaagctctggtacagggatagaaaagaagtgttagcttggcaaaaaagtcagaagaagcttgcaagcgagaagggtgaagtctacactttgcttgggcggtcgcgccattttccttacctgactcagtatggtcctggccaacgaggtcatattgagcgtgctgctataaatgcaccagtgcagcagatgttgctatgtgtgccatgcttgagatcgaaaggaatgtccgccttaaggagcttggttggaggctcttattgcaggtgcatgatgaagtgatactggaagggccttcagagtctgctgaggtggccaaggctatagtggtggagtgtatgtccaaacctttctacggaaccaacatcttgaacgtcgacctggctgtcgacgccaagtgtgcaaagagctggtatgctgccaaatagactgaggagacgctgtcacctgccacaaggttgatgacaccagtgcaatcgagaccccactgttcggataaaaaatggtggacccgtcgtcatgcagactgcggttccaggaccttgagtttgttgtggtggtaacccaggccctgacaagacaacacgcccatttcttggctgcagcagaacagcggaagacacggaggactctgctgccagcacctggagttgcgcggtgccaaagcataccagacagaattcgagatggcttggatctcgagtgaactagcgcggtgccaaagcatgctgttttgttcataatctcacttgttcagcgtgctggtgcgttaggttagtttacagatttgttctggtgcagtgaggccaattatggtccctgcggttggtatcgatcttggattgtgcattgcatgtagtaccatactgcatctacactgggaccatttttcagataacagaaacattcagcttcatcctcgaaagagaatcagaccaacttgttacaaaaaacagtttcaaacgactggatcaagtttacataacaaaaccgtctcaaaatt

SEQ ID NO: 2983 - DNA, 2297 bp, Zea Mays
gaattgaagtgctaaagtttagtttcaattatcaccattagctctcatgtttagattataaatggctaaaagtagctaaaaaatagctgctaaagtttatctcgcgagattggaacagggcctaactattagttttagtgtattcaaacaccccctgagagtcgtaatctggcaaggatgaaaataacgtgaacaaattctaccaactacgctgtgcttatcgcctctggcggcggcgagttcgctcacgtcccggcgacccctcgccggtggccacgggccgtgacactccggcatgccgcgcgccccacgccggcagtccgacgaggcgcgccgtggcgcctacaagccgcgcgtcgacttcagccgctcgcgccgccgccgcgaggacggcctcctcgccctccgccgcctcaaccgcgacacgggactcttcaagcgccgccgcgacgagcccgctcccgccgtccctgcctccgatctgactcctacacgcgccgaagcagccccattcgcaggaatcacccgtccggcattcactccctcctcaccgcccgacgtagcggctccccgggatgctgctgagtcagagttagcttgaaggcctgtcagagctggtcgacaaactatgttcagatgacaccaccagtcagctcgaagccacaatccagttcaggaaacttctttcagatgaactcaactgtgataaaaatcatccgagcggatgtcctgcccagatttgccgagtttctttcaagacatgggcttccccagctccaaatggaggcagcctgggttcttaccaacatagctgcatctgattatacactgctggttgcagaatgcggtgctgttccaaggttggtggaactattaggatcactaaatgcaaacatcaggcatcaggctatctggtgtcttgggaatatagctgcagacttacctagctgcagaggcattctcttcgatcatggtgctcttacacctttactttctcaatttagagaaggcatgaagattccagttctgagaactgctatgtgggcactgtcaaatctttgttttggaaaattgccagccgaagtgcaagtgaaaccaatactagaaattatcagccagcttattcactctgctgacgagaagatactggcagatgcatgctggactgtttactacatatgtggcgataaaggtgatgctgtccaagatgtattagatgctggggtctgccctcaacttgtaaatcttttgatgcatgcatcagctaatgttcttctccctgtcattatggcactcgcaagaatttctgcgggagatgataagcaagttgaggtcttaatagagaatgacattctcaattgcttaggacagttggtagcacgaaattacccaaagaacatcaagaaacaagcgtgtctaattgtttctaatatcgctgctggtagcaaggatcagattcaggctgtaatcgatgcagacattataacctctctcattgtcttgctaagaacgtcagagccggatgttaaaaaggaggctgcttgggctatatcaactgctgcgtccggtggttcaagtgatcaaattcagtatttggtcagccggggatgtttagagcccctctgcagcgtcctcacccacaacgatcctgaccttgtatacacgtgtcttgaaggtcttgagaacatactccacgcaggtgaggcggggaagaagggcgaggaatcagggacgaacccatacgccgagtttattctagagtgcggaggtctggagaaactggaggatctgcaggacgtggacagcgacaggatctacgagctagccatgaagctgctacagagctactgggaggaggaagtaagcgagagtgatgatccgaacatcccaggttcgaatgactcgtcagatactgtggaagcaacgtccgaagatgctgctgctgctgtgcagccaccaccagtaccgccgccgccgtccgccgcagatgaagccgagtgatggtagatgttgtattgtagattgtatttcaggagaggaaagcctggttccttttcttagtggcactggcatattgtatgatacttactatgatcaggtcgatgtagagaggaacgtgtgaaggtgtggtagccgttatgtgcagaattttcgcatcacgtttctgtaggcgacattggagcattttgaatggaggatttgggccaagagaaaaagaggtatgggggttatttggcgcgtgctgctgaaaggttaaagattgggctggctgttgaaatggagctccgcagaccgca

SEQ ID NO: 2984 - DNA, 2373 bp, Zea Mays
gaattgaagtgctaaagtttagtttcaattatcaccattagctctcatgtttagattataaatggctaaaagtagctaaaaaatagctgctaaagtttatctcgcgagattggaacagggcctaactattagttttagtgtattcaaacaccccctgagagtcgtaatctggcaaggatgaaaataacgtgaacaaattctaccaactacgctgtgcttatcgcctctggcggcggcgagttcgctcacgtcccggcgacccctcgccggtggccacgggccgtgacactccggcatgccgcgcgccccacgccggcagtccgacgaggcgcgccgtggcgcctacaagccgcgcgtcgacttcagccgctcgcgccgccgccgcgaggacggcctcctcgccctccgccgcctcaaccgcgacacgggactcttcaagcgccgccgcgacgagcccgctcccgccgtccctgcctccgatctgactcctacacgcgccgaagcagccccattcgcaggaatcacccgtccggcattcactccctcctcaccgcccgacgtagcggctccccgggatgctgctgagtcagagcttgaaggcctgtcagagctggtcgacaaactatgttcagatgacaccaccagtcagctcgaagccacaatccagttcaggaaacttctttcagatgagaagaactcaactgtgataaaaatcatccgagcggatgtcctgcccagatttgccgagtttctttcaagacatgggcttccccagctccaaaatgcggtgctgttccaaggttggtggaactattaggatcactaaatgcaaacatcaggcatcaggctatctggtgtcttgggaatatagctgcagacttacctagctgcagaggcattctcttcgatcatggtgctcttacacctttactttctcaatttagagaaggcatgaagattccagttctgagaactgctatgtgggcactgtcaaatctttgttttggaaaattgccagccgaagtgcaagtgaaaccaatactagaaattatcagccagcttattcactctgctgacgagaagatactggcagatgcatgctggactgtttactacatatgtggcgataaaggtgatgctgtccaagatgtattagatgctggggtctgccctcaacttgtaaatcttttgatgcatgcatcagctaatgttcttctccctgtcattatggcactcgcaagaatttctgcgggagatgataagcaagttgaggtagctttatagctgtgtattctttgtgtcctcaccctttattttactggtgcagattcccagtgatctgcagtcactagaacgtagaatgtaatggccgaagaaccgagtatggactatggagatgctgcttgttgtcttaatagagaatgacattctcaattgcttaggacagttggtagcacgaaattacccaaagaacatcaagaaacaagcgtgtctaattgtttctaatatcgctgctggtagcaaggatcagattcaggctgtaatcgatgcagacattataacctctctcattgtcttgctaagaacgtcagagccggatgttaaaaaggaggctgcttgggctatatcaactgctgcgtccggtggttcaagtgatcaaattcagtatttggtcagccggggatgtttagagcccctctgcagcgtcctcacccacaacgatcctgaccttgtatacacgtgtcttgaaggtcttgagaacatactccacgcaggtgaggcggggaagaagggcgaggaatcagggacgaacccatacgccgagtttattctagagtgcggaggtctggagaaactggaggatctgcaggacgtggacagcgacaggatctacgagctagccatgaagctgctacagagctactgggaggaggaagtaagcgagagtgatgatccgaacatcccaggttcgaatgactcgtcagatactgtggaagcaacgtccgaagatgctgctgctgctgtgcagccaccaccagtaccgccgccgccgtccgccgcagatgaagccgagtgatggtagatgttgtattgtagattgtatttcaggagaggaaagcctggttccttttcttagtggcactggcatattgtatgatacttactatgatcaggtcgatgtagagaggaacgtgtgaaggtgtggtagccgttatgtgcagaattttcgcatcacgtttctgtaggcgacattggagcattttgaatggaggatttgggccaagagaaaaagaggtatgggggttatttggcgcgtgctgctgaaaggttaaagattgggctggctgttgaaatggagctccgcagaccgca

SEQ ID NO: 2985 - DNA, 2434 bp, Zea Mays
gaattgaagtgctaaagtttagtttcaattatcaccattagctctcatgtttagattataaatggctaaaagtagctaaaaaatagctgctaaagtttatctcgcgagattggaacagggcctaactattagttttagtgtattcaaacaccccctgagagtcgtaatctggcaaggatgaaaataacgtgaacaaattctaccaactacgctgtgcttatcgcctctggcggcggcgagttcgctcacgtcccggcgacccctcgccggtggccacgggccgtgacactccggcatgccgcgcgccccacgccggcagtccgacgaggcgcgccgtggcgcctacaagccgcgcgtcgacttcagccgctcgcgccgccgccgcgaggacggcctcctcgccctccgccgcctcaaccgcgacacgggactcttcaagcgccgccgcgacgagcccgctcccgccgtccctgcctccgatctgactcctacacgcgccgaagcagccccattcgcaggaatcacccgtccggcattcactccctcctcaccgcccgacgtagcggctccccgggatgctgctgagtcagagcttgaaggcctgtcagagctggtcgacaaactatgttcagatgacaccaccagtcagctcgaagccacaatccagttcaggaaacttctttcagatgagaagaactcaactgtgataaaaatcatccgagcggatgtcctgcccagatttgccgagtttctttcaagacatgggcttccccagctccaaatggaggcagcctgggttcttaccaacatagctgcatctgattatacactgctggttgcagaatgcggtgctgttccaaggttggtggaactattaggatcactaaatgcaaacatcaggcatcaggctatctggtgtcttgggaatatagctgcagacttacctagctgcagaggcattctcttcgatcatggtgctcttacacctttactttctcaatttagagaaggcatgaagattccagttctgagaactgctatgtgggcactgtcaaatctttgttttggaaaattgccagccgaagtgcaagtgaaaccaatactagaaattatcagccagcttattcactctgctgacgagaagatactggcagatgcatgctggactgtttactacatatgtggcgataaaggtgatgctgtccaagatgtattagatgctggggtctgccctcaacttgtaaatcttttgatgcatgcatcagctaatgttcttctccctgtcattatggcactcgcaagaatttctgcgggagatgataagcaagttgaggtagctttatagctgtgtattctttgtgtcctcaccctttattttactggtgcagattcccagtgatctgcagtcactagaacgtagaatgtaatggccgaagaaccgagtatggactatggagatgctgcttgttgtcttaatagagaatgacattctcaattgcttaggacagttggtagcacgaaattacccaaagaacatcaagaaacaagcgtgtctaattgtttctaatatcgctgctggtagcaaggatcagattcaggctgtaatcgatgcagacattataacctctctcattgtcttgctaagaacgtcagagccggatgttaaaaaggaggctgcttgggctatatcaactgctgcgtccggtggttcaagtgatcaaattcagtatttggtcagccggggatgtttagagcccctctgcagcgtcctcacccacaacgatcctgaccttgtatacacgtgtcttgaaggtcttgagaacatactccacgcaggtgaggcggggaagaagggcgaggaatcagggacgaacccatacgccgagtttattctagagtgcggaggtctggagaaactggaggatctgcaggacgtggacagcgacaggatctacgagctagccatgaagctgctacagagctactgggaggaggaagtaagcgagagtgatgatccgaacatcccaggttcgaatgactcgtcagatactgtggaagcaacgtccgaagatgctgctgctgctgtgcagccaccaccagtaccgccgccgccgtccgccgcagatgaagccgagtgatggtagatgttgtattgtagattgtatttcaggagaggaaagcctggttccttttcttagtggcactggcatattgtatgatacttactatgatcaggtcgatgtagagaggaacgtgtgaaggtgtggtagccgttatgtgcagaattttcgcatcacgtttctgtaggcgacattggagcattttgaatggaggatttgggccaagagaaaaagaggtatgggggttatttggcgcgtgctgctgaaaggttaaagattgggctggctgttgaaatggagctccgcagaccgca

SEQ ID NO: 2986 - DNA, 1278 bp, Zea Mays
cggcgatctccccgccgacgtgggcgaacggctccacggcgatcggatggccacgagcggccgtcgcctaccctcccacagtcccactcccacactagtccttttcccctgacgtggcagcggcaagtgcacccaaacgtttcgatatcccagagtggtgtggccgccgccggcggcttctttctccccttccattccgctccccgtgacgtcaccgaccaggcaagcactccgctccaccagagccgcctcgcctgtctgtccgacccacacacctaccggagcgcgcgtcccgaggtcggcggagcagggtcgggaggagggtatggcggtggtgggcgtcctcgcgctgcagggatcctacaacgagcacatggccgttccctgcacttcgagagttcgtcggaggtggaaagcctgtctggggaacctgtgctgggctcatctttcttgcaaacaaagcagtagtgttgctttcagggcaaaaaacaggggggcaggaacttgttggaggattagattgtacagtccaccgaaacttttttgggagtcagcttcaaagctttgagacagagctttccgtgccaaagctttcggagaaggaaggagggaatgatacatgccgcggtgtatttatacgggcacctgctatattggaagtaggtccagatgttgaaatattggcggattgccctgttcctgttgacagacccagcattacaatatcatttggggagggtactgaggaagaagagtattcaaaagatcgggtaattgttgcagtgcggcaagggaacatcctcgcaactgctttccacccagaattgacatcagactccagatggcatcgtttcttcttggacatggataaagaatccccagcaaaggcgttttctgcgctctccctgtcgtcatcgtcaagagacactgaaggcctgccaaagaataagccgtttgatctgcccatttttgagtaacgctaaagacaagacaaaccaaaagattgaaggaacgaagaaactgaccgtatttattatcgatcatcatttagccggttacaaaaacagccagctgagaatctgtcatactcagccgaaaaaagtgttgtctggtagctaacttgtacggataaaaaataatcacgctgtgtgctgtacgcaattctcatcagataaagcgaaacattgttttcctgggaattatagttttgctgaaggtgaccagttgaacacttgaacatggtaatactttccccctctatgtgcaacttcgttcaag

SEQ ID NO: 2987 - DNA, 1406 bp, Zea Mays
cggcgatctccccgccgacgtgggcgaacggctccacggcgatcggatggccacgagcggccgtcgcctaccctcccacagtcccactcccacactagtccttttcccctgacgtggcagcggcaagtgcacccaaacgtttcgatatcccagagtggtgtggccgccgccggcggcttctttctccccttccattccgctccccgtgacgtcaccgaccaggcaagcactccgctccaccagagccgcctcgcctgtctgtccgacccacacacctaccggagcgcgcgtcccgaggtcggcggagcagggtcgggaggagggtatggcggtggtgggcgtcctcgcgctgcagggatcctacaacgagcacatggccgcgctgaggaggatcggggtgaagggggtggaggtgcgcaagccagagcagctcctcggcatcgactcgctcatcatccccggtggcgagagcaccaccatggccaagctcgccaactaccacaatctgttccctgcacttcgagagttcgtcggaggtggaaagcctgtctggggaacctgtgctgggctcatctttcttgcaaacaaagcagtagtgttgctttcagggcaaaaaacaggggggcaggaacttgttggaggattagattgtacagtccaccgaaacttttttgggagtcagcttcaaagctttgagacagagctttccgtgccaaagctttcggagaaggaaggagggaatgatacatgccgcggtgtatttatacgggcacctgctatattggaagtaggtccagatgttgaaatattggcggattgccctgttcctgttgacagacccagcattacaatatcatttggggagggtactgaggaagaagagtattcaaaagatcgggtaattgttgcagtgcggcaagggaacatcctcgcaactgctttccacccagaattgacatcagactccagatggcatcgtttcttcttggacatggataaagaatccccagcaaaggcgttttctgcgctctccctgtcgtcatcgtcaagagacactgaaggcctgccaaagaataagccgtttgatctgcccatttttgagtaacgctaaagacaagacaaaccaaaagattgaaggaacgaagaaactgaccgtatttattatcgatcatcatttagccggttacaaaaacagccagctgagaatctgtcatactcagccgaaaaaagtgttgtctggtagctaacttgtacggataaaaaataatcacgctgtgtgctgtacgcaattctcatcagataaagcgaaacattgttttcctgggaattatagttttgctgaaggtgaccagttgaacacttgaacatggtaatactttccccctctatgtgcaacttcgttcaag

SEQ ID NO: 2988 - DNA, 937 bp, Zea Mays
cctaattgcaatccgcgtaaacgtagctttctctcagttcagacgcttcaccatcggaaaggccacagctagggttcgatacttcgatccccactccatctccaccgaagaccgtcgcgtcgctccgccaccgaagcagctcaaatttctctataagatgagctggagatttcctctcttcggtattgaggagttacaaaggctattgaaagacagagaggcatataatgcattctttaactcacttgatcaagtgaaaacccagaacaatgtgcgtgatgagcttaaaaaagagacattgcaacttgcaagggaaaatttagaaaaggagcagcggattttggaacttaggaatcagtgcacaataattagaaccacggaactggctgctgctcaagaccgcctaactgatttggagaggcaaaaggatgatattatgaggtcctattcccctgccgcactgctcaacaagctccaaacatcaatggcaaagttggatgaggagtccgaggagctgcaccagaagttcctggagaaggacatcgaccttccaacctttgtgcagaagtacaagaagctccgcacggcttaccacaagcaggcgttgctccatctcgccggccagacatcactccgctgacatccggccaggcgtcatggcaactttgttgtatttctgctcgcctgttcttgttctacactatgcttggccctgttttacgagtgcagcctcttgtagggatttgccgaacatcagcggatattgcatgtatagttttatgtcttgcaaaaacgtcttatgtactctgtcctggtgtagtggtgtttacgtatctagtgtccaagttgggattcatttgtggtaactaaacactttgcctattttgttcaattcgatgataataaagcttttgtacgtttgtgtacacatccgttc

SEQ ID NO: 2989 - DNA, 1220 bp, Zea Mays
cctaattgcaatccgcgtaaacgtagctttctctcagttcagacgcttcaccatcggaaaggccacagctagggttcgatacttcgatccccactccatctccaccgaagaccgtcgcgtcgctccgccaccgaagcagctcaaatttctctataagatgagctggagatttcctctcttcggcagctctcagcagcagcaagcagatccaagtttccaggacatccctacgcagtcttggtaccctccctcggtggtaggttcctcttcacgtccatccacccctacctcttctagtgctagtctacaccaaagagcttcagatagtccgcagtcttcatcccgtgggcaaccatctcctgctgaggctgcagggataattgcccgtttgaaggataagagtattgaggagttacaaaggctattgaaagacagagaggcatataatgcattctttaactcacttgatcaagtgaaaacccagaacaatgtgcgtgatgagcttaaaaaagagacattgcaacttgcaagggaaaatttagaaaaggagcagcggattttggaacttaggaatcagtgcacaataattagaaccacggaactggctgctgctcaagaccgcctaactgatttggagaggcaaaaggatgatattatgaggtcctattcccctgccgcactgctcaacaagctccaaagcataatgatcatgctagcctttcgaactttttcaataccggttcaaaacaacaacaacaaaaacatcaatggcaaagttggatgaggagtccgaggagctgcaccagaagttcctggagaaggacatcgaccttccaacctttgtgcagaagtacaagaagctccgcacggcttaccacaagcaggcgttgctccatctcgccggccagacatcactccgctgacatccggccaggcgtcatggcaactttgttgtatttctgctcgcctgttcttgttctacactatgcttggccctgttttacgagtgcagcctcttgtagggatttgccgaacatcagcggatattgcatgtatagttttatgtcttgcaaaaacgtcttatgtactctgtcctggtgtagtggtgtttacgtatctagtgtccaagttgggattcatttgtggtaactaaacactttgcctattttgttcaattcgatgataataaagcttttgtacgtttgtgtacacatccgttc

SEQ ID NO: 2990 - DNA, 1877 bp, Zea Mays
gcccggacggcggagcacggcacggcacgagaggcccccacgacgagaccccccgtcccgtctggccgtttccccctctccgcaccgcactcggcactccactctcctccccctgaccccgagttgagtccactctgctgtccgctcacaccaactcctccatccaactcggcaactccacgcagccagcccggcgcctcccatcagtgggtggggcggaggttggtaggccgggacgtgccggcaggcggttacgggaggcgcggccgcgatcccgggccggatctggacgccgcgatggaggacgccgttgccgctgagaatgggatcgagggggagggctacgtcgtcgtcaaggcggcggcggccgcggaggcggagggggactccggcgccagcgatcgtggggatctcgccgcccccgctgaggacgcggcgccggccggatctgaggacgccccggccccggcggtgacgccggacgagaccgcggcacctgccaaggcgccggccaagaagggtggatccggggacgccgccggggtccggaaggcgaggccgcagaacggcagggtgcccgccgccgccgccgccgcgccgagggtgaagaagcccggggtcctctcgcagagcgcctccttcccggcgcggggtgccgccgccaagaaggcctcggcggttgctactcccaagcaggccaagggcgtcgtgaccaatggatcagaggcggcagcaggccgggcagccgagaagaaggcgaattcagcgcggacacctgtcgctcgccggtcgatgcctgtcaagtctggatcagcggatgcggccgccccaaatgacgcaattcccgctgtccaagagccacatgaaaacaccgacaagccattgaaacaaatgcagccagggaaaacagaggatgatgtgcgctctaccacatcaagtaccaatactccgcgtgcagcagctcgcaagagtgctgctgttgctgctggttttagtttcagattggaggagcgtgctgagaagagaaaggagtttttccaaaagcttgaagagaaaatccacgcaaaggagctggaaaaaacaaatctgcaggagaaatctaaggagagccaagaggctgagatcaaactgctgaggaagagcctaacatttaaagccacacctatgccaagcttttacaaggagcagccacccaaagttgagttgaaaaagattcccccaacacgcgctaggtcgccaaagctcggccggcacaagccagccaattctgccactgctgcttctgcggatggttctgtatcatgtgagagcccacggagcactgcaaattcgagcaaggcgtctgcgaccacaaaggctgaagcaagacccgtggtcacaaggccaaagatctcaaactcgaaacctaaggcttcaagggcaaaggttgcgcgagcgcaagaaaccccagctgaagcccctccttcagaacctgctgctccagaagatttcacggttgaacatggcgttggagacgccacaggtcctgatctgaccgcgcaattggttgcttcgaacgaagtcccagtccatggttgatcagctgagcattttgcatatttattcccttcttgcagttctgtgaatagcgagggtgtgtgcttcattggaagttgaatcgctcgaagtgtcatggtttatcgtttccggagtagacatccattttgtttttcagcttgtcatcgggcatgccatgtatattgcttggtattgtgttcttgtttaaaatttccagtcttgtgtatattggatttgtttgtcgctggagatcctaggattgttgcaatacgctgaggcaaattgtggattgttttgtggctgttttacttttagccccg

SEQ ID NO: 2991 - DNA, 1378 bp, Zea Mays
agagcaacacttataagtaggggacgacgacgactaggtactcgatcactagcagcgccaccagtcgccactccagcgcgcgccattgccaagttgaagctcgtcgcgtacgtggtcttctcatttgcccctcacttaacttacttgactagcttgcaatgtcggggcatgcacgccaagcttcgttcgccctactccgcgccttcctcgtcatcgtctccttccgagctggaggtgtttcgtcgacgagaacattgaccatgacgaaccactgcgggcacacggtgtggccaggcatcctgtcgagcgcgggctcgccggcgctggaaaccaccggcttcgccctagagccgggccagtcacggtcgctaccggcgccgcgcgggtggtcggggcgcctgtggggccgcacgcactgctccgccgacgcggcggggaggttcgcctgcgcgacgggcaactgcgggtccggccggctggactgcgcgggccacggcgccaagccgccggcgaccctggccgagttcaccttcgacggccacgaaggcctggacttctacgacgtgagcctggtggacgggtacaacctgccgatgctggtggagccgcacgcgccgaacggcggcggcggcgccaactgcctgctgacggggtgcgtgatggacctgaacgccgcgtgccccgccgagctgcgcgtcggcgacggtggcgccggcgccggcggcgcggtggcgtgcaggagcgcctgcgaggcgttcgggaccgcggagcactgctgccacggggagcacggcaaccccgacgcgtgctggcccacggcctactcgcagttcttcaagaagtcgtgcccccgcgcctacagctacgcgtacgacgacgccacctccaccttcacctgcgccggcggtggcacgtcgtacgccatcaccttctgcccgagcgcgacaagtgtcaaatcggtgggaacagatccagaagcacgagcggccgtcggtggcgggcgagtgccggcggcggcggcgtggcgcaccatgccgtcggtccttgtcctcctcggcctcgccatgacggcgctttcgcatgtcttttaagcaagtatcatcagccgagtgggcagcaacgacagtggacagtggttgcgtgcttttaccttctacaccagtacgtgaccggcacgtcgtactcgtacttcacattggttttggctgttgacagatcatgcttcatggtcgcttatctttgtgatttagtagtagcacacagatatataccgttggaatccacaagcagtagtttggttgtgatgccagaacgagatgcaataggacgatcatttaaataagattgtttaatttatagttaaatgttgaaatatgac

SEQ ID NO: 2992 - DNA, 995 bp, Zea Mays
gttctacctctctctgcactaccacaccaagttttgtcaaatttgggaacgctgttcgcaattccggcgccggcaccatgagtaagctgcagagtgattctctgagggacgcgattgcctcaattaccaatgattcccgtgagaagcagcgcaaatttgttgaaaccattgagctacaaattggactgaagaactatgaccctcaaaaggacaagcgcttcagcggttctgttaagctgcctcacatccctcgccctaagatgaaggtttgcatgcttggtgatgctcagcatgttgaggaggcagagagaataggtatagacaatatggatgtggaagccctcaagaagatgaacaaaaacaagaagctagtgaagaagctggcaaagaagtaccatgctttccttgcatctgaggctatcattaagcaaattcctcgtcttcttggtcctggtcttaacaaggcaggaaaattccctaccttggtgacacaccaggaatcccttgagtccaaggttaatgagacaaaggctacagttaagttccagctgaagaaggtgctttgcatgggtgttgctgttggcaactgcggcatggatgagaagcagatcttccagaatgtgcaaatgagtgtcaacttcctcgtgtcgctcttgaaaaagaattggcagaatgtgagatgcttgtacctgaagagcactatgggaaaggtgtaccggctgttctaaattttccaattaggcttagaatttccaggagactcgagtgcttggacacttgccattttccctaccatccatttttttgagcaactatggattatctagttacaaacttggtcttgtacttgatgttttgttcttgataccgaacctatgacattgttaccttatttcaatgtttctctcgtcacccacaggccgggggctacgatgtccttgagtcctatccgtacggtagcctagttttttgccctgcttgcttaacagcatcca

SEQ ID NO: 2993 - DNA, 976 bp, Zea Mays
cacccccctcatggacggtggccgagccgcagccgtcggcggcgacccctctcccatcgctgctccttccaatcccccggcgctgagcagccggcccgtcgatgtctcctcgttcacccataccccgtgctactggttcctctctggcatcagaaagcaggccattctgatgatggatttatttgctgggattatcacgtgatatgcatccagtctaggcgaagcaaagaagttcttgattttgtttgggatctggactccgatcttcctttcccttccccattgatccaatatgtttctgaggcgattcaaccactatcattcggcaattccagatatgcaagactcttccgtgtggttcatgctcctgtgtttcttcaatcgtttgcctcagacagaagccatatgaaggatcctgaggggaactggattcagttacccccaaaatatgaaccgatcgtggctgaagatggaaccaccaataacctcaatgagtacatcatgatgtctgtgggggacgtggcagacagagaaaggatggctaatgatgtttactgcaacaagcatggtgtggtgctaaatgaaacgatcttccctgaattcttcgcccagctgcctgctccacatacttagcaagcgatctttctgttgtgatgggttactctgtacacttcaatagtgcactcacaagattatgaattaaaatatatgggcactattggacacatggtgcctctaagtagcgtttcagatagatcctggcctgttttggaaagcaaaatgtggggatctcatagttctgttagcctagacatctgaaagcttcatcttgtcccaaataatgatgactaggtcatgtttaacggctttagctttctttggtcattgttcgtcgaaacttatatgaacataacacttctatgtgctcgttgttaccttacaagtaaatatgcaacccataaactttaaacttgca

SEQ ID NO: 2994 - DNA, 3068 bp, Zea Mays
aaacaccccttggcattctccatctccactcccacagcctctctggtctctccggcgcctcgactgcgagacccaccgcgacgccccaccgatatggcgacagccggtggcgccgcaccggcggcaatggacgagaaggcgcggcgcacgcgcgacctccttgctagcttctacaacaccgacccgtccgcggccgccgggggtgccgcggcccccgcgttcctggcgcgcccgtcccctaccgccgcgcccgcatcgcccctcgactcaatcaactccacctccttcgatcccgacatctacatgaatgtcctggtgcaacaatccaatctggaaggtcttctacaaaggcatgtgaagatggctactgagatcaagaacctagacacagatttacagatgctagtgtatgagaattataacaagtttattagtgcaactgacactataaaaaggatgaagactaacattgttggaatggaggcaaatatggagcagctccttacaaagataacatcagtgcaatcaagaagcgacacagtgaatacatctctttttgacaaaagggaaaacattgagaaattacatcgcacacgcaatctgctccggaaagttcaattcatatatgaccttccaactcgtcttaacaaatgcatcaagacagaagcatatgcagatgctgtcaggttttttactggagcaaaacctatttttgaggcctatggagatacatcctttcgagactgtaaaaaggcttctgaggaggcaatggatgtagttatacaacaccttcagacaaagttatactcagattctgaacctattgaagcaagagcagaagctgtagttctccttaaacaattgaagtttccagtggacaacttaaaatcgaatctacttgagaagctggaagaatgtctcttgaatttccagaatgagactacacatgcttcaattggtgacatctcaaagacatttcgtgcttatttaataatatttcctgattcagaaaggcgtctcattgaacttgcacaagctttgttcttaaaccgatatgagacagtcagagagaatctgaagaaaagaattccatcaacagatctactggcaatgctacgatccttatgggaggatgcaaccatcatcgatgaggttatttcagaggctgcgctaccagctttttctttggagactactcgagacattgttaagcaacacatagcaactgcatttctccatcttcaaagtgaaatatcagaggcactggttaggacacattcaacatcaaatgagaagttggaagagtcacagctgcaaactgctatggagacaagcaaaatcaaagtatcccaaggatgcatagatctcctgcagtgttctgtttctggctatgttgcttccaggaatttcatcatctggtagatggcaatatagagttgcttgttaagctgagggatttgattattgattgggtacaagaaggttttcaagagtttttccagaaacttgatggacattttcatgtgctttctgggagaagcaaaacaaatttacaagagccaactatggattctatgcaaactgataagaccccaacagtcttggtacttatgcttgcacaactctgtgtttacattgaacaaacaacagtccctaaagttacagaggagttagcttctttttttggaggtggtgcacatagctacgaatatggaccaccttttgtgcctggagaaatatgtcggctatatcgatcatctggagagaaattcttgcaccattacataaatatgaagacccagaagatctccaaacttcttaacaagcgatttacaacaccagtttggattaagcacaaggaacctagggaagtgaacatgtttgttgatctacttctcctagagatcaatggtctggtatctgaagtcaagcagatcttacctggtatggttcggcgacatcggcattcagatagcactggtagcacgacttcctccagaagcaatccaatgcgagaagacatgttgaaccgatcaaacacacatcgtgctagaagtcagtttttagaaaatcacctggcaaagttatttgagcaaaaaatggaaatattcaccaaagttgaatacacacaggaatctgttatttctactgtcctcaagctctgcctgaaaagcttgcaagaatttgtccgtcttcagactttcaacagaagtggatttcagcagattcagctggatatggaatttctcaagacctctcttaaggaatttgtggatgatgaagcagccattagctttttactcaaagaggtgaacaatgctgcccatgagagatgtcttgacccaatccctcttgagccccccatattagataagctcataaatgcaaaactagcaaaaattaaagagagaaacccaaatatgcggtagctatgcacagattggtgtcgtttactagaattcagttctgtccatttgaatgcactattcagagttgtgtgtgcaacttcatagagtttagggcacatagcatggatgaaaatctggagtcagactcagatttgaataacactccccaaattgtatactggtatacttaatttggggtggtcgagctgttagcatccccttgcttgtcaggctaccgtcaagttgtcttctgtgcattgttttcttatcccaggtcaggtactggtctgaatttaatcaaatgagcatcgagctgttagaaaaccaaggcaccaactctaatagattcaccatctggaaagcgagggcagttatcatgccttgtgaagatggtttgttgggattgcgattccctttatgcgtcctgtttttttatttgtcatcttctgctgtatcatcctttctttgaactatattttcatgtggtacatgataccttttgttaccttcgccacagtactgctcacgaatagcattttgagccattttgctatgccttggaataaaacttttatcctcgatcctaggaatggataacctcttggattttcacatctgatattaaccattaaaatttggatgatggaatgtgtgttcgcg

SEQ ID NO: 2995 - DNA, 1921 bp, Zea Mays
gcaggatcgtttcaattcaactgagatggcaaaacttctgctcggggaaaaacagctaagaacagtcgggcggtcgggccaggcggcgtgtgagcgtgtccgagatccacaggacgcaggacgctgccgatggcgaagccgaggaaaacccgcacctcggctccagatccgcccgtagccgccgttcggcttccgtggcacacaccggcgccggcggtccccacggccgttctgatctcgctcgctgccctcctcatccgcgtgctggtttccgtgggcccctactccggtcagggtgcggcgcctaagttcggcgactatgaggcgcagcggcactggatggagctcacactccatctcacgcccgccgactggtaccgcaacacctccgacaatgaccttgcctactggggcctggactacccgcccctctccgcctaccagagcctcctccacggccgcatcatcaacacctcactccccgaggccgtcgctctccgctcctcccgtggctacgaatctatggaatcgaagttgctgatgcggtggacggtgctgtcatcggatctgttggtgttcttcccatctgctttgtggtttgtgtgggcgtacatgaaacttggagtcggtattagtggagaggagagacgggaggggtggatgtggctgctagccttggtcctgatcagtccttgcttggtattgatcgatcatggccattttcagtataattgcattagccttggacttacgctcggagcaattgctggtgttttgtcgaagaatgagcttgttggtgcatctctcttcactctcgcaatcaatcacaaacagatgagcctgtactttgcaccagctttttttagccatcttctggggaagtgcctcaaacagaaatatcctattgtcgaagtaacaaaacttgctttcgtggtcttgggaacttttgctcttgtctggtggccatttttgcattcttatgaggctgtccaacagacttgtgaaacctgcttctcagttggtactgaacttatgaagtctgtaatatcaggttctctctcgattagctccatttgagagaggcatatatgaggattatgttgcaaacttctggtgtagtacttcagttattatcaagtggaagaaattgttcgcgataaagccattgaaacttatgagtctatctgctaccatactggctttcttgccttcattcgttcagcaagtcaagtctccaagtaatcttggcttcctttattctctgatgaacaactctttctctttctacctattctcataccaagttcatgagaaatcaattttgcttcctcttttacctgcaagtcttttagcactggaagaacctcggatgtacggatggttcgtgtactttgcccttttctcaatgtacccacttatctgccgtgatcagcttcttctacaatacatagctgttcttagcctattctttctgatatactactcacctggcggaagctacggaaagagatcaaacatttcatgcaaggcaaagttagttcttagcttgccatttttatgctcacttctacttcacattacctacctgcaaatagagcctcccaagaggtatcccttcctctttgatgcactgataatgttcgtctgtttttcacaatttgtcatcttagctgtgtacaccaactataagcaatggatgttggactcaaattctagatccataggtgtgaagaaggatctgtgattgaaaattttgactgctaattttacagagaaatccactgtccctttgtaaccttgtgtgtattcccttttaacattatttattgaatgaaatgcggtgcaaattcagacatttgtatacattcagaactggaaactactagaatttaggtgatgtagactcaacactgcttttgtg

SEQ ID NO: 2996 - DNA, 4194 bp, Zea Mays
cagcgaagcgtcccggcaaaggcacccggtggccgcgtccagcgcctaccgtttccgggggggctcctcgcctcctcttcccccgtccacccattctcctggccgctcttccccttcgtcgtcgcactccgctagctcacctcctcgtccccatataaaccatatccctctccgggccccgcgcagccgccggcgacaagcgcgcaggagcagcagttgtcgcgcctcactgatggcgaccgccgtggcgtcgcagccgtgccaccttcccctcagcgccggcggagatcccagcacttcgaatgttcatactctggagaaagtatatggtttcagattcatatgcagaagcattgttgatgtaaagactcacaaattccactcccgcatttcaaagaggaagtgctacttgaggaactcactgtcggagtgtgacaggaccatccacagtggtagatggttggagtttcggagacacaagggagtcttccagagaactagaaggatggttcacattattccattggcttctgatggtgatggcaaccatatatctgttaatggagctctgcaagttggttctacaagcaacattgatgaaataaagttgaaattgaataaagcattgcagagtgaagatatcagcaatggactcgtccagtcgatacatgatgctgcaagatctattgagttggctctcatagagcacagcaaattgccaaagagctcttggtttccaaagacatggctaggcgttgagaacaatgcttggataaaatcactgtcttaccaggctgctgtagactcattgttgaaagcagttatcgatgtttcatctcgtgggaatgacagagatagagatattaatgtgtttgttcaaaggagtttgtcccgcctgctcaccccccttgagagtgttatcaagaatgaattatctaagagggaacctgcattgtatgaatggtattcatccgatcaaaatcctttggtggtgagacaatttgtaaacatttttgaaaatgatccaatgttttactctgctacagcaatatgccttgaaggcgagccgatgaatactagtgaaagtgatctttctctgcttatgctaggtttgatctgtcttgctgcaatcacaaagtttggatcagcaaaagtttcttgtcagcaattctcttcaatggtgcctgatattattggtcgattcatggatatgcttcttgagtttgcccctctaagtaaagcatataacttggcgaaagatattggtcttcggagagaatttttgtataattttggtcctcgtgctgctgttcctaaacttggcaatgaccatggacttgaaatatcattttggattgaactggtgcagaagcaattactctgggctcttgatcgtgaaaagatatggtcaagactgacaacaagtgaaagcattgaggttctggaaaaggatcttgcaatatttggtttttttgttgctttgggtagaagcacacaaggatatttgtctttcaagggtttgactgatttggatgattcactgaatggtattgtaaggtatcttatcggtgggagtgtactatattatccacagctgtcctcgattagttcatatcaactgtatgtggaggtagtctgtgaagagctcgagtggcttcctttttacaatgatgatgttttaagtgcaaaaactgatactgaaggtagagaagaagtgcctaaaggagaagtcatatcaagagtcctaaatgtgtgctcttactggatgactagttttacaaagtacagctcatggcttgagaacccttcaaatgtgaaggctgcaaagttcctttctaagggacatgtcatgttgagtgactgcatgaaggagcttgacatatcaagaaatatgtcaaacgacagtggcttcctagaacctgaagaagaattggatactggaacagaattagcttcctttgacaagtcgcttgaaaatgttgaagaagctctggttaagttagaaaatttgcttcaagaattacatgtttccagttcgcactctggtaaggaggatctgaaggctgcatgctctgatcttgaaatgataagaagactgaagaaagaagctgagcttcttgaggcatcctttctagcaaaagcagaatatctggaggccgatgcaagtagcggatcactatctcctgcagaggaaggacctgtaaagacaagtagcaggacgaacgatacatcagcaccacaaaaaacaggaagcagggtggataataaacgtcgcccattttgggacttctttggtcggtctttgaaagttgatccagctcttgcagatcaggatctgatcactgtcgccaatgtggagaaggaaggcatggagtcaaatgacatcctccgcttcgaacagttaagacgtgagctgattgagttagaaaagagagtgcagaagagtgcggatgaagctcaaaaggaggagactgtgttgcaggggacacaactattagcaattgatacaggagctgctatgggtttgctaaaaagagctcttattggggatgaactaactcagaaggaaaagcaggctcttcaaagaacattgacagatttggcgtctgtcgttcctataggaatactcatgcttttgccacttaccgccgttggtcatgctgctattttggctttcatccagagatatgtgccatcgatgatcccgtccacatatgcccccggtaggttggatctccttaggcagattgagaaggttaaggaaatggaagttgctgaaggcagcagtgaagatatattggaggaactgaacaaatgaaataagctgggcatgtacagatggacatgattatactgcttagcttacggtctttcctgtaaagttgttttggaacaagacatttgagggggtttgttttatctaaagattctttgaatggcatacccgctggaaacagaagtgcaaggccctaggaataagtaaccaatcattgtgtcgacaaatgttccacgtctgcaggctggtgtatacataaaacatactccacattatacattacatgggcggctcacggtgcccttcaacatagtagaggatgaatgtccaagttcctcctggacagtgttctgtgtagggtagtggttttgatagaggattgtatatctagttggtatgttggtgatcacctttgttttgttttttaggaaccaagcctactacatgcattattgtctgtacccaaatgccaagttcagtgatctcctacgggattgagtggtgcgggcattttctaataataagccaagcccgtgagcaagatgtaggcgtgaacagtgttcgtcagtcgccgccaccgtctcccctcctgatccaatccaatggcgcgcctccacctcgtagccgtggcaatgggcttgctcttggccttgacgacggcgcaggcaccgggcgcgtccacgatgcccgcgcccatggcgcagcctccggcgacctcggcgcctcctcgtcccgcgccatccccgacccagaagaccgctccagctccggcgcccaatgccacggtacccgcccccgcctcgccgccggcgccgagctctatcgggcagacgccgaccgaggcgccgtcctcccctccgccgcccagcgccgcgtccagcgttgcctccgccttgtacgtggccgccgctatggcggctgtcgtgtttttcttctgaggtcggtactcggcgccgatggatccgccgcctatggtatggtacggtgcggtgtggatttgacacgatggctcccgctaccgctggtcgagtttgcttattaggatactagtagttaattaatagttgggttgatcagatcagatctagcgtttttgttgagtggggatattatttcttctacggatctgcacactagggttatgtcactatggttgccattgttattagggaaggtgcaaacttctaatttgaatcacatgatgttgatccaagggacgcataagggacgccaagcttattaaaacgataaaacgatggaacgctcatgggtgaaattttgacttttaaacgtttaaactttgtttaaacatagttttaaacaacataggaaaaataccaatatatcataatttcagacaataatatgaagttaaatactccctccgtcccaggatataaggcgtaactactttttat

SEQ ID NO: 2997 - DNA, 1602 bp, Zea Mays
agaatggcggcgcactcgtgctgacctcgttcggcttcggtcctaccgccgccgcgtcgtgggaggataatcgaactgcttcccttctcgtcttccctaacctttccgtccttcccggattatttccatcaccagagcgtatcgcgtcgtctcctctctatccgattccgcccgcggacccaggctcccgcatggacgctgccggcggggtggaggccgccgccaacggcgggatcgagggctccgccgacccctgcagctcaggcggtgccggcgggtacaggcgctccgtccaccagatcgccggcggcgggaaagctgctgatatcatcttatggaggcgagcgcgtgttacatttggtgttatatttggtgctactctggcatggtggttgtttgagaagtctggactatcattattaactatctgctctgatatacttctcatcttgatagttctgcagttcataagggttaaaatagctggactgctagataggcagcctaggccactacctgagttagttttatcagaggagatggttagcaatgctgcggcttcattccgtgtgaaagtgaacagcatgctgatgatagcgcatgacattactcttggcaaggacttcaggctatttttccaggtcgtgattgtcttgtggctgttatctgtcattggaaatttctgctcgtctatcactcttgcttacataggaaccgttgctttggtcacaatgcctgcattgtacaacaagtaccagaggcctgttgataggtatgctgggatggtctaccggaacatttcgaggcattacaagatagttgatgagaatgtgatcagtagactaccgagaaggtttatcagagataaagaggactgatactctgaaaaatgaactcgctaagctagtcaggtaatcttttacctacattgtcagaccttacatggtgtgaaactatagagctacgaaaacagagaacggcatggaacctacagtagataccgttgcagtgtactcttgggcaaaggtttgagacgaaattaaaatgtatagctttctgtgttagctctttgcaacgaactggctaaatgttgttaaaaataacaaaagcaattgtcatgggaagttgaaaatgaagtggttgtaacttgtgaaagcgagtgctgtagcaggtaccagcaatggcaacagactgaatctactgcagggtactttggttgcggcttgcagtcagatgcatggctacgtctcactccgaagtcagctccgaacatgttacccccctggatgcttgtccatatcatatataggcccaacagtgtgaatcactcgagaaacaggaagctcgatgtgacagctggtattgaggagcgcgaagggattactgagtcgatgtctgaagaggctgcatcagcaaggatgagtctggtcatctggtgccggacggtgaccaggagtaggaaagaggaaagggccgtgtgggtggtgtttatggccatgttggccgtttgtggtgtggggcatctgtggcagtgagccgacccattcacgagtatattccgaaccctacagtaagcaatgagaataacgtgaaccaatttcc

SEQ ID NO: 2998 - DNA, 2529 bp, Zea Mays
cccttatgcattcgaacgcgcttcacctgagcgccatgtgttcgataaaatgctgcttcctcctccggcgccttcgccgcccccgcatccactgtttctccacggcgggggcgagcactacactcccgcggaagaattatgcgggggatcctctttgcggagcggggccgcctcccgcgccgggcaccggggacgcggcgagagcccacgaggcggccgtcaggcggctggcggcggcgggcgacgtggatggcgtgcagctggcgctgcaggagatgcggctgaggggagtcccgtgcaccgagggtgccctcgtcgccgccgtcggcgccttcgctcgcgcgggggcgcccgaccgcgcgctcaagacgttctaccgcgccgtgcacgaccttggctgcgcgcgcccccaccgagccgcggctctacaaccacctcatcgacgcgctgctgcggggagaacatgggcgctgtgccagaacaaccgggtcggggccgcgcgcaaaatgctcgacgaaatggccaggaaggggtgtcccccggacgacgtgacgtatgccaccattgtctcagtgctgtgcaagcttgacaggctggacgaggccacagaggtgttggctgccatgccgcctgtggctgcctcctacaatgccatcgttctagctctctgcagagagttcaggatgcaggaggtgttctcagttgtcagcgacatggtggggaggggattgcagcctaatgtcatcacgtacacaactatagtcgatgcgttctgcaaggctggggagctgaggatggcgtgtgccattctggcaaggatggtgatcaccgggtgcactccaaatgttgtgacattcactgcattagtcagaggactattcgatgatggaagggtgcatgacgcactagacatgtggaggtggatggtggctgaaggatgggcaccgtcgacggtttcgtacaacattctgattcgtggactttgcagcgttggtgatctcaagggagcatcatcgatactcaacagcatggagcaacacggctgctttcctaatgtgaggacctactccactctaattgatggtttctccaaagccggggacctaggtggtgccatatcaatatggaatgacatgtcaagatctggttgcaagccaaacgttgttgtttacacaaacatggtggatgtgttttgcaagaagctgatgtttaatcaggcaaaaagtcttattgataagatgctattggaaaactgtcctcccaacacagtgacattcaacacgttgattagaagcctatgcgactgcagaagagttgggagggctcttggtgtgttccacgagatgagaaggcatggatgcgtgccaaatggtaggacctataacgagttgatccatggtctgtttagggagggaaactgtggagacgctcttcacatggtgaccgagatgcaaagtcatggtattgagttgagcttagtaacatacaacactgtagtaagtggtctatgtcaaacgagaatgagcagagaagctatggtttttgttgggaagatgatagttcaaggaattcaaccaaatgcattcactttcagtgcaataattcatgcttactgcaaggaaggggaagtcaggatggccgcttggatgttaggtgcgatgaatgtagtgaactgccaccgtaacatactagtgtacactattctaatggcagagctttgcaatcaagataagctggtagatgccatgacgtacctactaaagatgctatatgaaggtatatatccaaatacagtgacatggaacgttttggtccgtggagtttttaggaaccttggctgcattgaaccaagtgatttcatacaacatattaccatgaacttatcagaagggacctgaggttcaatgttgtgattatttggcatcccaatgaaggcaaagttgataagcagcagattctctcagatcgctgtttctgcattaagtaatttatctgtatggtatgatatattctgtaacgttaacattcttttgtcatcaatgatcagatgagttgaggttatccagctgaccttggggtctcattagaagtcaaaattgtaaattctgattcatcatttccattgcttgtgagatttggcaccgttcttctgtgcctccagttttttgtatactgtgtcaatctcagactgcatgcaaaaagactctggattagaaatactcaaaagcaacaagaaaggccaagaaatcagtgactgaagcggatcaagagtcttaaatgccttcctcacctggtaatagttcagcatattctttcttcttttcttcgtttttgcagtcaccaaatccctttcaatgtcaaaaggtacagggtccaacactatgcctttgatgtattcaaaacctcatagctgatttgtggcatgcaacgagggttaccatatatagaattatagatccaaaatacagtgaaagtttgaaacacaaggagtctacaaaactaagcttattccctctttgtgtttcttat

SEQ ID NO: 2999 - DNA, 1456 bp, Zea Mays
acgagcgagaactgttgtcatttcatgagacgttactcgggatgcacttgtaacgggatagtgtagtagcaagcataggagtaaggagttttgctagtcttcttcagcttcagtagttcagtccaatcacagatcgcagtacaactgaacccgcctcccgcacaaggcatccaggatttgttcggccttcggacttcggagggtagagaatcgaagcgacgagaacaaagcaatgaacgaggcggtgcaggaggcgaagctgctgcggcaggtgaacgcgctcatcgtggcacacctccgtagccagaacctcgggcaggccgcagccgccgtcgccgccgccaccatgacccccatctccgctgccgaatccgtccccgccaatcacctcctgcgtctcgtggccaagggcctcgccgcggagcacggaggaggtgacgccgcttccgcattcgactccgccgggttcggtgtggcggtgcagccgcccggctccagtgccgtggatttcagtattcaggatgtcaagggctcatccaaaagcttccccaagcacgaggtgaagcatgtctctgaccataagaacgctgcccggtgtgtgaaatttagtcctgatggaaagtattttgcaactgggagtgctgatacatccattaagttttttgaggttgctaagattaagcagactatggtaggagactctaaagatggccctgccaggcctgtggtacggacattttatgatcacacacaggccatcaatgatctggattttcatcctgagagtccaatactgatatcagctgcaaaagacagtacaataagattctttgacttttcaaaaaccaatgcgaggaaagcgttcagagttattcaggatactcataatgttagatctgtatgttttcatccttgtggggattaccttttagcagggactgatcacccagttgctcatttatatgatataaatacttttacatgctacttatcagcaaatgcacaggattctagttctcccattaaccaggtacgctactcttgtactgggagcttgtatgtgactgcttctaaagatggttctctgcgcatttgggatggagtatctgctgaatgtgttcgacctattattggagcacatggatcatcagaagctattagcgcgattttcaccaaagatgagaggtacgtcctatcttgtgggaaagattctcgtgtcaagttatgggaagttggcactggacgacttgtgaagcaatatgcaggagcaattcgcagacaatttcgttgtcaggctgtcttcaatgaaaccgaggaatttgtgctatcagttgatgaacaaaacaatgaggttgtcgtctgggatgcacttactgctgaaaagatgccagttatatgaaccattgacctgatttttattggtcagcctcctttcgatgttctgttatttttatcc

SEQ ID NO: 3000 - DNA, 2878 bp, Zea Mays
tttggctgttataaaaccactctactttcttcgggattgtcggacaacgcttatctccttgtaggtgaagtgttgaaaaagattgtggctctggcccctttcttctgttgccatttcataaatgagcttgcacgatcaatgcaaagcttgacactttgtgcaatgaaggagcttcgtttgtacgagaattctgaaaaggctcttcttagttctacatcagccaatggaactgcgattcttagagttgtgcaggctttgagttctcttgtcagtactcttcaagatagaaaggatccagaacagcctgctgagaaggaccattcagatgcagtttcccagatttctgaaattaacacagcattggatgctttgtggttggaattgagcaactgcataagcaaaatagaaagctcttcagagtatgcatcaaatctaactcctgcttctgcaagtgcagctacattaacagcaggagtagcacctccattgcctgcaggaacgcaaaataggcgtactcaaggcttgctggggcgcagcgggattcgcaggcggggcgcagcgggatttggcatcggtgatggcgcagaggtggctagggcgaatttgccggaggtgacaggcgcagcgggatttgcaggcggggcgcagcgggatttggcggcggcgacgcagagctgcgccagctcaccgatttatggcgatggcgcgttcgcgtctacggtctatccatctccaaaacgatgggcagctgacctacccaaccaccaagagctgaagagcaaattcctgtcccgcacatctgctcgccgcccagcgaacctgatggcgctcgtcgacgcgaaggccgccggcgcgtccacctccaccgtggccgctgcgcccacggtggagcacctgttgttcctcgtcgtcctcgacggcgtcgagacgcccatccacgaggggacgctgtacggaagcgccgggggcacagtcaccgtcaccggccctggccagctctccgccgacggcctcgagagcgtcctggtgcgcggcggcgggaccggggccggcgccgtgcggttcacgctctgcgccgacgcggccgccgagggcgtcggcgctgcgtgcttcgagcggtgcggcgcggcccgcgtggagggcgcgcgcgaggtgtccgtgtcctcgtgccgcgccgtggaagtggagcgcgcgggcagggtcaccctcgaccgctgccgcgacgcgcggctccggggcgggggcgcgctccgcgccacgcggtgccggcgcgctgacgtcgagagcttcggcggggtgcgcctggcgcggtgcaaggccgcgcgcgccgactggtgcggcaccgtcgaggtcgagctgtgcagggccgtcgacgtccgccgctgcggagctgtcaccggagagcggtgccgcgtcgtgaacgctgcagggtgcggcagcgtcgaggtggcgcgggccgtgatcaacatggtggaggaagagcagccgtagtcagcttcgcctccgaaaagccctagtgctccgcgccctcgacgccgccctctacaccgtgggcgcctcctgctcctccagcctcctcctccacaaggcgcgaaaggtcctcgccgaccccgacgcagccgcctgcttcccccaccagattccttttacagaaaatgaagaaaacgatgaggctagggctgcggtggccgatctcaagcgcctcctcgaccttgagtgggccaacctcccgccctccacgctcgagctcgtcgccggggacgggtcccaccagactggtgccgctgccgaccacaccatgccgaagcgtgaaattttagctaagcctgtgcaggttggatccgcttctcatcaatcaattcggacgcaagttgctgataacgcgagcaatgccaataaagctgatggcgcccggcgagatgaggcacatccttctaattctaatgtaaactatgaggctgatagtgatcgtgaaagtatggttgggcaccaaaatgcatcggttaaaggagcagagggtcaactttcagagaagtctgtctttacttctaaaaagcgcgttcttgtggagagaattccgaagtgggatagctctgatgatgatcagccagtgcggaagcgcaagttagatccatttgagagaaaaccatatccttctcctacatgtgcatataagatcagaaagaaatggagtaagatagagatagaaaccttgctggaaggggtggacaagtatggcataggcaactggaaagatatcaaattagcttaccctggtgtctttgaggagagatcaacggtagatctgaaggacaagtttagaaatttgggaaagcgccaccatgaatcgtcttgaggcttagtggcgctgtgcttttgctctgccctggagatattttatgttgatggcagtggtatgcaaaagaaggcctatgtaaggtgcatggagacatttgggtttcgtgccaaggatattgttgacttgttgagtgcactgttcttaaggcgtcgcttagacgtccaggcggaggtccaacgcctagccgccttgcccgcctaccgtacctaggcgatggtccaacgccttgtatcgtcttaccgctttaaaaaacatcgttgatggttgagtgtttaaagataagtaactggaaccccacatgatggcatgttgtcacgggcgtgcacaactcgagcacccatctggctcagaaaagcaccatgggaagatagaactctggcattggtggaatctgatgcaatggtcattgtaattctgaattgaaaattttgaaccagtgacacactaattgttcaagaagctcaatatcgtttgctccaggagtcagaagcaggtcccctgttagacctttcagttatt

SEQ ID NO: 3001 - DNA, 704 bp, Zea Mays
tgcatcgctacacatagcagctagacatccactatttgctctgccggacagctttggagacccctgatgtattgtttctaaaagtgaattttgatgaaaacaaacccatgtgcaaacgactgaatgtcaaagtccttcctttcttccatttttaccgtggagctgatgggctactggaggctttctcctgttccttagctaagtttcagaagctgaaggatgccgttgcaatgcacaacacggctcgttgcagcattggtccacctgttggagttggcgatgttgacttgctggatagcacgagccctcaagagaaacctgcagaagctagcccacattagattaatgagaaggagctcctccccatccacgtctacatcctgctcattgttttcttcactatagaccttaatgtaatcagttcaggagaactaaagtaccctcaattcatgaatcagatgtatggattatcgtacgcattcttgaaagggaaaaaagtgtataatagtgataactatacgttttttggacagaagaaccatgtacttgtacatcattttaggtgaagacgtcatgagcatttaagcgcccttgtgggccgttttatcagtcagtccgttttttttcgcacgttcactgtcattctgacagactgtactttgttgtatttgttcaattgcgaagtttaagtgaaaaaatagaaa

SEQ ID NO: 3002 - DNA, 1821 bp, Zea Mays
cttttatttccgctctcctccattctctgtttgctactttgcaagtctcgaacaaaacctgaagcaactcgaagcgaagccgcgatactgcgagaagcggaagcggggagggcgaggaggagcagcaatggaggcgctgctggagctcgagaagatgcagagggtgctgtccctcatgagttcacgcggcctctcccacaccgactccagctgcggcggcgctgccgctgaccgcttcctcgcccaattcctcctcttcatgtgtaggtcgtactttatgtttcatggtttggatgttaacaagccacaagccattttcaagtatctacctgttctttctttcacagagagttacatatatcagttagatgcttcaaatgaagactgtttacatgtagtcccagatgacaacacttcaaaagtgttgggaaagaaagaagaatctctcaatgagacatccttgtctcaaatgattgaaccccttgaagggcttcttcagtgccaaggattaatgacagaccgattgcgaactgaactcaaatcaggcattcagtattggtctctagagaggaagctctgccaagcattactaagaaatgagaaggtcaatgaattgcatatggacttcttgtcagtttcagaatttttggttgagatatctgatgacctgtatgattatgaggatgacgttatgaacaatacgttcaatatccttcgcatgtttgctgcaatatatggaccattagaggcaccgaatatgctggccaagtgcataggcgaggctgaagagaaatacgagagcttctccaagaaactggatcctagtctctcaggtagttactggagaagatgtgaggaagcgacgaaggaaggcggaaaaacatcaggccatgcatatggaacatggaatatccctcgtgtgataagcaacgaagatgctttccgacgtgaaagacggagcaaacacgatgcttgtgctgtgatcacttgataggcaaatttcatgttccagacttccaggcatcttcaaaattgaatgaagctaggtacactgctagacagtgtcttacttacctgtatgcacgtttccattcttgccaggtgaaatgcagaaatgacctgcaaccgttgatgtaaggtgctaggggtctgctcagtgggaactccttgaggatatagtggtccttggcctaccttgggcccctttgatgctcacaaatgtacccattttcaagtcaaattttcacaaatgcagaaatgacatgctgaatttagtttctgtaaggctgtctccatcggataccccatctcatctcttttcaaacttatctgtaaataatgtcaaacagtatagttttttactgagtccaagaagggaacaagtcggtctggactctggagtgcgccttgtggccacgtgagagcatctgattcacgacgggctacagtgacagatggatatgtatcggtgtatcctgctactcctacccctatactcgtggctgcgcctgctacagtgacagacgggctacagtgattcacattccatgtgattggttgttaggatcagcagatcctggtcgaagccgagatgcaggttgggcttaacctgtatgcattgatgcaaaccaaaataagttctcttgtttggttgtttgtcctcaattagttaggatcaacactgttttaggtaagttgtatggatttagctttaagttgcacgactcaactatatttctaaaattacaatgccataaattataacgccataaattacacaaaatccaaatttatacaattataaattacaataacttatcc

SEQ ID NO: 3003 - DNA, 3427 bp, Zea Mays
cttttatttccgctctcctccattctctgtttgctactttgcaagtctcgaacaaaacctgaagcaactcgaagcgaagccgcgatactgcgagaagcggaagcggggagggcgaggaggagcagcaatggaggcgctgctggagctcgagaagatgcagagggtgctgtccctcatgagttcacgcggcctctcccacaccgactccagctgcggcggcgctgccgctgaccgcttcctcgcccaattcctcctcttcatggtgcaaccgtttgattctcttaccctggagaataagttccttttgatctctgagctattaagaaaggctactcctaatactttggaagaagtgcagcatctcacccatctggaaggtagtggtaatagttgtgaagtaatgatgatcttacattaaccttatgagtttatccggaaattttcttgttgattgggtctggaactctgataagacataggaccctttcaaacgcagctaataaagatatatgttctggaggttcactccagccaattaagaagtttaagatgcatgccgagaaatcaaccgttcaagctatgccgatggttggttttgatgcgatggcaagagctaagtctacgcttgaagattttgtatgtattctttgtagttggtactcgtaaaaatccttaatggaaacactgccatgaattaatcctggagtgacccaggtcttctgggctgccttttagtttttcttcttttatttttctcaagagaaacctgtttaccttttcttttctcacatcaataaaatcttagcacattaggggattcctttactgtttttgctaaaaaaacactgtcatactgccttttgttgagattttgcaatgcaagtgctacaaaacaattgaaccgcttatagaggcattaagcccgtataaaaaatagcaaggtatctttgaatgtattttgttgttccattattagtcttatagagaaactgggtcacatgctgttctaaattttgatttttcctgttcaaacatgtcttttttggggggttatgagtctatcttgagcacttcctgataattatgtttccctaaagtcccttttttccttcttgagaaaacagtgtaggtcgtactttatgtttcatggtttggatgttaacaagccacaagccattttcaagtatctacctgttctttctttcacagagagttacatatatcagttagatgcttcaaatgaagactgtttacatgtagtcccagatgacaacacttcaaaagtgttgggaaagaaagaagaatctctcaatgagacatccttgtctcaaatgattgaaccccttgaagggcttcttcagtgccaaggattaatgacagaccgattgcgaactgaactcaaatcaggcattcagtattggtctctagagaggaagctctgccaagcattactaagaaatgagaagatctcgattgaagatgttatgatggcaatccatctgaaatcatttgactatcgagttcttaacctgttgatgtttcaacttactggtcaatgaattgcatatggacttcttgtcagtttcagaatttttggttgagatatctgatgacctgtgagtttgctctgaatcttattcccatgcatcacagcataacaaaatggtaggaactgcctacttcttaaaaatctgtcattaatgttttggtaaatttgtaaaatctgaggcaaggtagtgcatgggttaagatggaactagtgcttctattgagatgtcggtgttgtatgtaaatggaaaacaataattttaatttaaatgaaattgtgttttagttatcatgtaatctaactattaaaggatctgcggatatagaaacccaaaaacttatgcacttttgtagtgtaccttagtgtgatttatgggaaaatcatcagattagtagcgttgttatatacaatcctgtacctttttccttcttaatcaaatgacatgcagctctcctgcattgtttgagaaaaaagtgtatataagtcctcgggggtcaatataagcctagatgcaccatgtgctggacagacactatgaataactttcagtcttttttttatttgtttcacaaaccatgtcatcaattgaaatagctgtttcacccgtgacttgtttttgaatatcttgcaggtatgattatgaggtaagttgggctaccgaaactgatggtatcgtataatcttagctgtactagtgagtgtaggcctaactgttgaagaagttcaatttgttttgtaggatgacgttatgaacaatacgttcaatatccttcgcatgtttgctgcaatatatggaccattagaggcaccgaatatgctggccaagtgcataggcgaggctgaagagaaatacgagagcttctccaagaaactggatcctagtctctcaggtagttactggagaagatgtgaggaagcgacgaaggaaggcggaaaaacatcaggccatgcatatggaacatggaatatccctcgtgtgataagcaacgaagatgctttccgacgtgaaagacggagcaaacacgatgcttgtgctgtgatcacttgataggcaaatttcatgttccagacttccaggcatcttcaaaattgaatgaagctaggtacactgctagacagtgtcttacttacctgtatgcacgtttccattcttgccaggtgaaatgcagaaatgacctgcaaccgttgatgtaaggtgctaggggtctgctcagtgggaactccttgaggatatagtggtccttggcctaccttgggcccctttgatgctcacaaatgtacccattttcaagtcaaattttcacaaatgcagaaatgacatgctgaatttagtttctgtaaggctgtctccatcggataccccatctcatctcttttcaaacttatctgtaaataatgtcaaacagtatagttttttactgagtccaagaagggaacaagtcggtctggactctggagtgcgccttgtggccacgtgagagcatctgattcacgacgggctacagtgacagatggatatgtatcggtgtatcctgctactcctacccctatactcgtggctgcgcctgctacagtgacagacgggctacagtgattcacattccatgtgattggttgttaggatcagcagatcctggtcgaagccgagatgcaggttgggcttaacctgtatgcattgatgcaaaccaaaataagttctcttgtttggttgtttgtcctcaattagttaggatcaacactgttttaggtaagttgtatggatttagctttaagttgcacgactcaactatatttctaaaattacaatgccataaattataacgccataaattacacaaaatccaaatttatacaattataaattacaataacttatcc

SEQ ID NO: 3004 - DNA, 2246 bp, Zea Mays
ccacgagacaggcataggcaccgtcgcacagagctgtgacttttttttaagcaccacagagctgggactttgagagggaggactcagcgagctccaaagccgacgaggataaagaggatcccggctccgcacgcgggagcgagaggatcgccggcgcaggatgtggtgcgcatcgtgcttggcgtccgcctgcgcgggctgcacctgcaacctctgcacgtcggcggcatcggccgtgtcccgccgctccgcgcgcctcgcttactgcggcctcttcgccgcctcccttatcctctccttcttgctccgccagttcgccgcgccgctcctcaagcatatcccatgattcactaaatttctccatgtcctgaaggcttaagatgcagaaaagtaatgtggagtgtccttttgctccacaaaatgaaatgcattccttcagttgaatattttactgtttcgtcgttcccatagagtacttgcagacagcagagggttttttctggacaacaacagcagaggttgctactagttgttgtcgaaagttctaatatttgcaattttgcaacccacaagtgttgactctttgctattataccacctcggtctatgatttgtgagtccgtctgtctatgatttgtgggaccaatggcaaagtggtgaagcccaatgatgatgatggcaaaattgcaaatcccttaaagttcggtgctgtacagaaaagacatctggtataaatgcgtttgatcaaacaccaccagaagaatggtttcaaatgaatgctgttcttcgtgtaagcctggggaacttcttgttctttgcaatattttctctcgtgatgattggtgtgaaagaccagaatgaccggcgagatgcctggcaccatggtggctggattgcaaagattgctgtatgggctgttctcattgttcttatgttctgtgtgccgaacattgtcattactatttacgaggtactttcgaagtttggatctggcttctttcttctagtacaggttgtgatgcttttagacttcacaaataattggaatgactcatgggttgagaaagaagagcggaaatgggaaatagctttgctggtagtgactgtggtttgctatctttctacattggccttctctggtgtgctcttcatgtggtttaatccatccggtcatgactgtggtctcaatgtgttctttatcgtcatgacactcatccttgcttttgcgtttgcaatagttgctttacatcctcaggtccatggaagcgttatgcctgcttctgtcatttctgtttactgcgcatacctgtgctacacgagtctctcgagtgaaccggatgactatgagtgcaatgggcttcacaggcattctaagcaggtttcaatgagtgctcttatactcgggatgctcactacggtgctctctgttgtgtactcagcagtccgtgctggatcctcgactacattcctttcaccgccatcatctcctagatctggagccaaaaacccgctactcggtgacgaggaggacggcaaaggcgatggcaaagaaagcgaaccgcgacccgtgagctactcctacaccttcttccacctcatcttcgcccttgcaagcatgtattcagccatgctcctgaccggctggacgagcgctgcatcagagagctccgagctgatggatgttggatggacgaccgtctgggtgcgcatctgcacggaatgggtcaccgccgggttgtacatctggaccctcatcgccccactgctcttcccagaccgtgatttctcctaggcacccacgcacccatagcctatgagttgtttggtggtgttagttgcgattgtgaatatgaataagccgaagctgggagctggtagggatctggtattgtctctgtatgctatctggcatgcctaatgtgatggcactggttagtacctgtttgtatggccttgtatagaatatatttcgaccgagtgtaggttgtggactttaaaagcagaaaaacaaaactgagcagaaaaacaaaactaagggtaaaatgaggaacactagcaaaactgaggataccagcttaaaaaccctatatcttaaggggtaagtacaaaaaataaagagacgtattttggttaagtaatatctcgattctctaagtctagatatgttccattcatacaattcatataaggtcttgttcggttaattcccttacccatggattggatgggattgaaaaaaataagaa

SEQ ID NO: 3005 - DNA, 2426 bp, Zea Mays
cccaggcagtcctccgagcagtgctagtccaccttgctagctcgcccgctcgtcgcgctccctcgatcagatctaatcattatttaatcctttttttttccagtctcacatgagcactccccactcgtcctccacctcctccgtcccaccacaccgcgcctcccctccccagatcccccaatccctaaccctagcacccacggcgtcctccgcctcgccctcctcctcctccgcgtccggtatgcgggacgcggcggaggacgactccgactcgccgccgtcgcagatgtcggaggacgaccccggcggagggggcggggaccggtgggagccggatctgcggggcggcaacggcggcggcggcggcggcgggaggtgggctccgccggaccaggtgctggagaacgtgctcgagaccgtgctcgagttcctcaccgccgcgcgggaccgcaacgccgcctcgctcgtctgccgctcctggtaccgcgccgaggcgcagacgcgccgcgagctcttcatcggcaactgctacgccgtctcgccgcgccgcgccgtcgagcgcttcggcggcctgcgcgccgtcgtgctcaagggcaagccccgcttcgcggacttcagcctcgtgccctacggctggggcgcctacgtctccccctgggtggccgcgctcggccccgcctacccgcggctccagcgcatctgcctcaagcggatggccgtatccgacgacgacctcgcgctcgtcgccagctccttccccttcctcagggacctctcgctcgtgtgctgcgatggcttcagcacgctcggtctcgccgtcatcgccgagcgctgccggtccttgatactgtgggtgatgaaggccttcgtgctgtggctgatgcatgctctgatctccgtgagctgagagtttttcctttggatgcctctgaagattccgagggttcggtctcagacgttggtcttcaggcaatctcagaaggctgccggaagctggaatcaatcctctacttttgccagaggatgacaaatgcagcagtaattgatatgtcgaagaactgtcctgagctcgtagtgttccgcctctgcattatgggccgccaccgacccgatcgggacactggggagcccatggacgaaggtttcggtgcaatcgtgatgaactgcaagaaactcaccaggctttcggtctccggcctgctcaccgataaggcctttgcgtacatcggaaaacacgggaagctaataaagaccctctccgtcgccttcgctgggaacagtgacatggccctccagtatgtattcgaggggtgcaccaagctgcagaagcttgaggtcagagatagccctttcagtgacaggggtttgctctcaggactggactacttgtacaacatgaggttcttgtggatgaactcgtgcaggctgacgatgaggggctgtagaggtgtagctcagcagatgcagaatctggtggtcgaagtaatcaaggaccactccgaagatgaaggggaggctgagaccgttgacaagctgtacttgtatcggtcactggcagggccaaggaatgatgctccgccgttcgtcaccctcttgtagtgctgctgccgccaccggaagaacacagccctgctgtacccacgaacatgtttgttgtattgttaacttaccaagttttcagagcaagcgaggggagcgtcctgcggatgattttcaaggtgctgcaggcgaggggagcgtcccatcgtaaaatcaatcaagtcagaacctgccgattattcttttccacacttgatctggcgtgggcggcatccagagttggggcagttgaggagcacatccagatccagagcgagagacatctgatggcctcctcattcatggcgccagcgcttacagtaatagcagtgatggatgggtagtgtctgattgcacaggaactgactgcacactgatggctccagtcagcaggcttgggggacggttctgtggcgctctcaagtctccagctacttgtgctttgtgccatctcccgttccatttttcagatcagaccaatgaattgggatcctggagggggtcgtcatggcagcccaacaccagccggcaccaactgggctgatatgctgagaaaggatcctgttgagctgagagcgccaccttcttccatccgcgtgctagccactcgcgtcgcgcgccggaaccaaaccctagtagctagccagccgtcccgaatagttaaacacggatgcggttgtctctttgtcatggacgaacgcattcttttataccactagtcctctgctgtggctgtggctgagaggctggcaagcatgtggtctgtttcctgggggtcactgactcactgagccccgcatttgttatctccaggatccagttcgatctgcccggtttatagtttcttt

SEQ ID NO: 3006 - DNA, 1429 bp, Zea Mays
caatgcgttgtcagtatctgcagttaatgaggctaataggctgtaacctgtaacagaataaactgctctatctttggttatcttcatgatatctagtgaaccagcacctatgctggaggataaagagaaatggtctctcctcttccatgattttattgcaaagtgtcttactaaagaccccagacttcggcctgctgcaattgagatgctgaagcacaaatttattgagaagtgcaatagtggagcttcgaaaatgttggcaaagatcaaggtagcgaagaagattagagccacactagctgtgcaaaatgagctgtctgaccctgacaatgtgattttggtactatgattgttcatactgaagatggggacgaagtgacagaatcacccattttcccaagaacagaattcatacccggccttggtagcatcaattctttcacacatgatccaaagagagcagaacttatttcaagtttttgggcggagaacataggtgatagtgatgccaataaagaccgagatacagattatggtcctgacatgcaggaatcaaaagtgatctcacctttaactggaacagtgaagaagaatattggtgcagaagggactataaggtgccatgataatcaaattaacttgtcaccaggacttgcaaacacaacaactaaattgaacaacagcccaagccgtaaagcgttttcagttcaggataagctctggtcaatttatgctgccggcaacactgtaccaataccatttcttaaggcaattgacatttcaccactagctctagtatcagaaaatgaatcaggaaatggcctggctgggtcaagtacaaatgatgctttggaggcagttagggagctgttcagtggtgatgggcaggcaaagaaaggacggaaagggcaaaacgaagtccctcttcctccgggtgtgcatcacaggctgacgacaagccccacattgatgaacctggcccaagctctagcttatcataaaacgtgctatgaggacatgccgctacaagattcacaagcgacgcaagagcagcaaacgatacaaaatctttgtgacacacttcgcacaatactgggttgacacaggaatctctacggaagtggaaatttctgtccctgttaatagcctcttggagtttcactatgtagagacggcatcaaattttgctaatcagattttgtggcactaacgcatattgtagcctggttttgtatcgttgtcaatgcatttgttctccaaataaagagaaatagttaagcagaaataaacgaaaagttatttatgttggctattcgaaatcatgggaggcgtgatttctgctgtcttgaccccgtattccttgtgtctggccattgtacgccatgcttcgtgttgttaagtgtcagttttttttagcgcgcgtgtgaat

SEQ ID NO: 3007 - DNA, 1549 bp, Zea Mays
tgtgtgtgtgtgaactctcttctattaatgaaatggtctctcctcttccatgattttattgcaaagtgtcttactaaagaccccagacttcggcctgctgcaattgagatgctgaagcacaaatttattgagaagtgcaatagtggagcttcgaaaatgttggcaaagatcaaggtagcgaagaagattagagccacactagctgtgcaaaatgagctgtctgaccctgacaatacaacgcaagatgtgccttttcgaataaatgaggactatggggaaactgtccctacaagttctcagcaacacatgaaacatggcacatataatgattgtcaggcaggtgattttggtactatgattgttcatactgaagatggggacgaagtgacagaatcacccattttcccaagaacagaattcatacccggccttggtagcatcaattctttcacacatgatccaaagagagcagaacttatttcaagtttttggtatgagaaacataaatttatcttattgtttgtgttgtcagtcattgaaagcagcttaacaagaaggttttatttatcccatcacaaatcttatgcacagtttcttgatagggcggagaacataggtgatagtgatgccaataaagaccgagatacagattatggtcctgacatgcaggaatcaaaagtgatctcacctttaactggaacagtgaagaagaatattggtgcagaagggactataaggtgccatgataatcaaattaacttgtcaccaggacttgcaaacacaacaactaaattgaacaacagcccaagccgtaaagcgttttcagttcaggataagctctggtcaatttatgctgccggcaacactgtaccaataccatttcttaaggcaattgacatttcaccactagctctagtatcagaaaatgaatcaggaaatggcctggctgggtcaagtacaaatgatgctttggaggcagttagggagctgttcagtggtgatgggcaggcaaagaaaggacggaaagggcaaaacgaagtccctcttcctccgggtgtgcatcacaggctgacgacaagccccacattgatgaacctggcccaagctctagcttatcataaaacgtgctatgaggacatgccgctacaagattcacaagcgacgcaagagcagcaaacgatacaaaatctttgtgacacacttcgcacaatactgggttgacacaggaatctctacggaagtggaaatttctgtccctgttaatagcctcttggagtttcactatgtagagacggcatcaaattttgctaatcagattttgtggcactaacgcatattgtagcctggttttgtatcgttgtcaatgcatttgttctccaaataaagagaaatagttaagcagaaataaacgaaaagttatttatgttggctattcgaaatcatgggaggcgtgatttctgctgtcttgaccccgtattccttgtgtctggccattgtacgccatgcttcgtgttgttaagtgtcagttttttttagcgcgcgtgtgaat

SEQ ID NO: 3008 - DNA, 1914 bp, Zea Mays
cccaatatgtcatcttcactatggatgttcattggtactccacattggatggcaccagaggtcattcaagaaagtcgttatgatggaaaggtagacgtttgggcattaggtgtatctgcaatcgagatggcagagggcatgccaccaagatccactgtgcatccaatgagagtaagcggtgcttctcaatgcgttgtcagtatctgcagttaatgaggctaataggctgtaacctgtaacagaataaactgctctatctttggttatcttcatgatatctagtgaaccagcacctatgctggaggataaagagaaatggtctctcctcttccatgattttattgcaaagtgtcttactaaagaccccagacttcggcctgctgcaattgagatgctgaagcacaaatttattgagaagtgcaatagtggagcttcgaaaatgttggcaaagatcaaggtagcgaagaagattagagccacactagctgtgcaaaatgagctgtctgaccctgacaatacaacgcaagatgtgccttttcgaataaatgaggactatggggaaactgtccctacaagttctcagcaacacatgaaacatggcacatataatgattgtcaggtgattttggtactatgattgttcatactgaagatggggacgaagtgacagaatcacccattttcccaagaacagaattcatacccggccttggtagcatcaattctttcacacatgatccaaagagagcagaacttatttcaagtttttgggcggagaacataggtgatagtgatgccaataaagaccgagatacagattatggtcctgacatgcaggaatcaaaagtgatctcacctttaactggaacagtgaagaagaatattggtgcagaagggactataaggtgccatgataatcaaattaacttgtcaccaggacttgcaaacacaacaactaaattgaacaacagcccaagccgtaaagcgttttcagttcaggataagctctggtcaatttatgctgccggcaacactgtaccaataccatttcttaaggcaattgacatttcaccactagctctagtatcagaaaatgaatcaggaaatggcctggctgggtcaagtacaaatgatgctttggaggcagttagggagctgttcagtggtgatgggcaggcaaagaaaggacggaaagggcaaaacgaagtccctcttcctccgggtgtgcatcacaggctgacgacaagccccacattgatgaacctggcccaagctctagcttatcataaaacgtgctatgaggacatgccgctacaagattcacaagcgacgcaagagcagcaaacgatacaaaatctttgtgacacacttcgcacaatactgaggttgtagatctgcaagagtgaaggctgcaacctttggagttccgaagcctgcatggagccaagggtgaacgtggcactgatcctgctcgtggtggagaactgaggatcgaaggaacgcatgacatgtgcctaccgtggagcaggcctaatggcttctgcgttttagcctgtggacgctttggtcactggaagctgggttgacacaggaatctctacggaagtggaaatttctgtccctgttaatagcctcttggagtttcactatgtagagacggcatcaaattttgctaatcagattttgtggcactaacgcatattgtagcctggttttgtatcgttgtcaatgcatttgttctccaaataaagagaaatagttaagcagaaataaacgaaaagttatttatgttggctattcgaaatcatgggaggcgtgatttctgctgtcttgaccccgtattccttgtgtctggccattgtacgccatgcttcgtgttgttaagtgtcagttttttttagcgcgcgtgtgaat

SEQ ID NO: 3009 - DNA, 3051 bp, Zea Mays
caattttccccatttgccattcccgacgagcaccttcaccgtctcctcccagtcccacctcgcgtggcacgccatggctttctccccgcgctcgccgtggtcgcgtgccaagaaaaccgacgtctactcaaccttcgttgtccacggcgatgacgatgaagacgacgcccgcggcggcaggggcccctccacgcgggcggaggaagacgaggaggaagacccctcctcgctgcctccgcttcttcagcggctccccaaggactttggcggcgcctcgttcgacgacgacgaggacccctactcctccgaccctgacgatgcttccctctctgccacggcggccttcaagagcggcgtcccggcctccggtcgatctccgttcctggatctgcggcgctcaagcccccgcgctaccgatgacgacccgtactctaccttcgtcgttcattccaccacacgctcggggagaacctcctccagccctcgcgggtccgcctccggcacattcatccgtcgctcgggtggctcgtctagccctcgcgagtccgtctctggcacattcatccgccggaccggcagcccgtcgagccccgggaagtcagcctccggcacattcatccgccggccagggagcccgtcgagcccccgcgggtcgttctctggcaccttcattcgccacaccagcgggggctccagttcccatgaatctgcctctggcggcggcgggggtttcgggtcctctttctggactccagcggtggagcagtcagaggagctccggcagccatcgcctctgatgcagcaacaacagcaacaacattcaaggcggaagccatcggtcagctcggtgccagacagtgttaccagggaggatccttccaccaagtacgagctgctccatgagcttgggaaaggttcatatggtgcagtgtacaaagcaagggatctcagaacgcaggagcttgtggctgtcaagatcatctcattaacagaaggggaagaaggctatgaagacatacggggagaaattgagatgctgcagcaatgcagccatccaaatgttgtccgctactttggaagctaccaaggagaggagtacctatggataattatggaatactgtggtggtggaagtgttgctgacttgataggcatcacagaggagcctcttgatgaatcccaaatagcttacatttgtagagaagcactaaagggccttgcttacctgcactccatttttaaagttcacagagatattaaggggggcaacatccttctaactgagcaaggcgaggtgaagttgggtgattttggtgtagctgcccagctgacaagaaccatgtcaaagcgcaacacgttcattggtactccacattggatggcaccagaggtcattcaagaaagtcgttatgatggaaaggtagacgtttgggcattaggtgtatctgcaatcgagatggcagagggcatgccaccaagatccactgtgcatccaatgagagttatcttcatgatatctagtgaaccagcacctatgctggaggataaagagaaatggtctctcctcttccatgattttattgcaaagtgtcttactaaagaccccagacttcggcctgctgcaattgagatgctgaagcacaaatttattgagaagtgcaatagtggagcttcgaaaatgttggcaaagatcaaggtagcgaagaagattagagccacactagctgtgcaaaatgagctgtctgaccctgacaatgtgattttggtactatgattgttcatactgaagatggggacgaagtgacagaatcacccattttcccaagaacagaattcatacccggccttggtagcatcaattctttcacacatgatccaaagagagcagaacttatttcaagtttttgggcggagaacataggtgatagtgatgccaataaagaccgagatacagattatggtcctgacatgcaggaatcaaaagtgatctcacctttaactggaacagtgaagaagaatattggtgcagaagggactataaggtgccatgataatcaaattaacttgtcaccaggacttgcaaacacaacaactaaattgaacaacagcccaagccgtaaagcgttttcagttcaggataagctctggtcaatttatgctgccggcaacactgtaccaataccatttcttaaggcaattgacatttcaccactagctctagtatcagaaaatgaatcaggaaatggcctggctgggtcaagtacaaatgatgctttggaggcagttagggagctgttcagtggtgatgggcaggcaaagaaaggacggaaagggcaaaacgaagtccctcttcctccgggtgtgcatcacaggctgacgacaagccccacattgatgaacctggcccaagctctagcttatcataaaacgtgctatgaggacatgccgctacaagattcacaagcgacgcaagagcagcaaacgatacaaaatctttgtgacacacttcgcacaatactgaggttgtagatctgcaagagtgaaggctgcaacctttggagttccgaagcctgcatggagccaagggtgaacgtggcactgatcctgctcgtggtggagaactgaggatcgaaggaacgcatgacatgtgcctaccgtggagcaggcctaatggcttctgcgttttagcctgtggacgctttggtcactggaagctgggttgacacaggaatctctacggaagtggaaatttctgtccctgttaatagcctcttggagtttcactatgtagagacggcatcaaattttgctaatcagattttgtggcactaacgcatattgtagcctggttttgtatcgttgtcaatgcatttgttctccaaataaagagaaatagttaagcagaaataaacgaaaagttatttatgttggctattcgaaatcatgggaggcgtgatttctgctgtcttgaccccgtattccttgtgtctggccattgtacgccatgcttcgtgttgttaagtgtcagttttttttagcgcgcgtgtgaat

SEQ ID NO: 3010 - DNA, 3395 bp, Zea Mays
caattttccccatttgccattcccgacgagcaccttcaccgtctcctcccagtcccacctcgcgtggcacgccatggctttctccccgcgctcgccgtggtcgcgtgccaagaaaaccgacgtctactcaaccttcgttgtccacggcgatgacgatgaagacgacgcccgcggcggcaggggcccctccacgcgggcggaggaagacgaggaggaagacccctcctcgctgcctccgcttcttcagcggctccccaaggactttggcggcgcctcgttcgacgacgacgaggacccctactcctccgaccctgacgatgcttccctctctgccacggcggccttcaagagcggcgtcccggcctccggtcgatctccgttcctggatctgcggcgctcaagcccccgcgctaccgatgacgacccgtactctaccttcgtcgttcattccaccacacgctcggggagaacctcctccagccctcgcgggtccgcctccggcacattcatccgtcgctcgggtggctcgtctagccctcgcgagtccgtctctggcacattcatccgccggaccggcagcccgtcgagccccgggaagtcagcctccggcacattcatccgccggccagggagcccgtcgagcccccgcgggtcgttctctggcaccttcattcgccacaccagcgggggctccagttcccatgaatctgcctctggcggcggcgggggtttcgggtcctctttctggactccagcggtggagcagtcagaggagctccggcagccatcgcctctgatgcagcaacaacagcaacaacattcaaggcggaagccatcggtcagctcggtgccagacagtgttaccagggaggatccttccaccaagtacgagctgctccatgagcttgggaaaggttcatatggtgcagtgtacaaagcaagggatctcagaacgcaggagcttgtggctgtcaagatcatctcattaacagaaggggaagaaggctatgaagacatacggggagaaattgagatgctgcagcaatgcagccatccaaatgttgtccgctactttggaagctaccaaggagaggagtacctatggataattatggaatactgtggtggtggaagtgttgctgacttgataggcatcacagaggagcctcttgatgaatcccaaatagcttacatttgtagagaagcactaaagggccttgcttacctgcactccatttttaaagttcacagagatattaaggggggcaacatccttctaactgagcaaggcgaggtgaagttgggtgattttggtgtagctgcccagctgacaagaaccatgtcaaagcgcaacacgttcattggtactccacattggatggcaccagaggtcattcaagaaagtcgttatgatggaaaggtagacgtttgggcattaggtgtatctgcaatcgagatggcagagggcatgccaccaagatccactgtgcatccaatgagagtaagcggtgcttctcaatgcgttgtcagtatctgcagttaatgaggctaataggctgtaacctgtaacagaataaactgctctatctttggtgcagtgtacttgtctctttaatttcatttctgatgcatttgttttaacttcatcttgctaactatttggtatacatatcaatctattatttcattttcgtttagattgatagactggctaacggtctctcttccccctgcctatctcaggttatcttcatgatatctagtgaaccagcacctatgctggaggataaagagaaatggtctctcctcttccatgattttattgcaaagtgtcttactaaagaccccagacttcggcctgctgcaattgagatgctgaagcacaaatttattgagaagtgcaatagtggagcttcgaaaatgttggcaaagatcaaggtagcgaagaagattagagccacactagctgtgcaaaatgagctgtctgaccctgacaatacaacgcaagatgtgccttttcgaataaatgaggactatggggaaactgtccctacaagttctcagcaacacatgaaacatggcacatataatgattgtcaggtgattttggtactatgattgttcatactgaagatggggacgaagtgacagaatcacccattttcccaagaacagaattcatacccggccttggtagcatcaattctttcacacatgatccaaagagagcagaacttatttcaagtttttgggcggagaacataggtgatagtgatgccaataaagaccgagatacagattatggtcctgacatgcaggaatcaaaagtgatctcacctttaactggaacagtgaagaagaatattggtgcagaagggactataaggtgccatgataatcaaattaacttgtcaccaggacttgcaaacacaacaactaaattgaacaacagcccaagccgtaaagcgttttcagttcaggataagctctggtcaatttatgctgccggcaacactgtaccaataccatttcttaaggcaattgacatttcaccactagctctagtatcagaaaatgaatcaggaaatggcctggctgggtcaagtacaaatgatgctttggaggcagttagggagctgttcagtggtgatgggcaggcaaagaaaggacggaaagggcaaaacgaagtccctcttcctccgggtgtgcatcacaggctgacgacaagccccacattgatgaacctggcccaagctctagcttatcataaaacgtgctatgaggacatgccgctacaagattcacaagcgacgcaagagcagcaaacgatacaaaatctttgtgacacacttcgcacaatactgaggttgtagatctgcaagagtgaaggctgcaacctttggagttccgaagcctgcatggagccaagggtgaacgtggcactgatcctgctcgtggtggagaactgaggatcgaaggaacgcatgacatgtgcctaccgtggagcaggcctaatggcttctgcgttttagcctgtggacgctttggtcactggaagctgggttgacacaggaatctctacggaagtggaaatttctgtccctgttaatagcctcttggagtttcactatgtagagacggcatcaaattttgctaatcagattttgtggcactaacgcatattgtagcctggttttgtatcgttgtcaatgcatttgttctccaaataaagagaaatagttaagcagaaataaacgaaaagttatttatgttggctattcgaaatcatgggaggcgtgatttctgctgtcttgaccccgtattccttgtgtctggccattgtacgccatgcttcgtgttgttaagtgtcagttttttttagcgcgcgtgtgaat

SEQ ID NO: 3011 - DNA, 1093 bp, Zea Mays
gctgttcctatctcctccgcggtgccagtcactcagtcagcctctgcgagcatccaacgccgaccaaccaccaccacaagttcaccgctaccaccactgcacggagtcacggcgatgacgccgcctcaccaccccgtaaacttcgccgtccttctcctcttcctatgcctcccggcagtcccacccgccgccgccgcggccgacccgaccccgaccccatggcccccgcagttccacgcgacgctggtgatggactaccacggcaacatgtccgtggccgacctctggtacgactggccgggcggccgcaacctgcacgtcatccgctaccagctcgccgccgacgcgccatactacgacaacgagtggaacaacggcacctccttcttctacacgccggcgctccgcacctgccgctccgccgccgtcggggtcggcatcctccgcccggactggctccgccccggggccgtctacctcggccgccgcgacgccggcggattcgactgccacgtctgggccaaggccgacttcatcacctactacgaggacgtcaacaccaagcgacccgtcaagtaggaccgcctacgttatgagctttgaggtgggagcggtgctggaggacgcggcgtggcaggccccggagtactgcttcaccaacaacggtgggcttgggctggccgacgagaccaccaccaccatcgctggcggcagcagcttcgtccccaggagcgtgctgtgaggtccccacgagcggcagcagcttcagtatttggagaaatacgatcgatatgtgcacagcgtacgcgcagtaatgtatgtaatcttttgcctgtctgttgtttatctctgagcgaaacgtgtggcttttgtggtgtccacgagctctgcggactgcgtgacactattgaggaagagacggaaacaaaagcaaaaaaagaaagacatcggcatgcacaaatagcatgacgagacgactgtacgaaaaccacaaaacttgcacgtctttcatctaccatcggagcagctagctttcgttgcttccagcacaacacacacgtgtgccaggccgcccagggaaacgctcgaggag

SEQ ID NO: 3012 - DNA, 1458 bp, Zea Mays
aagcggccgagtcgcacactccaatgaagggaagctttggttggttgactgctccatccacccaccccctacagttcagttcagttcagttggtctaggccatggccatgtccgcttcctcctcctcgcgcgccctcctccgccggatcggcggcgcgctcctccgccgctccttctcctcctcatccgccgcctccgcagggtaccacgtcgcgggcgggcccagctacatgcgcggcgccgtcttctgggagcccggccgcccgctcacgctcgaggagttccgcatgccgcggcccaaggccggcgagctcctcatcaagaccaaagcctgcggggtctgtcactccgatctccatgtcctcaaaggcgagctccctttctccacgccctgtgtcgtgggccatgagatcactggagaggtggttgaccatggcacgcacactcctgttgagatcatcaacaggttcccagtcggaagtcacgtcgtcggcgccttcataatgccatgtgggaactgcttctactgcgttaagggccaagaagatctgtgtgagtctttcttcgcgtataatcgtgccaaggggacactctatgatggcgagacacggctgtttctaaggggcaatgggaaaccggtgtacatgtatagtatgggagggcttgcagagtattgtgttgtcccagccaatgcgctagcagttctccctgactcactgccatacacagaatcagcaattttaggatgtgcagtgtttaccgcgtatggtgccctgaggcatgctgctgaaatgcggcctggtgattcagtagctgtgatcggagttggaggggttgggtcaagctgtttacagatagcaaaagcctttggagcttcccaagtcattgcagtggatgtccttgatgagaagcttcagaacgctacaacacttggagcaacccacactgtaaatgcagcaaaagatgatgcagttgaaaggataaaggaaattactgatggtaggggtgtagatgtggctatagaggcacttggtaaggcgttaacattttcccagtgcgccaagagcgtgcgtgatggaggcaaagctgttatgatcgggcttgctgcaacgaacgtaatgggagaggttgatataacccgtcttgtccgacgacaggtgaaaatcattggctcatatggcgcaagggctaggcaagaccttcctcagatagtgaagctcgcggagagtggtgccttcaatctccaaaacaccatatcaaggaaatgcaaatttgaggaggcgaatggcgcctatgaggatctcaatcagggcaagatcgtaggacgagctgtggttgagatcatggagtgatgacggacaaggatcaagccgccttccaaccaccctttcaacaaggagttcatctggaacctataacagcaaagaatgggttaaggtacagattctgcattcataa

SEQ ID NO: 3013 - DNA, 1602 bp, Zea Mays
agccctccaatctctagcagaaacgtcttgcccgacacgactactcgtccgactagaaccaaacttttcaatccatcgttcgcagttcagttcacacttcacaggcgagcagcgaccatggatacccaagcacgtccggttcctccccgcgtcaagctcggcatccagggattcgaggtgtccaagctggggttcgggtgcatggggctgacgggcgcgtacaactccccgctggacgacgaggccggcatcgccgtcatcgcgcacgctttcagccgcggagtcaccttgttcgacacctccgacgtatacgggcccctcaccaacgaaatcctcctcggcaaggcgctgaagcagctgccgcgggagcaggtgcaggtggccaccaagttcgggatacggcatgacgagagcggcacgcggaccgtgtgcggccggccggagtacgttcgcgcctgctgcgaggccagcctgcgccgcctcggcatcgactgcatcgacctctactaccagcaccgcattgacaccacaactcccatcgaggagacgattggcgagctcaagaagctggtggaggagggtaaggtcaagtacatcggattgtcagaggcgagcccggacaccatcaggcgtgcacatgctgtgcacccgatcaccgcggtgcagatggagtggtctctctggtctcgcgacattgagcccgaaattgtgccgctctgcagagaattgggcattggaattgtaccatacagtcctcttggccgtgggttttttggtggaagaggagtgaaagaacaagtgtctgctgaatctaatctggtatcaacatgggatcccaaggtttgctccagaaaatttggagaagaacaagcaaatttatttgcgaatggaagaactggccaataagcaccagtgcagccctgctcagctagctttagcatgggttctgcatcaaggagatgatgtggttcctataccagggacaaccaaaatcaagaatctagattccaacattgactccttgaaggtgaaactgacagacgaagatctgaaagaaatgggcagccagatacgggaagaagatgtggctggtggaagacaattcacttcatttgcacataccacctggaagtacgctgatacgccaaagaagcagagctaaaaaatacttgaaagcaacaatgatgatgcgattggtatggccctctccctgcagatgccctcaggaacattgccgatgcccctttgtgaacagcctcttctagtaaataataatgtatggagaagaacaatgaagggcccagtcttgttggaagtacgaataatgtacagttacaggaatgtgtgctaccatatatttcgtcgcatcagtttgagttgtggttgtgtgaacctaccatatatttcctcgcaaaagaataatgtatagttacaataatatgtgctatctcaatcagtatgcaggcaggaaaaacatgcaccatctgtagtacagtacatgaattctcgcttgtaatccacatttagacctgaaaatgcgaaaaagaaaaaccaaaacacaacgcgctgagaccgtgttgaggaatgtcaagtatgctgctg

SEQ ID NO: 3014 - DNA, 166 bp, Zea Mays
gtgatcttccatgaggagtccccttccattgcaaagaccaaagaagaatgaaggtggtagagatagggggagctcaggaactgcttaatgtattggaaggtgctaaagatgataaaacacgaaaagaaactctaaaagctcttgctgcgctttcaaaatctggtga

SEQ ID NO: 3015 - DNA, 2404 bp, Zea Mays
tgggctgcttgcgtaattgcgtgaaggagctacgcaccttgggatgtcattattccgcatggagcagacacaaatgctgtggatcacactggacaaacagcacttcactggagtgctgtacgtggtcatattcaagttgccgaactacttctgaaagaaggagctaagatggatgctgctgatttatatgggtatcaggccacacatgttgcagcacagtatggtcagactgcattcatttaccgcattgttgcgaaatggaatgctgatccagatatccctgataatgatgggaggagccctttacactgggctgcttataagggatttgcggactccatacggcttcttttgtttttggatgcttataggggacggcaagacaaagaaggttgtactcctttacactgggctgctattcgggggaaccttgaggcatgcactgtgctagttcaggttggcaaaaaggatgatttgatggtgaaagacaaaactggcttaactccagcacagcttgctgccgataagaatcatcggcaaattgcgtttttcctcgacaacgctagaagggtacatgacagaggatgtggtgcgaacaccagatttgggaaattgtcaaaattaggccttgcaccttttctttggtgcaccattattggcatgcttattacatacgtacactctgttatattaggacaatatgtcatgactatgacagcaccatttgggatgttcgcatggtcaggagtttttcttgcaactgctgggttggtcatgttctataaatgtagcaggaaagatccgggttacatcagcataaatacaaggggctcgcaaaatcaaagggacgatgaaccactgctgaagatggagttagaaaatcctgcgcttctttttggcaactggtcacaactttgtataacctgcaaaatagtcagacctgttcgttcgaaacattgttctacatgtgatcgttgcgtggagcagtttgatcaccattgcccttgggtatctaattgcataggaaaggacttgtaagggatccagattctccatcatcttttggtgcttggattcattattctgcgtttcagcatcctggggttgtttcatttctcgcattggattgtttccttttctttggagttgcagttcttacagtttctcaagcatcacagatagcaaggaacattacaacaaatgagatggcaaattccatgagatatgcatatctcagaggcccaggtggcagattcaggaacccgtatgatcatgggattcgcaagaactgctctgacttcttgttaaatggatacaatgaggacactgaacggctagaccagacattgcacactgatgaggagatgggaatgatacagatgacaagagcggtttcgcagaatggtgacaatcatttacatcatggtaatggcacggaacatagttgcgctgattcacaggcaagcccaaaacctcatagccaagtgggttcgcctcagtgttgtgatcacagtaagaggactgataggacactgttgggcctaggtttgggccttgggcgaaacagtgcatcccggcagtatgttcggtctcttatcccattgtgatctatcatttggatatcatgtgttcgtttcagtgtagattggatttgttcactgctccggccccatcttttatacgtgcccttgacatggttcaccatgtaccattggctggtcagggacattgttgggccattagcacaggaatactgagatatatctagtgtttgtagttttggggtgaactcagagaagttgaaggtaacgacttggcttgcgaatatcagctgatctgcactcgggaaatatcagagagcttgtgcagaaaaggtaacagttatgggcttatggcagatgcagtagcatgagatgtcttcataattgttgtgtacatcaggttcagtggtcttgggggcctccttcttctgaaggtcttaaaaacacggttaaccatttattttcagtatgttattaagtattacaggagcttcgttactagaaaaacttcgacatagatcaatgaaagcacgacgaagcaagctttgttacgttgtcacagtaagtcgatgtagggagaatgtgttgttcaagctgctgagtgcaaatgataatattgtccctgtgacatttgtaaatcttgtatgtaatctttgagggtatgaatgtaatatcgtacgaattgtacgattgcttataaatagatgaacaatactgttcacactgaattgagattgcattcacgctttcgctttcaagcaagccgaatatacaaatgtaatgtacatcatgtatctctttgttaatatatgagatgtatcttgatgttgtttgacatttgatatgaaataaataatcagcat

SEQ ID NO: 3016 - DNA, 2861 bp, Zea Mays
cccggccacgctcctcacgagtcaccggggaggcggggactagcgcttggcaaaatcaacgaacgaccaacgcacagtcaaacactccgacgaccccttcctccctcacccctagccgcttccccggaccccgcgccgatcccaccgaacccatggcgtcggagatcgaggtgctcgaggacaccaccacctcctcgacctccctcgtcgcggccgcgtccacggccccttccgccgcggagggcgcaggggcgccggcggagaacgagtcgctgaagaacgacgtgtacaccgcagcggcgtacggagatctggagaagctgcagcggctggtggagggggagggccgcccggtcaccgagcccgacggcgggggctattacgcgctccagtgggccgcgctcaacaaccgcgtcgccgccgcgcagtacatcctcgagcatggagcagacacaaatgctgtggatcacactggacaaacagcacttcactggagtgctgtacgtggtcatattcaagttgccgaactacttctgaaagaaggagctaagatggatgctgctgatttatatgggtatcaggccacacatgttgcagcacagtatggtcagactgcattcatttaccgcattgttgcgaaatggaatgctgatccagatatccctgataatgatgggaggagccctttacactgggctgcttataagggatttgcggactccatacggcttcttttgtttttggatgcttataggggacggcaagacaaagaaggttgtactcctttacactgggctgctattcgggggaaccttgaggcatgcactgtgctagttcaggttggcaaaaaggatgatttgatggtgaaagacaaaactggcttaactccagcacagcttgctgccgataagaatcatcggcaaattgcgtttttcctcgacaacgctagaagggtacatgacagaggatgtggtgcgaacaccagatttgggaaattgtcaaaattaggccttgcaccttttctttggtgcaccattattggcatgcttattacatacgtacactctgttatattaggacaatatgtcatgactatgacagcaccatttgggatgttcgcatggtcaggagtttttcttgcaactgctgggttggtcatgttctataaatgtagcagatccgggttacatcagcataaatacaaggggctcgcaaaatcaaagggacgatgaaccactgctgaagatggagttagaaaatcctgcgcttctttttggcaactggtcacaactttgtataacctgcaaaatagtcagacctgttcgttcgaaacattgttctacatgtgatcgttgcgtggagcagtttgatcaccattgcccttgggtatctaattgcataggaaagaagaacaaatgggaattcttcatgttcctcaccttagaagtttttgcaatgatcattactggctctgctgccattataagacttgtaagggatccagattctccatcatcttttggtgcttggattcattattctgcgtttcagcatcctggggttgtttcatttctcgcattggattgtttccttttctttggagttgcagttcttacagtttctcaagcatcacagatagcaaggaacattacaacaaatgagatggcaaattccatgagatatgcatatctcagaggcccaggtggcagattcaggaacccgtatgatcatgggattcgcaagaactgctctgacttcttgttaaatggatacaatgaggacactgaacggctagaccagacattgcacactgatgaggagatgggaatgatacagatgacaagagcggtttcgcagaatggtgacaatcatttacatcatggtaatggcacggaacatagttgcgctgattcacaggcaagcccaaaacctcatagccaagtgggttcgcctcagtgttgtgatcacagtaagaggactgataggacactgttgggcctaggtttgggccttgggcgaaacagtgcatcccggcagtatgttcggtctcttatcccattgtgatctatcatttggatatcatgtgttcgtttcagtgtagattggatttgttcactgctccggccccatcttttatacgtgcccttgacatggttcaccatgtaccattggctggtcagggacattgttgggccattagcacaggaatactgagatatatctagtgtttgtagttttggggtgaactcagagaagttgaaggtaacgacttggcttgcgaatatcagctgatctgcactcgggaaatatcagagagcttgtgcagaaaaggtaacagttatgggcttatggcagatgcagtagcatgagatgtcttcataattgttgtgtacatcaggttcagtggtcttgggggcctccttcttctgaaggtcttaaaaacacggttaaccatttattttcagtatgttattaagtattacaggagcttcgttactagaaaaacttcgacatagatcaatgaaagcacgacgaagcaagctttgttacgttgtcacagtaagtcgatgtagggagaatgtgttgttcaagctgctgagtgcaaatgataatattgtccctgtgacatttgtaaatcttgtatgtaatctttgagggtatgaatgtaatatcgtacgaattgtacgattgcttataaatagatgaacaatactgttcacactgaattgagattgcattcacgctttcgctttcaagcaagccgaatatacaaatgtaatgtacatcatgtatctctttgttaatatatgagatgtatcttgatgttgtttgacatttgatatgaaataaataatcagcat

SEQ ID NO: 3017 - DNA, 807 bp, Zea Mays
agaacagaacacgagaagttgactatcgcgaggtggccaagaaggaaaagtagcggcggcatggggtcgcccaaggcggccaagagcatggtgaagcaacgcatctggcgtcaccggctcgtcgcgccgttcgctgccgttctcatcacggccgtcgtcgtattctccggcctgttcgcgcaggacccaagtgccacctcggagttcactgccgtgaacgcgggtaacaccctgccagtgcgcgataagtcggaatccacagccagaggatctcccaacaaggaggatcttgcaacagctgcatttgagcaagaattggatgttggaaattctgagcccaatcaagctttccaaggcaccgtgcctgcagcaggcgagagagggacagcaacggcagtgccggtccaacgagaaagaagcagtggaggatctgaacctgaagagaagcaatcgcccccacaggaccaggaaggagaagaaacctctgctaagtcaggagctagcttctgtgctcggacggtggtacacaaactggaggaagaatatgtcctttgtgctctgctggagcctcggctctcaacaaactcctctctaggttgctctcctcgggctttctatctcaaggagatgttttcgtgggtcgaggttgtatttttgttttgactttgtacctttgtacggggttcagagaggcctctcaataactccctgtactattttttttcttctttttaatgaaatgccacacgagtttattttgcattgttcgagaaaaaaaatagataaatatgttttataaaaaaaaga

SEQ ID NO: 3018 - DNA, 1465 bp, Zea Mays
aaaccgttggataaagacgctgcaaactgaatagggagcaagacggttccggagtccggactcaagtcccccaaaaatcccaatcgaacccgtccgcctatcgccccaaaccctcgcccagctcgaggtcctcgccgccggccgccggccgccgtctccgtccgaccgccgccatggctcgcaacgaggagaaggcgcagtcaatgctgaaccgcttcatcacgatgaagcaggaggagaagcgcaagccccgagagcgccggccctacctcgcctccgagtgccgggacctcgccgacgccgagcgctggcgctctgagatcctccgcgagatcggcgccaaggtcgccgagatccagaacgagggtctcggcgagcaccgcctccgcgacctcaacgacgagatcaacaaactcctccgcgagcgcggccactgggagcgccgcatcgtcgagctcggcggccgcgactactcccgcagctccaacgcgccgctcatgaccgacctcgacggcaacatagtcgccgtccccaacccctcgggtcgcggaccggggtaccgctactttggcgcggccaggaagctccctggcgtgcgggagctcttcgacaagccgcctgagatgcggaagcgacgcacccgctacgagatccacaagcgcatcaacgccgggtactacggatactatgacgatgaggacggcgtgctagagcgccttgagggccctgccgagaagcgcatgcgggaggagattgtttcagagtggcaccgtgtggaacgggtgcggcgggaggccatgaagggggtgatgagcggtgaggtggctgcggctggagggcgcagcggggaggctgctagagaggaagcgcgaggaagagaagagagagagggagaaaggcgaggaagttgggagggaattcgttgcacatgtgccgctacctgatgaaaaggagattgagcgcatggtattagagaggaagaagaaggagctgcttagcaagtatgccagcgattccctgctggttgagcaggaggaggccaaggagatgctcaatgtccgacgctagaagacgactggccaattgaagctttcattgtgagctcaagacgagcactgaggtacaagaaggaacatcttttgaagtgctggcaccggggggaccaaagacattgttatgtaaaagaaaacaggttttgcctgaaatcacattttatgtgttttaatcagacttgagcgagtgatactggtgcctgttgacaaattttgacgaatgctaagcttgtggtattattggtgtgcctgtgtgcactgtaacttaactcgtatcatgtacagccattggctgcaatgcactgatcattgatcccttaaaatttcagtgatatagcaaaatctgatcgtatcatctcgtttgatgattttgctctgctatgtacagctgtgtgccatatgcatacgctttc

SEQ ID NO: 3019 - DNA, 2728 bp, Zea Mays
gtagaactgttgaagacatggaattctacaataatgctgataaacatcctcgtgtttttggcatgactgcttcaccaattattggaaaaggtggttctaacaagcttacctacactaaatgtatcaacagtctcgaggaattacttaatgcaaaggtttgttcagttgataatgtagaacttgaaagtgtgattgcttctcctaaggttgaagtgtacttttatggtccagttggtcactctaacttgactacagcttatatcaaagagcttggtggctataagtttcagtctgaatgcatgttaagagagagtgtatgcaatttcaatgagtcactgaagaaactgaagtccttatggaggttgcatgaaaatttgattttctgtttgcaagaagttggtctctttggagctctccaagctgcaaggacttttctctcttccagtagtgttagtctagatggaaagggggctgacattaatgattatgcaaacaaagcaatgtctcttctcagccgggacatcttagaaggtccggatgctgattcatttgacttagagacaatagaagaacctttcttctcaaaaaaatttgcagttcttattaacgttctatcgagatacaggttggaggaaaacatgaagtgcattgtttttgtgaaaagaatcattgtcgcaagagtagtagttcaaattctccaaaatctgaagtgccttgatttttggagatgtgagtttcttgtgggatgccactcggggttaaggaatatgtcaagggataagatgagttctatcattgaaaagttctcttcgggtgaggtaaaccttttggttgctactagtgtaggtgaggagggacttgatattcagacttgctgccttgttgtgcggtttgatctccctgaaactgttaatagctttatccaatcaagggggcgtgcccggatgagtaaatcgaaatatgtttttctcttggagaggggaaatcattctcaggagaagttacttgatgattatattactggtgaaatcattatggataaagagattaacttgagaacatcaaatgatatgttcaattgccttgaggagaacatctatcgagtcaatgatactggtgcttccattagcactgcttgcagtgtatctctattacatcgctactgtgataaccttcctagagatattttttttgttccttccccatcattcttctttgttgatgacgtcgatggaatagtatgcaaattaattcttccaccaaatgctgctttccgtcaagtgaatggtcaaccctgtccatcgaaagatgaagctaagagagatgcatgcttgaaagcatgcatcaaacttcatgaactcggtgctttgacagattttcttctacctggccaaggctctagaaagattaaggtatcaacaacaaataattcagaaagcaacaaagacgatgatgaaagttttagggaagagctttatgagatgttaatccctgcagttctgagaccttcaagatgcaaactagactcctcgtttaagttgcatttctattacatagaatttattcccataccagcagatagacgatatcagatgtttggtctttttgtgatcaatcgccttccagaggaatctgaaaagttggatgttgaattgcatcttgctcgtgcgaggattgtgaaagcaggaattaaatatttgggaaagattgagtttaacaaagaagaggcactgtcttgcttatctgttcagatgccaacacaaaattttcagggagcaatgcctgacatgtcttttttcttttatcttacagatgatactcgcacacaattttcaagaaatgtttttgaaagttctcctggatagatctgagttcacaccatcttatattttgttggggaatgatggtgcattggacatggattcaacattttaccttttacttcccatcaagcagaaattctatggtgataatatgattgattggccagcagtaaagcggtgtttatcatcacctgcatttcaagatccaatgggtttgtctctgcatgattcatatttaccaaatgagtctttgaagcttcttggtggaacatacaacaaagctgatgtgattggcagtttggtctatactccccacaccgacctgtttttcttcgttgatgccattctggatggaacaaatgctaaaagtgagttgaacggtgcaacgtatgcagaacattttaaacaaaggttacatatcaagctttcccatcctgagcagccgcttttgaaagctaagcaactcttctgtctgcgtaatctgcttcataaccgacaactagagagcacagagctatgctctttgaagataattgggttctcaaaagatatgggcagttctttgtccttgctaccatctctaatgtatcgcttggagaatttgttggtggctattgagttgaaggatgtcatgtcatcttatttcccagaggcttctcaaattagtgcctcgggtatccttgaatcattgactactgaaaggtgtttagagaggatctctttggagcgattagaagtcctaggtgatgctttcttgaagtatgtagttgggcgtcataactttatttcatatgagggacttgatgaaggtcagttgaccaggagacgttctgatatagtgagtaattcgaatttgtatgagttatcaattagaagaaatttgcaggtgagttgattgtatcgat

SEQ ID NO: 3020 - DNA, 3320 bp, Zea Mays
ccgggccccggtctattcagctattcttctcgtgctcccacctctctctctctctctctctctctgcttacctcaacttggggaacgcgcacggccgttccacatacgccgagactccgacagactcagctcccagggttctgttcctttcccccacaatcgtacgcttccgctcgaagcttccgccatgagcgaggacgaggctgagagctcgagctccggcgcggccgcgagcgaacccaaggatccgagaacgatcgctcgcaaatatcagctggatctttgcaagagggcagtcgatgagaacatcatagtgtatcttggaacgggatgtgggaagacacacattgccgtgttactcatgtatgagcttggtcacctcatccgcaaacccagccgcgaggtctgcgtcttcctcgcaccgaccataccccttgtccgtcagcaagcaatggtgattgcagattccacaaattttaaagttcaacgttactatggaagtggtaaacactctagagatcaccaggcatgggagaaagagatgggagaatatgaggtccttgtaatgacccctcaaatattattgcacaatttgcggcattgtttcatcaggatggacttaattgcactattgatatttgatgaatgtcatcatgcacaagcacaaaaaaggcatccatatgcacaaattatgaaggaattctacaataatgctgataaacatcctcgtgtttttggcatgactgcttcaccaattattggaaaaggtggttctaacaagcttacctacactaaatgtatcaacagtctcgaggaattacttaatgcaaaggtttgttcagttgataatgtagaacttgaaagtgtgattgcttctcctaaggttgaagtgtacttttatggtccagttggtcactctaacttgactacagcttatatcaaagagcttggtggctataagtttcagtctgaatgcatgttaagagagagtgtatgcaatttcaatgagtcactgaagaaactgaagtccttatggaggttgcatgaaaatttgattttctgtttgcaagaagttggtctctttggagctctccaagctgcaaggacttttctctcttccagtagtgttagtctagatggaaagggggctgacattaatgattatgcaaacaaagcaatgtctcttctcagccgggacatcttagaaggtccggatgctgattcatttgacttagagacaatagaagaacctttcttctcaaaaaaatttgcagttcttattaacgttctatcgagatacaggttggaggaaaacatgaagtgcattgtttttgtgaaaagaatcattgtcgcaagagtagtagttcaaattctccaaaatctgaagtgccttgatttttggagatgtgagtttcttgtgggatgccactcggggttaaggaatatgtcaagggataagatgagttctatcattgaaaagttctcttcgggtgaggtaaaccttttggttgctactagtgtaggtgaggagggacttgatattcagacttgctgccttgttgtgcggtttgatctccctgaaactgttaatagctttatccaatcaagggggcgtgcccggatgagtaaatcgaaatatgtttttctcttggagaggggaaatcattctcaggagaagttacttgatgattatattactggtgaaatcattatggataaagagattaacttgagaacatcaaatgatatgttcaattgccttgaggagaacatctatcgagtcaatgatactggtgcttccattagcactgcttgcagtgtatctctattacatcgctactgtgataaccttcctagagatattttttttgttccttccccatcattcttctttgttgatgacgtcgatggaatagtatgcaaattaattcttccaccaaatgctgctttccgtcaagtgaatggtcaaccctgtccatcgaaagatgaagctaagagagatgcatgcttgaaagcatgcatcaaacttcatgaactcggtgctttgacagattttcttctacctggccaaggctctagaaagattaaggtatcaacaacaaataattcagaaagcaacaaagacgatgatgaaagttttagggaagagctttatgagatgttaatccctgcagttctgagaccttcaagatgcaaactagactcctcgtttaagttgcatttctattacatagaatttattcccataccagcagatagacgatatcagatgtttggtctttttgtgatcaatcgccttccagaggaatctgaaaagttggatgttgaattgcatcttgctcgtgcgaggattgtgaaagcaggaattaaatatttgggaaagattgagtttaacaaagaagagatgatactcgcacacaattttcaagaaatgtttttgaaagttctcctggatagatctgagttcacaccatcttatattttgttggggaatgatggtgcattggacatggattcaacattttaccttttacttcccatcaagcagaaattctatggtgataatatgattgattggccagcagtaaagcggtgtttatcatcacctgcatttcaagatccaatgggtttgtctctgcatgattcatatttaccaaatgagtctttgaagcttcttggtggaacatacaacaaagctgatgtgattggcagtttggtctatactccccacaccgacctgtttttcttcgttgatgccattctggatggaacaaatgctaaaagtgagttgaacggtgcaacgtatgcagaacattttaaacaaaggttacatatcaagctttcccatcctgagcagccgcttttgaaagctaagcaactcttctgtctgcgtaatctgcttcataaccgacaactagagagcacagagctatgctctttgaagataattgggttctcaaaagatatgggcagttctttgtccttgctaccatctctaatgtatcgcttggagaatttgttggtggctattgagttgaaggatgtcatgtcatcttatttcccagaggcttctcaaattagtgcctcgggtatccttgaatcattgactactgaaaggtgtttagagaggatctctttggagcgattagaagtcctaggtgatgctttcttgaagtatgtagttgggcgtcataactttatttcatatgagggacttgatgaaggtcagttgaccaggagacgttctgatatagtgagtaattcgaatttgtatgagttatcaattagaagaaatttgcaggtgagttgattgtatcgat

SEQ ID NO: 3021 - DNA, 3363 bp, Zea Mays
ccgggccccggtctattcagctattcttctcgtgctcccacctctctctctctctctctctctctgcttacctcaacttggggaacgcgcacggccgttccacatacgccgagactccgacagactcagctcccagggttctgttcctttcccccacaatcgtacgcttccgctcgaagcttccgccatgagcgaggacgaggctgagagctcgagctccggcgcggccgcgagcgaacccaaggatccgagaacgatcgctcgcaaatatcagctggatctttgcaagagggcagtcgatgagaacatcatagtgtatcttggaacgggatgtgggaagacacacattgccgtgttactcatgtatgagcttggtcacctcatccgcaaacccagccgcgaggtctgcgtcttcctcgcaccgaccataccccttgtccgtcagcaagcaatggtgattgcagattccacaaattttaaagttcaacgttactatggaagtggtaaacactctagagatcaccaggcatgggagaaagagatgggagaatatgaggtccttgtaatgacccctcaaatattattgcacaatttgcggcattgtttcatcaggatggacttaattgcactattgatatttgatgaatgtcatcatgcacaagcacaaaaaaggcatccatatgcacaaattatgaaggaattctacaataatgctgataaacatcctcgtgtttttggcatgactgcttcaccaattattggaaaaggtggttctaacaagcttacctacactaaatgtatcaacagtctcgaggaattacttaatgcaaaggtttgttcagttgataatgtagaacttgaaagtgtgattgcttctcctaaggttgaagtgtacttttatggtccagttggtcactctaacttgactacagcttatatcaaagagcttggtggctataagtttcagtctgaatgcatgttaagagagagtgtatgcaatttcaatgagtcactgaagaaactgaagtccttatggaggttgcatgaaaatttgattttctgtttgcaagaagttggtctctttggagctctccaagctgcaaggacttttctctcttccagtagtgttagtctagatggaaagggggctgacattaatgattatgcaaacaaagcaatgtctcttctcagccgggacatcttagaaggtccggatgctgattcatttgacttagagacaatagaagaacctttcttctcaaaaaaatttgcagttcttattaacgttctatcgagatacaggttggaggaaaacatgaagtgcattgtttttgtgaaaagaatcattgtcgcaagagtagtagttcaaattctccaaaatctgaagtgccttgatttttggagatgtgagtttcttgtgggatgccactcggggttaaggaatatgtcaagggataagatgagttctatcattgaaaagttctcttcgggtaaaccttttggttgctactagtgtaggtgaggagggacttgatattcagacttgctgccttgttgtgcggtttgatctccctgaaactgttaatagctttatccaatcaagggggcgtgcccggatgagtaaatcgaaatatgtttttctcttggagaggggaaatcattctcaggagaagttacttgatgattatattactggtgaaatcattatggataaagagattaacttgagaacatcaaatgatatgttcaattgccttgaggagaacatctatcgagtcaatgatactggtgcttccattagcactgcttgcagtgtatctctattacatcgctactgtgataaccttcctagagatattttttttgttccttccccatcattcttctttgttgatgacgtcgatggaatagtatgcaaattaattcttccaccaaatgctgctttccgtcaagtgaatggtcaaccctgtccatcgaaagatgaagctaagagagatgcatgcttgaaagcatgcatcaaacttcatgaactcggtgctttgacagattttcttctacctggccaaggctctagaaagattaaggtatcaacaacaaataattcagaaagcaacaaagacgatgatgaaagttttagggaagagctttatgagatgttaatccctgcagttctgagaccttcaagatgcaaactagactcctcgtttaagttgcatttctattacatagaatttattcccataccagcagatagacgatatcagatgtttggtctttttgtgatcaatcgccttccagaggaatctgaaaagttggatgttgaattgcatcttgctcgtgcgaggattgtgaaagcaggaattaaatatttgggaaagattgagtttaacaaagaagagatgatactcgcacacaattttcaagaaatgtttttgaaagttctcctggatagatctgagttcacaccatcttatattttgttggggaatgatggtgcattggacatggattcaacattttaccttttacttcccatcaagcagaaattctatggtgataatatgattgattggccagcagtaaagcggtgtttatcatcacctgcatttcaagatccaatgggtttgtctctgcatgattcatatttaccaaatgagtctttgaagcttcttggtggaacatacaacaaagctgatgtgattggcagtttggtctatactccccacaccgacctgtttttcttcgttgatgccattctggatggaacaaatgctaaaagtgagttgaacggtgcaacgtatgcagaacattttaaacaaaggttacatatcaagctttcccatcctgagcagccgcttttgaaagctaagcaactcttctgtctgcgtaatctgcttcataaccgacaactagagagcacagaatctgaggctcgtgaattgatggagcactttgtggagttacctccagagctatgctctttgaagataattgggttctcaaaagatatgggcagttctttgtccttgctaccatctctaatgtatcgcttggagaatttgttggtggctattgagttgaaggatgtcatgtcatcttatttcccagaggcttctcaaattagtgcctcgggtatccttgaatcattgactactgaaaggtgtttagagaggatctctttggagcgattagaagtcctaggtgatgctttcttgaagtatgtagttgggcgtcataactttatttcatatgagggacttgatgaaggtcagttgaccaggagacgttctgatatagtgagtaattcgaatttgtatgagttatcaattagaagaaatttgcaggtgagttgattgtatcgat

SEQ ID NO: 3022 - DNA, 1155 bp, Zea Mays
gacgttgtcggagaggaaggagatatagagggtggaatcttttagaggagactgtaaaggacggatatagaggatgaatatagaggacgttgctggagacagcctaaggctgcctccaacaagagccgctaaaggctcatgtccgctaaatgtgagggactgtcaggtcccctacgtctccaacaaggtcctctaaagcgtcccctaaattatagaggatgtgccagagaccctaactgtggaggccgcccaccgtgcgctatccgcgcgacggatccaccagccgccgcgaggaaacttccgcctcctcctaccgcgcgctggcgactacatctcccggggccgagccctcaatccggcgtgcttcgtcgccggcatcgaggcaggtgggagacaagagggcttgcgagagcggacgcggagcatggcggaggagcagatcgaagaggcgtccatggccatcgccggacgcggagcatcgtggaggagcagatcgaagaggcgtccatggccacggcggcggccacgccgttccagctccagttcgacaagcccatcccgttccaggatcagagagggagtcaggaaagaaggcgctcaaaagtcgggacaaaaatatctgagtgaatcggacctgcagaatgcggacggtcacccagagattgatcttgcgttcgtgctgctgctgccccgccggtcactgataaaaatggcagaatggaatccagagaaggatctgcttgctatggttactgatgactccaaggttctcctccatcgcttcaattggcaaaggctttggacaatctctctagggaagtgcatcacatcaatttgttggagccctgatggtaaaataatagcacttggcacataagctggtttgattcttttgcatgatgtggaggtgtgtatctggatgatgataaaaattgtcggtgtctattgtatctttgtatgaacattcgtttgtacttcatagacacctgatccagtgcctatcttctcttaatatttttctaattgcttattctcatttttatatcatgcttaaaccttatgagcgaactattaggagacatttaggggatacaggcctcaaggacttcttgcccaattatgttttcgatagaggcattttaatacttcttgaag

SEQ ID NO: 3023 - DNA, 2466 bp, Zea Mays
gcgtcttccagtctttcgcccaagagcaaagaccgcaaaggccactcctttttctcctcccccctccccaaaccgccgcctcctctccccccctcgacctctcctctgctcatagtctcacccgagtcacctccacacacacacacacacacacacacaccgatacacggacacatacacgcgctctccctcctcctcctcctcctccagtcccggcaacggaaggtccactgcggcgccggcctcactggcatcaccatattgccaaccgcgcatattttcagtttgtagaagccatcttttaaagaacattttgggcagagattgccagtactattacttgtggttaacatggacttctcagctggttcctacttcacatcatggcctgtcaattctgcttctgagagctacagtttggctgatggttcagttgaatcctatggaggagaaggaatcatgccaccttcaagctacttcatgacagccagatcagatcacaatttaaaattcagtgtgcatgaacaggattccactatgcttccaaacgaccaattgacctatgctggcgctaggcagactgatctattacctggcgagactccatctagggataagctttgtgagaatcttctggagcttcaacgactgcagaataacagcagcctaccgagtaatttagtgcccccaggggtacttcagcacaattcaacacctggggcctttcatccgcagttgaatactcctggactttcagaactgcctcatgccttatctagttcaattgatagtaatggaagtgaagtttctgcttttctcgctgatctaaatgctgtttcttcagcctcagctttgtgttccacattccaaaatgcttcttcattcatggaaccagtaaatctagaagctttcagttttcaaggggcacaaagtgattctgttttgaacaaaacaacacatccaaatgggaatatctcagtatttgacagtgctgccttggcatcactacatgatagcaaagagtttatcagtggtaggctcccctcatttgctagtgtccaggaaacaaacgtagctgctagtggtttcaagactcagaagcaggagcaaaatgcagtgtgcaacgttcctatccctacgttcactgcacgtaatcaaattgcagttgctgcaatgcccggatcactgatccctcaaaagattccttcatggatcaatgaaaacaaaagtgagggtcctgttagccatccttctgatgtacaaatccaaccaaattctgttggaaatggtgttggtgtgaagccacgagtaagggctcgtcgtggacaggcaactgatcctcatagcattgctgaacgacttcgcagagaaaaaatttcagataggatgaaaaatctacaagatcttgtcccgaattctaataaggcagacaaggcatccatgctggatgaaatcattgatcatgtgaaatttcttcagcttcaggtgttaagcatgagtaggctaggagctccaggagcagttcttccccttctcgcagaatctcagactgagctccaaccaacgcacaaggattactggacacggaagaatcggaagacaccttcgccttcgaggaagaggttgtgaagctaatggaaaccagcatcacaagcgcaatgcagtaccttcagaacaagggactctgcctgatgccagttgcccttgcttccgccatatccacccagaagggcgtctccgccgcgtcaatccctcccgaacagtgaaataaagacatgctgctgctcccatgagtacgaggaaacaactgcagaagacagaaaactcaagatggctgaagaatgcagcaaagcccgtatagagtacagggtaggaagttagtctgaccagtgttcatgacctcatctactaatttgcttttcagaatcagctttttggtatctattgcgcataagttggtttttccttttcccttgctctctctctctctctctccctggggccgtatccgggtgctccgtggatagttgcgtttcagaaacttgaactgtatctggatgatctatctggtttctcttttgtgcatagaaaaaactgtaaaatcttctggttctgttctgctagatgagatctatggccggacatatcgaaaatgatcttgtgatggtacctggtagtggtagggttactgcatccggacctgtggccccttttccggctgtcagtttgttagctgtagccatctaccatcagtttccaaggatctgctgtaaagcgttggcagggaacgtctgccttctgtttggattacttcattttggagaaattagaatttatttttaggggctgattcggtgacaaggggatcacgagagaattggaggggaatgaactaatttccctttcaatcctctttaatcctcctgtgatccctggtcatcaaatcagctctagaggatgtttggt

SEQ ID NO: 3024 - DNA, 1401 bp, Zea Mays
cgggtagccaaaaaccgcgcgccgtttgggcaaggcccaacccagccagccagagaggcgccccgttggaatcctgattgggagcgctgggacggaaccgaacgcgttgccattagctgtcgctgggacggaaccggaacgtttcgctagccctcgttcccgttcggccttgacaaccccaccccaccccacccccaagttcccaacgcagaggatcgaaccgaatcctccgcaactcgccgccgccgggaccgaccgacccggtcctatcgatcgaggatgtcgtacgcctacctcttcaagtacatcatcatcggcgacacaggcgtggggaagtcgtgcctgctgctgcagttcacggacaagcgcttccagcccgtgcacgacctcaccatcggcgtcgaattcggcgcccgcatgatcaccattgaaaataagcccatcaagctccagatttgggacacggctggccaagaatcattcagatctattactagatcatactacagaggtgctgctggtgcccttttggtttatgatattactaggagggagaccttcaatcatctcgcaagttggttagaagatgcaaggcagcatgcaaatgctaacatgactgtgatgctgattggaaacaagtgtgatctttctcatagacgtgctgtcagctatgaggaaggtgaacagtttgccaaggagcatggtctggtctttatggaggcatctgctaaaactgcacaaaacgttgaggaggcattcattaagaccgctggtacaatatacaagaaaatccaagatggcatatttgatgtatcaaatgagtccaacgggatcaaagttggctacgctgttcccaactcatctggaggtggtgctggctcgtcctctcaggctggtggctgctgcagttgagtggtggcagcaagtcatacaaatgcacaagatgatgggaggagacaacagatcagttctggtcagaaaatggtaaaatcgatgaaagttttctttagcaactgatgtgcatcgcaatttgcaaggacacgcgtggattcaagatgctgctatttactttcctcgttgtaactgagagattaatgtatagtagctatatacacgtttgttcatctaaaagattgtttgatctctttattttgttgagcatgcacaaaaggaaatcatgatccacaagtataaaagcttcatgtatggttttggtaattgagacaactaagtgaactaacctacattttgggtattatgaatgagatatgttaaagttcataaagatgaaacagatgctctatatggatgaagattgacaagagtaaagcaaacgaggtgtctaccattgttgaatttgaagaggtcattgatgctgcagaagttgagacttgcaaaaag

SEQ ID NO: 3025 - DNA, 3417 bp, Zea Mays
ccgcccgcgacgctcctttccatgctcgagcagtcgcagcttccttctatggcgctcatttccatcctcgaccgcggtttcctcgccactgcgctccgtctctcgctcctttccatccctctcctcgcccgacagctactgtgtccgtgcgtgcagcggtcgcccaactcatagcgggacaccagatctcaagttcacctagcactctacatcgttcgacggcgtcccacaatgcaggcggcgtcagctcccagagacgcctcccgcccgtcagctcccagagccgccagcgccggcgagcgcggcgaggtcgtcggttccgtcgagcgaactgcattgcccgcgcggcgctcgctgctgtacacgcaccgcgcgcagatgccattttggtgccggcacagcctctgctttctgctgctcagcgctggcgttcaccagcatctccagaagatcctatcctgtggcgcgctaattgacggcatggggagctgaactcggcacatcgcaccacattggaacacatcacacacggtggcaattctgtgaagcccaaaggttccaagtcaccatgagaaaattgaaatggcaagatctcttaatctaattgttgcaccttggaagacatatgcctctgttaagtgtcaggatcttttttgctgggaagccaattccttactgatctgagggacaacatttttgtttgcctgataaggtgatgaaggtggctggacaacacgattatgggtattttcttatcgagtgatacaagacattgttctgccactgattacagtaagcctatactagattggcttgagaattccagtgatgaggtagcatagaagtgtgatgccataacatttggtgttctgaagaatcggcaaaaaaaaacttgccgagcagttttagtatttctaacgtgcctgaatttaaatctgaaaaatgcaaatcagagacatggctgctactatgagggataagtgagtcattgatatcttcctgatgcagcatggtattctttgcaaaaatctcttctttgcatggatcatatgtgtatctaattcggctcttcacttagaaattttagacatctttgtgttcgtcctagcctcttaatctattatgttcattgtgccatgcacttggtgttcctatggacagacttgtgaaagccgcagattcagtttcggcacatgtatggtgatgcttctatttctctttgaaactgaaatttcaggtgtgcctatctaaaggtttaggcgcccctgttggattcaatggcctttgttgacaaggtctgttcatgtgtgtttctaagtctaaactgtagtgttgtattattgcaaaatgaaaagaactgtatattataacagaaatatgaacaatacctagaggccaaaaatcttcgaaagaccctaggtggtggaatgaggcaggttggagttctgtgtgctgattctcatacactatgggaaagcttgctggtgaggatagaaaggctaaagttgtgacagagtttggagcttccaggtgacggatttcatctcactcaatagtctcctcgctcaaggagttcatccaagctcggtgggtgcaagcctgcaaggtgaggtactgatgatacttatttgttatcttgccttagcaacatgtgtcccgtgcttttacttgcaagctgatatgacacatgattgttatcttgctgatgtgcgcaatattgatcatgtatgttcacaatattgttcttgttatatataaatgggtcaagcattcatgctacagttcacacaaaaagtatatattggcattatgtcatattactgtcataacaggaagggcatcagatgtatcattctataacatgtattgaacacatatgtaattattgggtagaaaagcacaacgctttacttggtgccaccatcttttctgttgcagagttgtatattttttagcccactaatatgtaaagcacaacgctttacctgatgccctcaaaggttgcagttcaatttgcatctcctctttcttcatttttacagtttcaggttgcagttttcatagcctacttgagacattgcagtgtcctacaactgaacttgaaactgtcttcaacctgctacttcaggctaaacttgaaattgtcttgaacctgaaactacgaactttctaatttccagtgcacacattttcagcatttgtttatggtgcatatgttggggtatcttgccttgtttgtatatcagttacctattgtttgcagcttttacgcaatgctttactcttgttctacatatgaaaggacgaaattttgtcacttcacattttaaacgttgcacccacatcactgcttttgctaatacagttctgttgttgcttatgctaatacagttctgttgttgcttatgctattcctacccaaaattaaaaatgaaaaaacacaactcattctgtgcactcttacaacatgttcataacataaccctctatttatagtgtgtatgagcttaatggagaaaagaaaaacatggttgtaacacagtttgaaccagatgatgcaagacgttgctttcccttgttgggatgaacctgctttcaaggtttgctgctttgatttatttctcaagaccttttgttcttttaggcacaaagctacgtttacttttatttgggttgcaagaggaactagaaccgtgaatggggctgcctcggcgagggcaccattcaagcttcacactttgttttctgtacggatgagaacaacatacgaggcaaggtgaacggtgagcaaatatacgtggaactacatctgcggatctgctgctgtctcttctccttactatctcttttgactcaattcaattttcctctctctatttactcttttcgatcaaggcaattcaataaattacacctgaacctttatgcactttgttcttctatctactggcctcttcagtctctgtggtggatggtagaggcatggctctccctcacgcagcgtcgtgcctcccatcctcatcgccaacgtagctcccgtctggctcaccatatcccgcagttgttctctgtgtgtggccaaagggaagaagaaatcacattttgacgattaacacaagtaattccccttccttggtctccctcagaagtcacattttgatgatagaactttgtatgcttaacattttccttataagtcagagtattgcgtatccagtaaaacagatttcaaaagttatcttctcgtcatggattattgttattctttgttttcatgcaaaatataattttagaagcatgcatgtacgtgcatgctctttgtaatttcaaatttctagagcaatatatctcgtgacctggtgtatatctcttatctcgcatactgaaattgcaaaaaacactagaatctatcaaaag

SEQ ID NO: 3026 - DNA, 3569 bp, Zea Mays
ctgccaccctcctccccaccgccgccgcggtttcctcgcatcccgcccgcccgcgacgctcctttccatgctcgagcagtcgcagcttccttctatggcgctcatttccatcctcgaccgcggtttcctcgccactgcgctccgtctctcgctcctttccatccctctcctcgcccgacagctactgtgtccgtgcgtgcagcggtcgcccaactcatagcgggacaccagatctcaagttcacctagcactctacatcgttcgacggcgtcccacaatgcaggcggcgtcagctcccagagacgcctcccgcccgtcagctcccagagccgccagcgccggcgagcgcggcgaggtcgtcggttccgtcgagcgaactgcattgcccgcgcggcgctcgctgctgtacacgcaccgcgcgcagatgccattttggtgccggcacagcctctgctttctgctgctcagcgctggcgttcaccagcatctccagaagatcctatcctgtggcgcgctaattgacggcatggggagctgaactcggcacatcgcaccacattggaacacatcacacacggtggcaattctgtgaagcccaaaggttccaagtcaccatgagaaaattgaaatgttcaactgtatcactcatccataagcaattacttgtgttgaaatttatgagaagacatatgcctctgttaagtgtcaggatcttttttgctgggaagccaattccttactgatctgagggacaacatttttgtttgcctgataaggtgatgaaggtggctggacaacacgattatgggtattttcttatcgagtgatacaagacattgttctgccactgattacagtaagcctatactagattggcttgagaattccagtgatgaggtagcatagaagtgtgatgccataacatttggtgttctgaagaatcggcaaaaaaaaacttgccgagcagttttagtatttctaacgtgcctgaatttaaatctgaaaaatgcaaatcagagacatggctgctactatgagggataagtgagtcattgatatcttcctgatgcagcatggtattctttgcaaaaatctcttctttgcatggatcatatgtgtatctaattcggctcttcacttagaaattttagacatctttgtgttcgtcctagcctcttaatctattatgttcattgtgccatgcacttggtgttcctatggacagacttgtgaaagccgcagattcagtttcggtgtgcctatctaaaggtttaggcgcccctgttggattcaatggcctttgttgacaagaaatatgaacaatacctagaggccaaaaatcttcgaaagaccctaggtggtggaatgaggcaggttggagttctgtgtgctgattctcatacactatgggaaagcttgctggtgaggatagaaaggctaaagttgtgacaggtttattttttccctcttctctaaaaaacatagaattggttgtatgctatttaaggcaagaatgttttccattgtctaaaaacgatttattttttccataatatttgtttcctagctttttatcctatttaaaacaaatcgaaactgcctgaaggctgttgttgtcttggtcttttctaattgttctttatcatgcggtttatcgaagttggtacaatggtttccccaaccacttatgctcgacgttgcctgtcatatttgatgaatggcatatgccacatgaggcattgaatgatgcaatgaatgctctggtaatatctcccacatggtcaacaacattatatctttaggcaccacatgttctgaagttgcatttcttgtttcgggttcaaaaattagtaacctggtgacggatttcatctcactcaatagtctcctcgctcaaggagttcatccaagctcggtgggtgcaagcctgcaaggtgaggtactgatgatacttatttgttatcttgccttagcaacatgtgtcccgtgcttttacttgcaagctgatatgacacatgattgttatcttgctgatgtgcgcaatattgatcatgtatgttcacaatattgttcttgttatatataaatgggtcaagcattcatgctacagttcacacaaaaagtatatattggcattatgtcatattactgtcataacaggaagggcatcagatgtatcattctataacatgtattgaacacatatgtaattattgggtagaaaagcacaacgctttacttggtgccaccatcttttctgttgcagagttgtatattttttagcccactaatatgtaaagcacaacgctttacctgatgccctcaaaggttgcagttcaatttgcatctcctctttcttcatttttacagtttcaggttgcagttttcatagcctacttgagacattgcagtgtcctacaactgaacttgaaactgtcttcaacctgctacttcaggctaaacttgaaattgtcttgaacctgaaactacgaactttctaatttccagtgcacacattttcagcatttgtttatggtgcatatgttggggtatcttgccttgtttgtatatcagttacctattgtttgcagcttttacgcaatgctttactcttgttctacatatgaaaggacgaaattttgtcacttcacattttaaacgttgcacccacatcactgcttttgctaatacagttctgttgttgcttatgctaatacagttctgttgttgcttatgctattcctacccaaaattaaaaatgaaaaaacacaactcattctgtgcactcttacaacatgttcataacataaccctctatttatagtgtgtatgagcttaatggagaaaagaaaaacatggttgtaacacagtttgaaccagatgatgcaagacgttgctttcccttgttgggatgaacctgctttcaaggtttgctgctttgatttatttctcaagaccttttgttcttttaggcacaaagctacgtttacttttatttgggttgcaagaggaactagaaccgtgaatggggctgcctcggcgagggcaccattcaagcttcacactttgttttctgtacggatgagaacaacatacgaggcaaggtgaacgtctctgtggtggatggtagaggcatggctctccctcacgcagcgtcgtgcctcccatcctcatcgccaacgtagctcccgtctggctcaccatatcccgcagttgttctctgtgtgtggccaaagggaagaagaaatcacattttgacgattaacacaagtaattccccttccttggtctccctcagaagtcacattttgatgatagaactttgtatgcttaacattttccttataagtcagagtattgcgtatccagtaaaacagatttcaaaagttatcttctcgtcatggattattgttattctttgttttcatgcaaaatataattttagaagcatgcatgtacgtgcatgctctttgtaatttcaaatttctagagcaatatatctcgtgacctggtgtatatctcttatctcgcatactgaaattgcaaaaaacactagaatctatcaaaag

SEQ ID NO: 3027 - DNA, 1241 bp, Zea Mays
accccgaaggcccgaaacaagattagattagagatagcaaaaggcgaagcgacggtaaccgccaccaccaaatcgctaccgccaatccgccatgatgctcccgacggccaccgcgacggccgtcttcctcaccgcggcgccttcctctttctccacccgccgtcggcgcagtcgcgccatcttcgcatccctttcgccgtccttctcctcctcggaggagccgctgctggtgcgcgcggcgcggggcgaggacggcctcccacgcccgcccgcgtggatgatgcggcaggcagggcggtacatggcggagtaccaggcgctggccaagcgccacccctcgttccgggagcgctccgagaacacggacctcatcgtcgagatcacgctgcagccgtggcgtgccttcgcgcccgacggcgtcatcctgttctcggacatactcacgcccctgccggccatcggggtgccgttcgatatctcggactccaaggggcccgtgatccaatcgccagtacggtccaaagagcaggtgagggagctcgtccccatcgaccttgatatgctccagttcgtcggggagtcactaaagattctgcgaaatgaggatttgtgggggccccatggacaattgcaacttacattgttgaaggggggatgaccaatacgtacacaaatataaagagcatgtgccatacagctccagatgtcttgaagggtcttctctctcaccttgcacaagccatatctgactatatcatttaccaagttaactcgggggcccagtgtatacagatatttgattcatggggtggacagcttccacctcatgtgtgggagcagtggtcaaaaccatatatcaaacaggagctgatgttattgggcttgactggacagtggacatgactgatggaaggaggcgccttggtaatggcattagtgtacaagggaatgtggatccagcatttttgttctcaccattaccagtactgactgatgaaattcataggttagtaaaggctcaaagatttccatttaatttacgttattttgtgtttttgcttaatgctcatgtgcaattcattaatgagatcacctaaagtgttgcttgagcagtgtactatacatcttcatgtcaggtatgattggttgcctgcactatgataaacctgcattacaccctatgcagcatagccttagcctttataactgcatgcaatgaggtgtgtttggtttgattgtct

SEQ ID NO: 3028 - DNA, 1295 bp, Zea Mays
ctggcctcttcgcctatcaccccgaaggcccgaaacaagattagattagagatagcaaaaggcgaagcgacggtaaccgccaccaccaaatcgctaccgccaatccgccatgatgctcccgacggccaccgcgacggccgtcttcctcaccgcggcgccttcctctttctccacccgccgtcggcgcagtcgcgccatcttcgcatccctttcgccgtccttctcctcctcggaggagccgctgctggtgcgcgcggcgcggggcgaggacggcctcccacgcccgcccgcgtggatgatgcggcaggcagggcggtacatggcggagtaccaggcgctggccaagcgccacccctcgttccgggagcgctccgagaacacggacctcatcgtcgagatcacgctgcagccgtggcgtgccttcgcgcccgacggcgtcatcctgttctcggacatactcacgcccctgccggccatcggggtgccgttcgatatctcggactccaaggggcccgtgatccaatcgccagtacggtccaaagagcaggtgagggagctcgtccccatcgaccttgatatgctccagttcgtcggggagtcactaaagattctgcgaaatgagattgatggaaaagctgctttgctaggatttgtgggggccccatggacaattgcaacttacattgttgaaggggggatgaccaatacgtacacaaatataaagagcatgtgccatacagctccagatgtcttgaagggtcttctctctcaccttgcacaagccatatctgactatatcatttaccaagttaactcgggggcccagtgtatacagatatttgattcatggggtggacagcttccacctcatgtgtgggagcagtggtcaaaaccatatatcaaacaggtttacttgagcgcatgaagaacacaggagctgatgttattgggcttgactggacagtggacatgactgatggaaggaggcgccttggtaatggcattagtgtacaagggaatgtggatccagcatttttgttctcaccattaccagtactgactgatgaaattcatagatacggtgcactgggcaagacactcatagaggcttcaaatacttgtactcggttttcaaagactcggtattcaaagatgatgtaaattatcggatatgtttggtgcaccattggacaggttatcaaacatgttatttagagaggtttgtaattatactacttatcgatgtatttggtatgcacattggatactacgtacagtaatggccagaacttgtc

SEQ ID NO: 3029 - DNA, 2135 bp, Zea Mays
acacttcacacccccccattccccacttgcctccgccggcgcatccctaaaccccagtttagggtttctcgcgcggcgctacgctccgctccctcctccgctccccgcccgatcgcctcttcctctacctcctcgaagcttcgactgttccacacccccacccatatcaacccctttcccctttagctccttcccactgatacgctcgccgcgtgaagcattcgttagccgagccgccgcaaccatgtcgtcgttctggggtgtggaagtgaagcccgggaagccctacactctcacccatggcgacttcgccggccgcctgcgcctcacccaggcgacgctaggggttgaggtcggcaagggggagaaggctaccggcgtgaagaggtgtgtgctacagtgcagtgccgagaacagagatcccgtttttctttgcgtcctcatgccggagcagtcggagacatgccacctggagctagaatttgaggaggaagtcaccttctcagtgattgggccaaggagcatccacctcgctggatactacatgactgatgtgtgtggggaagataggggtgacagtgattctgggagcgattcacttcaaagttcagatgaggatggtttcttggaggaggacgatgatggtaacatggttatgggatattcagacagtgaagatgatgattcagagtctgatgatgaagagatggcatacaatcagggtaggggcaaaagttcagaagggattgaagaagcaaagccgtgaaaatggtgatgagtctcaactccagcttgctgcaagaaatccacctactgaatccttggaaagtgaagatgaagatggttttcctgtatcattttctgaatcaaagaagagttctgagattgtttcaaacaagaatgggggaaaagacaaggagactagcaacaaagacctgaaaagaaaaagtggagccattagcgaccgtggtgattcttcagggggggtaaaagctgagattgatggggcatcaaagaaaaagaaaaagggcaaggacaaaagcactgttatggacacaggaaaagtaaacaacgaagaaaaggaggttaagctacacgattctccagctgatcctgtcagtacaaaacagaagaaaaagaaaaacaagaacaaaagtgcttctgagggtgataccagtgagcaatctgctaagaacaacaatattgataaagacaatgaggaggcaagtgcgcaggaggccaataaaaagatcaagaaaaagaaggcacatgatataagcagaagtgaaagtcaggcaggaactggacttggtgagtcagatagcaaggaaccactccaaacacgaacgtttgccaatggtatgatgattcaggaggtagagatgggcaaacctgatggtaaaaaggccagccgtgggaagaaggtttctgttagatatattggcaagctaaagaatggcactattttcgactccaacgtcagtggaagaccttttgagtttagactaggtgttgggcaggttatcagtggctgggacgttggcgtcaatggtatgcgggttggggacaaaaggagactcaccattccaccttccatggggtatgggagcaaaagagtggggcagataccacagaactcaactctcatcttcgatgtggagctggtgaacgtaaaatgaagtgagaagatccacgagaaactgcggcagtttcacaaattttgctacgcatcattttccttgggcaatgctgtttcgtaggcataggggcatgttaagtggattcatctctgtcgctatcatactttcgaactgagtttcagaaggaaaaaaactgtggactgttgccatctgggataattcctgggctgcagcattcgccatccttctcccggttccttcagggtcattttgacgttcttgtgataccctcagaaccttttgaactgatgaaatggttaaggtggagtacgtgtacgacttcacgccgattggttttttttgtatcgtttgtgatcaagccaatcaaaactgagatcttgtctaatcgatctgtcagtgagacaaccaaaactgggtactgccgcgacgtaatagcttaacgtagagccccgcaacgtcaatacgagagcaacg

SEQ ID NO: 3030 - DNA, 1415 bp, Zea Mays
gtactgccgtgagccaagagtgactgctgttggcgctcggcgattgggcccatattgccatacactgtctctatggagctgaagtgttatgtattggcagcgtgactggtacttgacaatactctagattaccgaacaacagtttgagccagggattatagccaaaagggattatacccccaaggggttcaagtgataaagaggggattaactcaatccctcctggattcaatacctctctggaataaaaacctgtaaaccgaacatgcccctagggaagtaatccattgcaaacgaacatgccctcagggtttactattgtgtccgctcccaccgggtctgcgcatcagagaccgacaagactgggaaatccagagatgcatttttctaccgatcagctgatcggctcggcgttcattgcctttgggctcacattgttcgtgtgtttcttctacgttgccgtcgtgtccaagctgcttccgccacatcaaaatggattcctggccgccatccaaaacgactggtattactgtctgcttgtgccgttgacgcttcctgtaataatcgtggctgtctacctgcactggctcagcatgaagatgttcaagcacgcatgaagcagtcatgcagcttccttccggtttcagaatcctggtcaaaatcgaggagtgtagcaccaattagttcgagtgatgtctctctgcccacatcatcattagatctcccagatgttgcagatctctttgctccccctgcagacaatgcatcaaggaagagggaatcaaatgggtctgctcttcatgactcgcgcaataaatttccaaggatgcaatcacaatcccaaggcataggaagtgctgcagggaacgccctaattccaccgcagcttcgtggaaggagcaatgttgttaccgaagacatgagcaaactctttgtggctaaacgaaaagagtagcatcttaaccttttctggacctgaacctctgtttggactccatagactgataaacgcatgtactgagtgcaatggatgtgccggcatgatccaaggttgttgctgaatcctaaagaaccggacgaaggatgctaacggtaggacgacctggtctcttagcctaccgtgggctgttgtcagatgtcaaaaatgccctcttagaagtttagaacatttctttggtgctcactcgcgtttcatgttcaacggtgctacatgactggtgctggatgcatgtaaactctgcaaccctatcatgtcatggcagctagatgctactacgtctatcttttggtcggtgattacaaccatgtattacgtctagtagtggtaatagatcgcgatccaaatgcttcttaataaaatagtagaactctaaataattttagttaaaaaatgaatagaaataagattctgattt

SEQ ID NO: 3031 - DNA, 4285 bp, Zea Mays
cagtcattgccatcctccatccctctgaactccgaaggccgaaccagttccgacgaaacggtacggtgacggctcacctcgggggtctccatgtccatggacggccctgccacctcgccggcaagcgaggtgccgttccgcatcagcttctccggccacagcggccacctccgcctcgaccctaccccgcacacgcccagccccattccggacttcgtcctgccgccggcatacccggccgagagcccgagcagcgtgaaggagtacctcgagaggaactacctcgaccccgagctgcacctccccaccgcggccgatagcgggagggtgtgggatgtcgactggtttgccctggccaggccgccgctggagccctccgccccccgcaccatgctcgcgcccgtctgggtgccgcctttccggcgcgggcaggagaagttgcaatccgcggcagagtcgcgagtgtgggaccctgagtccgtgcaaatggagatggtcgacgtgttcgattcggggaccggggggatagcgccccggatgcctggtccggcgaaggacttcgtcagggggagcatcaacaacagaccttttcgtccaggcggtctgcaggatgacgccgctgaggcggctgcgctggaaaaggcgttcccagagggtgcaaggactggtgattgggtgcgtgagctcatgagcggtggcccggcgcaggttgcgcctccagggttccgtaagggattggagctgggccagttgaaggggtatgaaagccactggaagtgtttccgggatggagaacttgtagaggagcaacctgcatcatcatcgaatgacacaatggagaagtactctgtgcagtttgatgatcttttcaagatagcgtgggaggaagatactgccaacaagttgttgaaggacggtgttgttcaacaatctgctgaagaaattggcgaacaaaaagttgatgcattgcaggatgagttcgagagtataacaacgctagatgacgagaaacaggaagttgatgtcataagaaatgttcctgaaactcaaacagacttggatcagatgttatcttctgaagtacaggatacaggcagggaaccaggtgcatcaggtgataagaagccaacacaagatggcatggtttgggcacttgttggtggggacgaggacatagtgactaacttctccaaactcgttccagatatggcaatcgagtttccatttgaattggataagttccagaaggaggctatatattatctcgagaagggtgaatcagtctttgttgcagcccatacttcagctggaaagacggttgttgctgagtatgcattcgcattagcaacgaaagagatgttagcatcaggccagaggcaacttgcttaattatgactactgagatattgcgttcaatgctctacagaggcgcagacattatacgtgatattgaatgggtaatctttgatgaagtgcattatgtaaatgatgctgaaagaggtgtagtctgggaggaggtcattataatgctcccgaagcacattaacattgttcttctttcggcaacggtcccaaatactgttgaatttgctgactggattggtcggacaaagcagaagaaaattcgtgtcacatcgaccaacaaaaggcctgttccacttgagcattgcctgttctactctggagaagtgtacaaaatatgtgagagggatatgtttcttgctcaaggatttaaagaagcaaaagatgctttcaaaaagaaaaatttgaataagtttggagtgaaacctggttcaaagtcaggaacccctgcagtacgtgctggaactcaaggcaaaaatccagatacatccaacaaggggagagatcaaaagtacccaaagcaccgcaattccaattcaggagtagccacagttcaacagagctcctcagggccaaagagatttgaatctttattttggatgccacttgtgaataaccttctgaagaaatcccttgtgcctgttgtaggaatacaaagccttctgcgaagaggaattggagtacaccacgctgggcttctccctattgtgaaggaagttgttgagatgctgttttgccgtggtgtaatcaaggtactgttttccactgagacatttgcaatgggtgtcaatgcaccggcaagaacggttgtgtttgattctttaagaaagtttgatggaaaagaacaccggaaattgcttccaggggaatatatacaaatggctgggcgagctggtcggagaggacttgataacattggtactgtgatcattatgtgtcgtgatgaaattcctgaagaaagcgatttgaaaaatttgatcgttggaaaaccaactcgtttggaatctcaatttcgattaacatacaccatgatactacatcttctgcgtgtggaggaactgaaggtcgaggacatgctcaagagaagttttgctgaattccacgcacaaaagaatttgcctgagaaggaaaagcttcttctgcaaatgcttcgtcaacctacaaggacaatagagtgcataaaaggagagccttctattgaggaatactacgagatgactttagatgctgaggcacacagggaatacataacagaagcaattatgcagctgcctaattctcaacagtttcttacgcctgggagattggtggttgttaaatctgattctgatgatgatcacttgcttggtgttatactgaaaaatccatctgcattgctaaagaaatatgttgttctggtattgactggtgattgcagttcatctgcactagcccctgagttcaataaaaatgaaaagggtcctgtggattttcaaggaggacaatttattgtcctgaaaggaaaacgtggcatggacgatgaatatttctcttctgttagttcacgaaaagcttcaggtgtaatcaatatcaatctaccatacaagggggatgcatctggaatgggctttgaagtaagagcaattgagaataaagaaatcattagtatatgcagcagcaaaataaagattgatcaagtcagacttcttgaggagcctaacaaaactgcatactctagaactgtccaacagcttataaaggagcaaccagatggaaccaagtatcctcctgctttagatgcaataaaagatctaaaaatgaaagacatgtatcttgttgaaagttaccgtgcatatcacatactactgcaaaaaatgtctgaaaacaagtgccatggttgtataaaactgaaggagcatatatcattgatgagggagcaaaagatgtacaaggatcagttgaatgaattgaaattccaaatgtccgacgaggcacttcaacaaatgccagagtttcaaggcagaattgatgtactaaaggtaatccactacattgattctgatctagttgtgcaacttaagggtcgggtagcatgtgaaatgaactccggtgaggagttaatatcaacagaatgtctgtttgaaaatcaattggatgacctagaacccgaagaagctgtggctattatgtctgcattcgtcttccaacaacgcaatgcttcagaaccatctcttactccaaaactggctgaagcgaagaagaggctctatgatacagccataaaattagggaagctccaatccgagttcaaggtgcctgtggaccctgaagagtatgcacgtgataatctcaagtttggccttgttgaggtcgtctacgagtgggcaaaggggacgcctttcgcagacatatgcgagctgactgatgtatccgaagggatcattgtaagaacaatcgtccgtctggacgaaacatgtagggaattcaggaatgcagcttccatcatggggaactctgcgctgttcaagaagatggaggtcgcgtctaacgctattaagcgtgacattgtgtttgcagcaagtttgtatgtcacaggaatctgatgcatgtaacctcgtagtctcccttgcttcttttgttagagaaatcgttgtgctggtggaatgctactaacctaaccttagctagaacaattgttgtggtatttttttttccagttctggattattgcttttgctagttttgcgaagttttctgaagcggcgaccagcagagtaaaggaaaatcgaaagcgggtgggattctcgtttttttttcactgagaatatgattattgtattattagcggaaacaaaacgttctcgtactcaagacacctggaatccgtctagtaggagctcgatgtctaaagcaaaagtgcttaactggattgggaaacactgag

SEQ ID NO: 3032 - DNA, 4491 bp, Zea Mays
cgtttagatcactcgtttggtcgcttccatctcaagtgctggttgtgcaacagtcattgccatcctccatccctctgaactccgaaggccgaaccagttccgacgaaacggtacggtgacggctcacctcgggggtctccatgtccatggacggccctgccacctcgccggcaagcgaggtgccgttccgcatcagcttctccggccacagcggccacctccgcctcgaccctaccccgcacacgcccagccccattccggacttcgtcctgccgccggcatacccggccgagagcccgagcagcgtgaaggagtacctcgagaggaactacctcgaccccgagctgcacctccccaccgcggccgatagcgggagggtgtgggatgtcgactggtttgccctggccaggccgccgctggagccctccgccccccgcaccatgctcgcgcccgtctgggtgccgcctttccggcgcgggcaggagaagttgcaatccgcggcagagtcgcgagtgtgggaccctgagtccgtgcaaatggagatggtcgacgtgttcgattcggggaccggggggatagcgccccggatgcctggtccggcgaaggacttcgtcagggggagcatcaacaacagaccttttcgtccaggcggtctgcaggatgacgccgctgaggcggctgcgctggaaaaggcgttcccagagggtgcaaggactggtgattgggtgcgtgagctcatgagcggtggcccggcgcaggttgcgcctccagggttccgtaagggattggagctgggccagttgaaggggtatgaaagccactggaagtgtttccgggatggagaacttgtagaggagcaacctgcatcatcatcgaatgacacaatggagaagtactctgtgcagtttgatgatcttttcaagatagcgtgggaggaagatactgccaacaagttgttgaaggacggtgttgttcaacaatctgctgaagaaattggcgaacaaaaagttgatgcattgcaggatgagttcgagagtataacaacgctagatgacgagaaacaggaagttgatgtcataagaaatgttcctgaaactcaaacagacttggatcagatgttatcttctgaagtacaggatacaggcagggaaccaggtgcatcaggtgataagaagccaacacaagatggcatggtttgggcacttgttggtggggacgaggacatagtgactaacttctccaaactcgttccagatatggcaatcgagtttccatttgaattggataagttccagaaggaggctatatattatctcgagaagggtgaatcagtctttgttgcagcccatacttcagctggaaagacggttgttgctgagtatgcattcgcattagcaacgaaagagatgttagcatcaggccagaggcaacttgcttaattatgactactgagatattgcgttcaatgctctacagaggcgcagacattatacgtgatattgaatgggtaatctttgatgaagtgcattatgtaaatgatgctgaaagaggtgtagtctgggaggaggtcattataatgctcccgaagcacattaacattgttcttctttcggcaacggtcccaaatactgttgaatttgctgactggattggtcggacaaagcagaagaaaattcgtgtcacatcgaccaacaaaaggcctgttccacttgagcattgcctgttctactctggagaagtgtacaaaatatgtgagagggatatgtttcttgctcaaggatttaaagaagcaaaagatgctttcaaaaagaaaaatttgaataagtttggagtgaaacctggttcaaagtcaggaacccctgcagtacgtgctggaactcaaggcaaaaatccagatacatccaacaaggggagagatcaaaagtacccaaagcaccgcaattccaattcaggagtagccacagttcaacagagctcctcagggccaaagagatttgaatctttattttggatgccacttgtgaataaccttctgaagaaatcccttgtgcctgtggtgattttttgtttctcaaagaatcgctgtgataaatcggcagatagtatgtttggcactgatctcaccagtagttcagagaaaagtgaaatacgtgtcttctgtgacaaggcattttcacgtcttaaaggatctgataggaaccttccacaggttgtaggaatacaaagccttctgcgaagaggaattggagtacaccacgctgggcttctccctattgtgaaggaagttgttgagatgctgttttgccgtggtgtaatcaaggtactgttttccactgagacatttgcaatgggtgtcaatgcaccggcaagaacggttgtgtttgattctttaagaaagtttgatggaaaagaacaccggaaattgcttccaggggaatatatacaaatggctgggcgagctggtcggagaggacttgataacattggtactgtgatcattatgtgtcgtgatgaaattcctgaagaaagcgatttgaaaaatttgatcgttggaaaaccaactcgtttggaatctcaatttcgattaacatacaccatgatactacatcttctgcgtgtggaggaactgaaggtcgaggacatgctcaagagaagttttgctgaattccacgcacaaaagaatttgcctgagaaggaaaagcttcttctgcaaatgcttcgtcaacctacaaggacaatagagtgcataaaaggagagccttctattgaggaatactacgagatgactttagatgctgaggcacacagggaatacataacagaagcaattatgcagctgcctaattctcaacagtttcttacgcctgggagattggtggttgttaaatctgattctgatgatgatcacttgcttggtgttatactgaaaaatccatctgcattgctaaagaaatatgttgttctggtattgactggtgattgcagttcatctgcactagcccctgagttcaataaaaatgaaaagggtcctgtggattttcaaggaggacaatttattgtcctgaaaggaaaacgtggcatggacgatgaatatttctcttctgttagttcacgaaaagcttcaggtgtaatcaatatcaatctaccatacaagggggatgcatctggaatgggctttgaagtaagagcaattgagaataaagaaatcattagtatatgcagcagcaaaataaagattgatcaagtcagacttcttgaggagcctaacaaaactgcatactctagaactgtccaacagcttataaaggagcaaccagatggaaccaagtatcctcctgctttagatgcaataaaagatctaaaaatgaaagacatgtatcttgttgaaagttaccgtgcatatcacatactactgcaaaaaatgtctgaaaacaagtgccatggttgtataaaactgaaggagcatatatcattgatgagggagcaaaagatgtacaaggatcagttgaatgaattgaaattccaaatgtccgacgaggcacttcaacaaatgccagagtttcaaggcagaattgatgtactaaaggtaatccactacattgattctgatctagttgtgcaacttaagggtcgggtagcatgtgaaatgaactccggtgaggagttaatatcaacagaatgtctgtttgaaaatcaattggatgacctagaacccgaagaagctgtggctattatgtctgcattcgtcttccaacaacgcaatgcttcagaaccatctcttactccaaaactggctgaagcgaagaagaggctctatgatacagccataaaattagggaagctccaatccgagttcaaggtgcctgtggaccctgaagagtatgcacgtgataatctcaagtttggccttgttgaggtcgtctacgagtgggcaaaggggacgcctttcgcagacatatgcgagctgactgatgtatccgaagggatcattgtaagaacaatcgtccgtctggacgaaacatgtagggaattcaggaatgcagcttccatcatggggaactctgcgctgttcaagaagatggaggtcgcgtctaacgctattaagcgtgacattgtgtttgcagcaagtttgtatgtcacaggaatctgatgcatgtaacctcgtagtctcccttgcttcttttgttagagaaatcgttgtgctggtggaatgctactaacctaaccttagctagaacaattgttgtggtatttttttttccagttctggattattgcttttgctagttttgcgaagttttctgaagcggcgaccagcagagtaaaggaaaatcgaaagcgggtgggattctcgtttttttttcactgagaatatgattattgtattattagcggaaacaaaacgttctcgtactcaagacacctggaatccgtctagtaggagctcgatgtctaaagcaaaagtgcttaactggattgggaaacactgag

SEQ ID NO: 3033 - DNA, 567 bp, Zea Mays
ccccacctctgccatcctctcatccatgaccttactgctggtctaccactttctcatcttcccaatcccaccagcttccctcccacagtcccaccttgccctcctgccttcccgacgacatcccctctgcctccgaccaccctccctcccacctcgcccaccttccctcccgacgaggtaacctctgcctttgattccgttcgactatgcccgacctcagtctctgccgcatccaccgccgtggcctcacccacggtcgccttcccgatccgggcgagcctcgccgtcatccccaccgtcgcgcccttgtcggcctccccgtcgctgcgcctcgcatcggcgtcgtccatcgtcgatgcgtccgggtcctcctccccggcctccgcccactccgcaccgcgcctccttttttcctcttctgccctggcgcgtgtttgatgtggcgcagtgtttggtcgtgcagaacgctgctcgcgagcaggagcgaggagtacatgcttctattccggctgcctcccgacaagttgaagcatgacaatgtgatggatcactgagagaatagctggc

SEQ ID NO: 3034 - DNA, 1287 bp, Zea Mays
ttgtatagggaaaaaaagaagggaaaagagggggggaaataacggctcgtcggccctccacgcaaacgaaatccagcagaccgacgcgaaccgagaaaaatcccacgaaatctcgtggccgcggcgaccggaagaagaggacgacgacggacggagcggcgatggcgtgccgcgcacttgccctccgctccctgctcctccccgacccgctacaccgcctcccggccgcggcgccacctgtttggagagcgtcccgcggtggccgccgtccgcacctccgctgctgctccggcggcgggggcggggagcccgggcagccgccgcaagaagctgtgctcgaggccatatccaagatagcaaggtctaaaggaagggttgcactcacaacaaatatggtcatgggtggtactgtgactgacgatgcaagtgatgaatggcttgttctggatcagaaggtaaattcctaccccacagatagaggatttacagcaattggcactggaggtgatgattttgtccagtcaatggtagttgctgttgaatctgttcttcaagaatcaattcccaagggccgggtatctcagaaattatcttcaagagggaaatatgtttctgtaaacattgggccaattcgtgttgtttctagtgagcaggtccaagctgtgtatcgtgccatgagaagagataacaggatgaaatacttcttatgaagtgcaatttcatgtcctggatgttccctagtccattccatgttgtatcctacgatgcattttcgccatatttatgcaggctggacctccggtgaattccaatgacttttatgtgccattcaagcccaaattgaagcttctctactacaaaacaatatgttgggtccagctacgttatttagtgcagggggcgtatatagctactatgtgcttgcaagcaataactgtcaaatccaagagatatcctctacaaaaggaaaggagataaggatacagcttcttttgccaacgttcctaatatatctgaaaatttctaggaacttgtttattatgggacggatggagtatgttaaagatgtatgttagtgtttcatattacatgtgttttactattttataaacagtatgaatagtagtataagtgctcctaaattatcgatgtgtgtcttcaattccaagagactattttttactctctatttgactctttatttacctctctataaagattaaaccctatatatagtatcttattcgaacagactttctaacagacaaattagtttagctagtcaga

SEQ ID NO: 3035 - DNA, 1337 bp, Zea Mays
gttggtggcagaaccgaagattgtatagggaaaaaaagaagggaaaagagggggggaaataacggctcgtcggccctccacgcaaacgaaatccagcagaccgacgcgaaccgagaaaaatcccacgaaatctcgtggccgcggcgaccggaagaagaggacgacgacggacggagcggcgatggcgtgccgcgcacttgccctccgctccctgctcctccccgacccgctacaccgcctcccggccgcggcgccacctgtttggagagcgtcccgcggtggccgccgtccgcacctccgctgctgctccggcggcgggggcggggagcccgggcagccgccgcaagaagctgtgctcgaggccatatccaagatagcaaggtctaaaggaagggttgcactcacaacaaatatggtcatgggtggtactgtgactgacgatgcaagtgatgaatggcttgttctggatcagaaggtaaattcctaccccacagatagaggatttacagcaattggcactggaggtgatgattttgtccagtcaatggtagttgctgttgaatctgttcttcaagaatcaattcccaagggccgggtatctcagaaattatcttcaagagggaaatatgtttctgtaaacattgggccaattcgtgttgtttctagtgagcaggtccaagctgtgtatcgtgccatgagaagagataacaggatgaaatacttcttatgaagtgcaatttcatgtcctggatgttccctagtccattccatgttgtatcctacgatgcattttcgccatatttgctggacctccggtgaattccaatgacttttatgtgccattcaagcccaaattgaagcttctctactacaaaacaatatgttgggtccagctacgttatttagtgcagggggcgtatatagctactatgtattccctttcttctataatgaataagattcaaaggtgcttgcaagcaataactgtcaaatccaagagatatcctctacaaaaggaaaggagataaggatacagcttcttttgccaacgttcctaatatatctgaaaatttctaggaacttgtttattatgggacggatggagtatgttaaagatgtatgttagtgtttcatattacatgtgttttactattttataaacagtatgaatagtagtataagtgctcctaaattatcgatgtgtgtcttcaattccaagagactattttttactctctatttgactctttatttacctctctataaagattaaaccctatatatagtatcttattcgaacagactttctaacagacaaattagtttagctagtcaga

SEQ ID NO: 3036 - DNA, 2520 bp, Zea Mays
gtcctccctttcccatcatcggattccaccgacgcacgcgcgcgccaccgcggctccccggcgctgcgcaatggacgccgtcgcgttcccgccgccgcccgcgccgttcctcgacgacgacctcgatttcggggacttcaccttcgcctccgcgccgcagccgcagccgcagccgcccaccgccgccttcgacgacgactggggcgactttgtggcaagcgggctcggatccgacgcgggcgcatctgccccgacggacgcgccagccgccgctccctcctcctcgccttgggagaagccgcggggcccgctgcccctctccctgttcggcgccgatgccgacgacgacggccaggaggaggaggaagggccggccgggccgccgccgatggacacggcgccccagtgcgctccgtccgtcccgtccaacgggtcgcgccccgcggatctgaaggacctcatcgctggcctctacggatatcagccgccccacaccgccgacgcggtcccgcaggtgaaggcggaggaggatgaccaagggtttggagacgatgattgggaattcacggcggcgacggggcaacctgctgctgatcaggatggaggcggaccagggcatgcggatggatttggtaagatcgaggatatatcgaagtcattgagcaccgaccaggaagactggtcatcgtttaccagtgccgatggcaaattgaaccatgttcgtctaacaaccgatggtcttgggaatcatgagtccactggagaatttgtgagggcctccacttattcaccagctaatagttcggccatactcaacctgtacaaaggaagcaaacgggttgatgatgttgtcattgcccaaggctctgcagaaagtgtccagagttcatctgatctgttttctaataatgaaatgggagcacagaagggatctacaatctctgatgaaaacaacaaagcgactgcaatgggaggggatattcaggaaatatatgacaaactaaaagattcttcattgcccgaaggctttttcacagaggaacagccttggaaggatatatatatcacagaactccttaattgtatcaaagaggaacatctgaaggattttgaacaagagtattgtttagcagaaaagatagaaggggcaacggaggacacagatattgcagttgaactttataagctcagtatttccaccctagatctattgaaactagcatccaaagaggaacagggtgattatgtcggtgcatggtacagtatgcttctgtcctgtgctcaagaattgaagcatggcgtggcactttggcaagagttttatcatgcaaatgtctgcgacagagtagtttctgaaggcggtcactactttattgctcttggggagatatatagagttgcacagattttatacttatccttgcagcgtttcaagccctgggttcttgcagatcctggaatgttgagtaaaatgttgtcttgtttggacagctgcacttatgcttggactagtggtctggaaacggctcttaagatggtcattgacagcagtcacatagattcatcccttgctaaagctctgatggagtccattaagaatattacaaaacttgaggtgcccaatctacaaaaaaatattcccaacaatgagatgcaatgtagactaactctcttgccaagtagtcttctgccaggattgaacttggtcatttggaatggtggtcactattttgttaaagtcgcaaatctgtgggcaaatcggatatctcctgatcctcctcttctgccaagcaaccccacctcttcaatgaacaatgcagcaacacacagccagtcatgctgaataacatgtcaaacatctgaggctgtgacctacactctgatggaagcatcaaatgcatgttgtgtaaaacatattcgtcaagttatcttttttatatacgtaaactgagcaagcaccgtgctgattgagggctgttcttggaagatagagatccaaggtgactgttcctttgcaggtcattcttttgtacaagttgtaatttacaacattctttccatagtgccggatgatgtcactaagtatagcaagtcgaaagggaatgacaagtttggaagtggacgtctggtataatgtgtagattatcaaagctgagaattggaatacggatcgtggaaactgtcactcttttgctaggttaatattatgggctttgctgtgttttgctagatcagttggtattcctcagctacgcattgtgatttgggactgtgtctcgataagttgctcagcccagcgttgactatttattgacttgaaacgaagatagatcttactccgttctttccacgctgatggacaatggcactagtatagcaagtcaaaaaagaatgttcagtttggaactgaacgtattgcataacgttgtaccaatttttttttaacatgatgcatttttatagattatcaacgcggaaaactagaaatacaaaacgtggaaatgaagcataggatgccag

SEQ ID NO: 3037 - DNA, 2621 bp, Zea Mays
gtcctccctttcccatcatcggattccaccgacgcacgcgcgcgccaccgcggctccccggcgctgcgcaatggacgccgtcgcgttcccgccgccgcccgcgccgttcctcgacgacgacctcgatttcggggacttcaccttcgcctccgcgccgcagccgcagccgcagccgcccaccgccgccttcgacgacgactggggcgactttgtggcaagcgggctcggatccgacgcgggcgcatctgccccgacggacgcgccagccgccgctccctcctcctcgccttgggagaagccgcggggcccgctgcccctctccctgttcggcgccgatgccgacgacgacggccaggaggaggaggaagggccggccgggccgccgccgatggacacggcgccccagtgcgctccgtccgtcccgtccaacgggtcgcgccccgcggatctgaaggacctcatcgctggcctctacggatatcagccgccccacaccgccgacgcggtcccgcaggtgaaggcggaggaggatgaccaagggtttggagacgatgattgggaattcacggcggcgacggggcaacctgctgctgatcaggatggaggcggaccagggcatgcggatggatttggtaagatcgaggatatatcgaagtcattgagcaccgaccaggaagactggtcatcgtttaccagtgccgatggcaaattgaaccatgttcgtctaacaaccgatggtcttgggaatcatgagtccactggagaatttgtgagggcctccacttattcaccagctaatagttcggccatactcaacctgtacaaaggaagcaaacgggttgatgatgttgtcattgcccaaggctctgcagaaagtgtccagagttcatctgatctgttttctaataatgaaatgatgacaaccattccagtagatcaacaagtgattgcattttgattgaattctaccaaagactgagagaagagtccttgacagcaatatcccggcacgtgaaggatcttaggaagggatctacaatctctgatgaaaacaacaaagcgactgcaatgggaggggatattcaggaaatatatgacaaactaaaagattcttcattgcccgaaggctttttcacagaggaacagccttggaaggatatatatatcacagaactccttaattgtatcaaagaggaacatctgaaggattttgaacaagagtattgtttagcagaaaagatagaaggggcaacggaggacacagatattgcagttgaactttataagctcagtatttccaccctagatctattgaaactagcatccaaagaggaacagggtgattatgtcggtgcatggtacagtatgcttctgtcctgtgctcaagaattgaagcatggcgtggcactttggcaagagttttatcatgcaaatgtctgcgacagagtagtttctgaaggcggtcactactttattgctcttggggagatatatagagttgcacagattttatacttatccttgcagcgtttcaagccctgggttcttgcagatcctggaatgttgagtaaaatgttgtcttgtttggacagctgcacttatgcttggactagtggtctggaaacggctcttaagatggtcattgacagcagtcacatagattcatcccttgctaaagctctgatggagtccattaagaatattacaaaacttgaggtgcccaatctacaaaaaaatattcccaacaatgagatgcaatgtagactaactctcttgccaagtagtcttctgccaggattgaacttggtcatttggaatggtggtcactattttgttaaagtcgcaaatctgtgggcaaatcggatatctcctgatcctcctcttctgccaagcaaccccacctcttcaatgaacaatgcagcaacacacagccagtcatgctgaataacatgtcaaacatctgaggctgtgacctacactctgatggaagcatcaaatgcatgttgtgtaaaacatattcgtcaagttatcttttttatatacgtaaactgagcaagcaccgtgctgattgagggctgttcttggaagatagagatccaaggtgactgttcctttgcaggtcattcttttgtacaagttgtaatttacaacattctttccatagtgccggatgatgtcactaagtatagcaagtcgaaagggaatgacaagtttggaagtggacgtctggtataatgtgtagattatcaaagctgagaattggaatacggatcgtggaaactgtcactcttttgctaggttaatattatgggctttgctgtgttttgctagatcagttggtattcctcagctacgcattgtgatttgggactgtgtctcgataagttgctcagcccagcgttgactatttattgacttgaaacgaagatagatcttactccgttctttccacgctgatggacaatggcactagtatagcaagtcaaaaaagaatgttcagtttggaactgaacgtattgcataacgttgtaccaatttttttttaacatgatgcatttttatagattatcaacgcggaaaactagaaatacaaaacgtggaaatgaagcataggatgccag

SEQ ID NO: 3038 - DNA, 1984 bp, Zea Mays
gtctttttcgcgtggcttggctgacatgtgaaaaagctaggcgcccccgataaaaagggcctccccgctccccggacgcggcggctactgtttctgtttcttccttcgaccccggtcgtcccgtcctccgctgggcatcgaaagtcgaacgcctcccccctccctccctcccagttccgtcgtcggctcctgcagcagcagcaagcaatggcggcttcctggagagccgtggcgctggcggtggccgcagtgggctggcttcttgccggtgccgcgcgggcgttcccggccgaggacttggtcgcgcggctgccggggcagcctccggtcacgttcaggcagttcgccgggtacgtggacgtcgacgccaaggccggcaggagcctcttctactacttcgccgaggcgcgggaggacgccgccgccaagccgctcacgctgtggctgaatggaggtcctggctgttcttcggttggaggtggtgctttcaccgagctagggccattttatccgcgaggagacggccgaggcctcagattgaacaagaagtcatggaacagagcgtccaatcttctgttcgtggagtcaccggctggagttggatggtcttattcgaacacttcatcggactacagcactggagacgtgcggactgctcatgacatgtaccaatttttgttgggatggtatgcgaagtttcctgagtacagatcaagagctttgttccttaccggagagagttacgcagggcattacataccacagctcgctgatgtacttatcacccataacgagaaatccaagggtttcaagttcaatattaagggagtcgctatcgggaatccgctcctcaagcttgacagggacgtccctgcgacctacgagtacttctggtctcatggcatgatctccgacgagatattcctggcgatcagccacagctgcgactttgaggactacaccttcaacgaccctcacaacgagagcaagtcatgcaacgacgccatcgcggaagcgaacagcgtagtcggagactacgtcaacaactacgatgtcattctcgacgtctgctacccatcgatcgtgatgcaggagctacggctgcgagaatacgcgacgaagatcagtattggcgtggatgtctgcatgtcctacgagaggtttttctacttcaatctaccggaggtgcagcaggctctgcatgctaacaggacgcatctgaagcatcactggagcatgtgcagcgagttttggttatcttctcaatgccaaactctcacacgggtcatttgcaccatcatgtgccagtatcctgaactacagcaacaccgacggcaacatcaacatactgcctacacttcaaagaatcgtcgagcacaagataccactttgggtgttcaggttggagggtgggtgacggagtatggcaacttcctgaccttcgccacagtgcgaggtgcgtctcacatggtgccctttgcacagccagaccgggctctcgggctgtttcgatccattgtactcggacaaagactaccgaacacgacgaatccacacattgactagaagtgtatctacaaaagaaggtggagacagacagaaaaatagcttagattttgctttttcagttttgctgcaatgaatggatctacaaaagaaggtagttcataaagacgtgtgatgtgttggatgctcaactagtactttaactatttataaagagcagaaataatatttttattgctgtggttataactatcatcaatctgcatccctcgaagtttggaacacacatagatttgtgcaagtgacgacaggctcaacagcatttcactagatgtcaagcaataatgtcaccttaagcctgacagttcctgtcggcggagacaaattccttcactgagttattttctgaccaagttccgctcgatcaatgtgcaacagcacatgtcacggaagagttaatctgcatcaggaataaaat

SEQ ID NO: 3039 - DNA, 2874 bp, Zea Mays
acaccgcacacccttgcttgtctccaggcgtacttgcgtttagcgtctcttccctgctgccatctctgtccggagggcaagccatggcggcgggcggggacggcgtcgctcgccaggcggagctccgccggatcgagggcaacatctgcttcaagaaggcgcgcctcggcgccgccatcgactgctacaccgaggcaattgcgctctgccccgacgtcgccgtctactggatcaatcgggccctgtgccatttcaagcgcaaggagtgggccaaggtcgaagaggacagcaggagggctcttgcgcttgattacactttagtcaaggggcactatctgctggggtgtgcgctactcgagaaggaagaatctgctcttgctatcaaggaattcgaaaaggctctaactctcttaaagtctgtggattcaacgtatgaaatggctgaggacatttggcaggtccttgcaaaggcaaaatacttagattgggagaagcattccactgaacgactatggaggatggaaagtttgaaggaagcttgtgaaactgctctgcaggagcatcactttctaactggtacacttgaggaagactccaacaggtcagacaacgagtattcagagcaaattaaactactatcagaggtcttcagccaagcgacagtcgccgatacaccaacagatgtgcccgattacctttgctgtcagataacattcgagatcttccgagacccagtgatcacaccgagtggtgtaacatatgagagggctgtacttgttgaacatctccacaaggttggcaatttcgacccggtgacgcgagaacctctgaaggagcatcagctggttccgaatctggccatcaaggaagcagtgcaggcctacctgaaagagcacagctgggcccacaagttgaactaattggatgccgtgtgctttgctgactgcagatgctgataaatcggggatggcctgttattagagttagattttatgttgtgttggaatgagattgattggatagctcgattcatcgttcttagtattgattgggtaacttgacctgtaactgcaattctgcaaacactcattggatggatgtaatgaagcaagtgtacatgaaacattggttggttcagctcactgcatgtatatggttgcagcattatatatggttggtcgtagacccagtgggcctcaaacaagttaggcctagtttggatactctagtaatgagtgggattgaagtggattaagatgtattgagagagtatttgatgtattggggatttacaccctctccaatcccttcaaaacactccaatcctaaagtatccaaactaggccttaggtgggccggcctctatccaaggcccagccttttacttggcgctgacaagacaaaagagaggagacgagaaagaaaacaaaccctagcccgctacccctgccccttctctcttcgtcgcgcctccgcctccgccgtcgtagcatcctcctccgccacctcggccatggcgacatccccagcgctcctcttcccttctccctcctcggcatcctctgcgccttcgtcggcgcgggtggaggcagtggtgcttttcaacgtctgcgacagctacgtgcggcgcccggaccaggcggaccgcgtcatcggcaccctcctcggttccctcctctccgacggcaccgtccacgtccgcaactcctatgtcgtcccccacagcgagtcagccgaccaggtcgccatcgacatcgactaccaccataacatgtacgcctcgcaccagaaggtgaaccccaaggaggtcatcgtcggatggttctcgactggatttggtgtttctggggggagtacgctcatccacgagttctattcaagggaagtacaaaaccccatccatcttacagtcgacactggcttcactaggggggaggcttccatcaaagcctacatctcatccaatctgtccctcagagatagtcaactcgctgcacaatttcaggaaatccctctggatctgaagatgattgaggcggaaaaggctggatttgagatcctgaaatctactatggtagagaagctccccaatgatctggaaggaatggagtcatcgatggggaagctttacattcttatcgatgagatctacaaatacgtcgatgatgttgtggaaggacgcgtggcacccgacaacagaattggaaggttcatctctgattcttttgcttcggtgccgaaattgtccccggctgctttcgataagacaggataaccttgcgctggtatacctgtcaagcatcacaaggacacaaatcagcatcgccgagaagttgaacactgctgctcaagtgctgtaggtttggcggtgtggcatctggtttggacgtggatggcttgatgctatctgtgatgcttggcgtaagtgtgattggtgacagaaatgcatttttgtactcattattattattgctaaatgagagacctgatggaaagggttagccaacgatgagatcccataatgttgccagaatgccagtagagtggtggatggcgagatgtttctgtttggatagtattctgtgctccaggttgaatatttgtaatgctcgttggttttgtgtagcgacacatcggcaatgtggagcaatgaagagatttgctccacattttacgtcgtcatttagaggtgtggtggcatgcaatgtgatgctgttgttgcaggaaaatcggttttgctgtcctgttatagcaagctttcctcctgcggccctgcttttcatttccctcttgattcttgcctctgcccttcgaaaccggtctaggccgggaacaatcacgtcatcccatgttatgtgtctagcctgaacgaac

SEQ ID NO: 3040 - DNA, 2896 bp, Zea Mays
acaccgcacacccttgcttgtctccaggcgtacttgcgtttagcgtctcttccctgctgccatctctgtccggagggcaagccatggcggcgggcggggacggcgtcgctcgccaggcggagctccgccggatcgagggcaacatctgcttcaagaaggcgcgcctcggcgccgccatcgactgctacaccgaggcaattgcgctctgccccgacgtcgccgtctactggatcaatcgggccctgtgccatttcaagcgcaaggagtgggccaaggtcgaagaggacagcaggagggctcttgcgcttgattacactttagtcaaggtcacattcttgtttcttctttcgtctcaaaactaaagcgccgacttcagttacctctacattatgggcactatctgctggggtgtgcgctactcgagaaggaagaatctgctcttgctatcaaggaattcgaaaaggtccttgcaaaggcaaaatacttagattgggagaagcattccactgaacgactatggaggatggaaagtttgaaggaagcttgtgaaactgctctgcaggagcatcactttctaactggtacacttgaggaagactccaacaggtcagacaacgagtattcagagcaaattaaactactatcagaggtcttcagccaagcgacagtcgccgatacaccaacagatgtgcccgattacctttgctgtcagataacattcgagatcttccgagacccagtgatcacaccgagtggtgtaacatatgagagggctgtacttgttgaacatctccacaaggttggcaatttcgacccggtgacgcgagaacctctgaaggagcatcagctggttccgaatctggccatcaaggaagcagtgcaggcctacctgaaagagcacagctgggcccacaagttgaactaattggatgccgtgtgctttgctgactgcagatgctgataaatcggggatggcctgttattagagttagattttatgttgtgttggaatgagattgattggatagctcgattcatcgttcttagtattgattgggtaacttgacctgtaactgcaattctgcaaacactcattggatggatgtaatgaagcaagtgtacatgaaacattggttggttcagctcactgcatgtatatggttgcagcattatatatggttggtcgtagacccagtgggcctcaaacaagttaggcctagtttggatactctagtaatgagtgggattgaagtggattaagatgtattgagagagtatttgatgtattggggatttacaccctctccaatcccttcaaaacactccaatcctaaagtatccaaactaggccttaggtgggccggcctctatccaaggcccagccttttacttggcgctgacaagacaaaagagaggagacgagaaagaaaacaaaccctagcccgctacccctgccccttctctcttcgtcgcgcctccgcctccgccgtcgtagcatcctcctccgccacctcggccatggcgacatccccagcgctcctcttcccttctccctcctcggcatcctctgcgccttcgtcggcgcgggtggaggcagtggtgcttttcaacgtctgcgacagctacgtgcggcgcccggaccaggcggaccgcgtcatcggcaccctcctcggttccctcctctccgacggcaccgtccacgtccgcaactcctatgtcgtcccccacagcgagtcagccgaccaggtcgccatcgacatcgactaccaccataacatgtacgcctcgcaccagaaggtgaaccccaaggaggtcatcgtcggatggttctcgactggatttggtgtttctggggggagtacgctcatccacgagttctattcaagggaagtacaaaaccccatccatcttacagtcgacactggcttcactaggggggaggcttccatcaaagcctacatctcatccaatctgtccctcagagatagtcaactcgctgcacaatttcaggaaatccctctggatctgaagatgattgaggcggaaaaggctggatttgagatcctgaaatctactatggtagagaagctccccaatgatctggaaggaatggagtcatcgatggggaagctttacattcttatcgatgagatctacaaatacgtcgatgatgttgtggaaggacgcgtggcacccgacaacagaattggaaggttcatctctgattcttttgcttcggtgccgaaattgtccccggctgctttcgataagcttttcaatgacaagattcaggataaccttgcgctggtatacctgtcaagcatcacaaggacacaaatcagcatcgccgagaagttgaacactgctgctcaagtgctgtaggtttggcggtgtggcatctggtttggacgtggatggcttgatgctatctgtgatgcttggcgtaagtgtgattggtgacagaaatgcatttttgtactcattattattattgctaaatgagagacctgatggaaagggttagccaacgatgagatcccataatgttgccagaatgccagtagagtggtggatggcgagatgtttctgtttggatagtattctgtgctccaggttgaatatttgtaatgctcgttggttttgtgtagcgacacatcggcaatgtggagcaatgaagagatttgctccacattttacgtcgtcatttagaggtgtggtggcatgcaatgtgatgctgttgttgcaggaaaatcggttttgctgtcctgttatagcaagctttcctcctgcggccctgcttttcatttccctcttgattcttgcctctgcccttcgaaaccggtctaggccgggaacaatcacgtcatcccatgttatgtgtctagcctgaacgaac

SEQ ID NO: 3041 - DNA, 2926 bp, Zea Mays
acaccgcacacccttgcttgtctccaggcgtacttgcgtttagcgtctcttccctgctgccatctctgtccggagggcaagccatggcggcgggcggggacggcgtcgctcgccaggcggagctccgccggatcgagggcaacatctgcttcaagaaggcgcgcctcggcgccgccatcgactgctacaccgaggcaattgcgctctgccccgacgtcgccgtctactggatcaatcgggccctgtgccatttcaagcgcaaggagtgggccaaggtcgaagaggacagcaggagggctcttgcgcttgattacactttagtcaaggggcactatctgctggggtgtgcgctactcgagaaggaagaatctgctcttgctatcaaggaattcgaaaaggctctaactctcttaaagtctgtggattcaacgtatgaaatggctgaggacatttggcaggtccttgcaaaggcaaaatacttagattgggagaagcattccactgaacgactatggaggatggaaagtttgaatctcttaacagaagcgtatccccgtggacatgcagggaagcttgtgaaactgctctgcaggagcatcactttctaactggtacacttgaggaagactccaacaggtcagacaacgagtattcagagcaaattaaactactatcagaggtcttcagccaagcgacagtcgccgatacaccaacagatgtgcccgattacctttgctgtcagataacattcgagatcttccgagacccagtgatcacaccgagtggtgtaacatatgagagggctgtacttgttgaacatctccacaaggttggcaatttcgacccggtgacgcgagaacctctgaaggagcatcagctggttccgaatctggccatcaaggaagcagtgcaggcctacctgaaagagcacagctgggcccacaagttgaactaattggatgccgtgtgctttgctgactgcagatgctgataaatcggggatggcctgttattagagttagattttatgttgtgttggaatgagattgattggatagctcgattcatcgttcttagtattgattgggtaacttgacctgtaactgcaattctgcaaacactcattggatggatgtaatgaagcaagtgtacatgaaacattggttggttcagctcactgcatgtatatggttgcagcattatatatggttggtcgtagacccagtgggcctcaaacaagttaggcctagtttggatactctagtaatgagtgggattgaagtggattaagatgtattgagagagtatttgatgtattggggatttacaccctctccaatcccttcaaaacactccaatcctaaagtatccaaactaggccttaggtgggccggcctctatccaaggcccagccttttacttggcgctgacaagacaaaagagaggagacgagaaagaaaacaaaccctagcccgctacccctgccccttctctcttcgtcgcgcctccgcctccgccgtcgtagcatcctcctccgccacctcggccatggcgacatccccagcgctcctcttcccttctccctcctcggcatcctctgcgccttcgtcggcgcgggtggaggcagtggtgcttttcaacgtctgcgacagctacgtgcggcgcccggaccaggcggaccgcgtcatcggcaccctcctcggttccctcctctccgacggcaccgtccacgtccgcaactcctatgtcgtcccccacagcgagtcagccgaccaggtcgccatcgacatcgactaccaccataacatgtacgcctcgcaccagaaggtgaaccccaaggaggtcatcgtcggatggttctcgactggatttggtgtttctggggggagtacgctcatccacgagttctattcaagggaagtacaaaaccccatccatcttacagtcgacactggcttcactaggggggaggcttccatcaaagcctacatctcatccaatctgtccctcagagatagtcaactcgctgcacaatttcaggaaatccctctggatctgaagatgattgaggcggaaaaggctggatttgagatcctgaaatctactatggtagagaagctccccaatgatctggaaggaatggagtcatcgatggggaagctttacattcttatcgatgagatctacaaatacgtcgatgatgttgtggaaggacgcgtggcacccgacaacagaattggaaggttcatctctgattcttttgcttcggtgccgaaattgtccccggctgctttcgataagcttttcaatgacaagattcaggataaccttgcgctggtatacctgtcaagcatcacaaggacacaaatcagcatcgccgagaagttgaacactgctgctcaagtgctgtaggtttggcggtgtggcatctggtttggacgtggatggcttgatgctatctgtgatgcttggcgtaagtgtgattggtgacagaaatgcatttttgtactcattattattattgctaaatgagagacctgatggaaagggttagccaacgatgagatcccataatgttgccagaatgccagtagagtggtggatggcgagatgtttctgtttggatagtattctgtgctccaggttgaatatttgtaatgctcgttggttttgtgtagcgacacatcggcaatgtggagcaatgaagagatttgctccacattttacgtcgtcatttagaggtgtggtggcatgcaatgtgatgctgttgttgcaggaaaatcggttttgctgtcctgttatagcaagctttcctcctgcggccctgcttttcatttccctcttgattcttgcctctgcccttcgaaaccggtctaggccgggaacaatcacgtcatcccatgttatgtgtctagcctgaacgaac

SEQ ID NO: 3042 - DNA, 1617 bp, Zea Mays
tcattcgatcaaaccgagcccattgcccttgccccccagccgcgcaaacgtgagcgcgacttggcaggcgtgctcgtccggtcttcgtcctggttccctgtgcccccactgttccagcatcagatattcagatcagatcgatcagaccagaaagtttgcgctcgtctgcttggtaaaggaaaggagaagtttccgaaataggggcggcgcgccgggcgcattttggttgctggattggaaccgagcgaacgcgccggagtccggatgggctcctcgtccgctccggcggccgcggccgcggccgcgccgagccggcgcaaggtggcgctctacctggccctcctcaccctgcagtacggcgcccagcccctcatctccaagcgctttgtccgcgaagatactatagtgacctcactagttcttgcaacggaagcagcaaaggttatttgcgcaatcattttattgattgcagagggtagtctgaaaaaacagttcagtaactggactctcactggatcactgactgcgtctggactgcctgctgccatttatgccctccagaatagtctgctgcaagtatcatacaagcatctggattccttgaccttttcaatccttaaccagactaagcttttgtggacagcatttttcacatttcttattttggggcaaaagcaatcttccaggcaagttctagcattggccctcttaattggtgctgccgttcttttaagtgttggggagagcagtagcaaaggttccaagggtggtggctctgactatatcttgctatatgggatcattccagttacagtcgcttctgtgctgtctgggctggcctcttcattgtgtcagtgggcatctcagagatgtcatttattggaagtatgtgcttgttagcaagtacctatcgctcaccagatggagaggccatcaggaaatatggatttttccatgaatggactttctggactgtgataccggtattaatgaatgccgtgggtggaattcttgttggtcttgtcacaacttacgcaggtggcgttagaaagggttttgttatagtttcagctctccttgtaactgcactgctacaatttatatttgatgggaagccaccgtcactctactgcctgatagcattaccacttgtcgcgtcaagcatattcatctaccaaaaacatccatatgttgataggaagaagaaagactgatccacataattgtcagagacgggaattatcaacaggatgtgatcctaacctcattttctccacaaggctggaatttgcaccgtcaaggggaccaaatttgactcttgaagagttgctgttcgtcaagctatgtttcaattatctactgatctatatatatagaattaattagtaggacactagcctggaatcagtttcagcaggcagttgacaagcttgcatataacttctcgaaggaggcttcgtatcaatgatgatgatgaagtgtttccatgtgcagctatctatacttgtacggttgctgaatctattgtattttttatggatttctatttagattccgactttcgaatatatatttctatgatggcagcaaattaaaaaccaattattgtgtgccgga

SEQ ID NO: 3043 - DNA, 1460 bp, Zea Mays
tttggagatttttttttgtcaatttgctgcacaacttataggcaccatgtcattcatgtctccattcccggggatggatctaagtaaaatggatcccgggactctgaccctccttggggcagctggttgtgtaatgctgactatgcatttcactgtgcaattggtgtcacaacatctcttctattggaaaaaccccaaggagcagaaagccatacttattattgtgctgatggctccactatacgctatctcttccttcgtgggtcttcttgatatccagggtagcaagacatttttcacattcttagatgctgttaaagaatgctatgaggcactggtgattgctaagtttatggcattgatgtacagctacttgaatatatctatcagcaagaacatagtccctgatgaaatcaaagggagggtgcttcatcattccttccctgtttctcttttcctgccccgcaatgtccgattggagcacaaaacattgaagcttctgaagtattggacctggcaatttgttattgttaggccagtatgttccattctgattattgcactccagcttcttgggctgtaccccagctgggtcagctggacgtttagtattatactgaacttttcagtctccatggccttatatgcattggttctcttctaccacttgtttgctaaagagctggcacctcacaagcctcttgcaaagttcttgtgcatcaaagggattgtcttcttctctttctggcagggttttgcgctcgatgttttaacccaagcaggcgtgatcaaatcccaccatttctggctggacgtggagcacatccaggaggcgatccagaacgtcctggtgatccttgagatggtggtgttctccgtcatccagcagtacgcataccacgtcgccccctacagcggcgctgacagggccaagtttgagaagaagaacgaatgaaccaggtttccaaaaagaatgaaagaaggaaaaaaactctctgctttctggtcgctcggagatggagcaccagtatttcctcacggatggacgacatacacaagttcatcgagtctcgcgagtagcgtatttggtagcgagttgtcgcgctgtaaaattacactgtccttgcgcgctgaataattttgctggctttgtcgttttggttttttgaacgttgtcgccgaggctatatagccaggactgttcgtcttgtacgagcgcgcgctctctctctctctctctctctgcggacttggcgaatccttttatgaataaaagctactgtcctgttctacagaggccgcactgggctgatgccgatgaaggttgcgggttgcctgcaaccacctgctgttggggggatgatattgcaatctgcacgttcgtcctttctccgtggagtaatttttttttcaggaacgtgatctgatactacactagtactagtatgtgtttttgaggt

SEQ ID NO: 3044 - DNA, 1462 bp, Zea Mays
ggcgacgcgctcctgtccgcgtcccttcacgggcccatcgctggcaccatgtcattcatgtctccattcccggggatggatctaagtaaaatggatcccgggactctgaccctccttggggcagctggttgtgtaatgctgactatgcatttcactgtgcaattggtgtcacaacatctcttctattggaaaaaccccaaggagcagaaagccatacttattattgtgctgatggctccactatacgctatctcttccttcgtgggtcttcttgatatccagggtagcaagacatttttcacattcttagatgctgttaaagaatgctatgaggcactggtgattgctaagtttatggcattgatgtacagctacttgaatatatctatcagcaagaacatagtccctgatgaaatcaaagggagggtgcttcatcattccttccctgtttctcttttcctgccccgcaatgtccgattggagcacaaaacattgaagcttctgaagtattggacctggcaatttgttattgttaggccagtatgttccattctgattattgcactccagcttcttgggctgtaccccagctgggtcagctggacgtttagtattatactgaacttttcagtctccatggccttatatgcattggttctcttctaccacttgtttgctaaagagctggcacctcacaagcctcttgcaaagttcttgtgcatcaaagggattgtcttcttctctttctggcagggttttgcgctcgatgttttaacccaagcaggcgtgatcaaatcccaccatttctggctggacgtggagcacatccaggaggcgatccagaacgtcctggtgatccttgagatggtggtgttctccgtcatccagcagtacgcataccacgtcgccccctacagcggcgctgacagggccaagtttgagaagaagaacgaatgaaccaggtttccaaaaagaatgaaagaaggaaaaaaactctctgctttctggtcgctcggagatggagcaccagtatttcctcacggatggacgacatacacaagttcatcgagtctcgcgagtagcgtatttggtagcgagttgtcgcgctgtaaaattacactgtccttgcgcgctgaataattttgctggctttgtcgttttggttttttgaacgttgtcgccgaggctatatagccaggactgttcgtcttgtacgagcgcgcgctctctctctctctctctctctgcggacttggcgaatccttttatgaataaaagctactgtcctgttctacagaggccgcactgggctgatgccgatgaaggttgcgggttgcctgcaaccacctgctgttggggggatgatattgcaatctgcacgttcgtcctttctccgtggagtaatttttttttcaggaacgtgatctgatactacactagtactagtatgtgtttttgaggt

SEQ ID NO: 3045 - DNA, 1693 bp, Zea Mays
aaggtaagaatgacgttttccgcagaaaacaatttggtccactcgtaggctttctttccttgaatgactcatgtgtgtcaaagacaaggccacgcaaactagcaaccggtgccacgcaaactgccaactgccatcttcttccccagccgctgtgcccgtccccctgccaccaaggtccaaggtctccggagcgcgacctggctgcaacgcaggcaatggagtcgccgttccgcgcggacctgctgagggggaaggcggcgctggtcacgggcgggggctccggcatcggcttcgagatcgccgcgcagctcgcgcgccacggcgcgcacgtcgcactcatgggccgccgccgcgaggtcctcgacaaggccgtcgccgcgctccggtccgagggcctcagggctgttggttttgacggggatgtccgaaagcaagaggatgctgccagagtgatcgcagcaacggttgagcattttggcaaactggacattcttgtcaatggtgctgccggcaacttccttgcctccccggaggatttgaagcccaagggattccggactggtactccgtcatgacttttttgattcagtgttcttgacattgacactgtgggtacatacacaatgtgttatgaagccctcaagtatctcaaaaagggtggaccagggagaggtccttcctctggtggcctcatcattaacataagcgcaacgctgcaatacactgccgcttggtaccaaattcatgtctctgctgccaaggctggcgttgacggtatcacaagatcattggctctggaatggggaacagattacgacattagagtaaatggaattgcacctggaccaattcaagacactccaggaatgaggaaacttgcacctgaagaaatgggcaataaggggaaacgagaaacgatgccattatttaagcttggggagaaatgggacatagcaatggccgcactctatctagcttctgatgcaggaaaatatgtaaatggggctataattattgttgacggaggtctttggttgagtcgccctcgccatattcccaaggaggaagtgaaggcactctctaaagttgtcgagaagaaggttagggcatctggtgttggggtgccatccagcaaattgtgatgacatctttgactacgtagctcttcgatgtgttctgtacaacatatgtctatattgttgtcccactaatgttgtcagtttggctatgccaccagtccatgcagatgacttgttagggcttgttcgcttatttttaatccatatggattggaggggattgatatggattgggggagattttcacttactagggattaaaaccctctcaatccatatggattggggtagaaccgaacatggccttaagcggctgagcagtccatttagttgaagaaattcaaatatttattactgttgtcgtccaatttgtattagaaatagttgagatcggtatgggatcccaaccaagaggtgcgtattgccaaatatttacatgctgtctattcaggttgtcgattaaaagggtcatattaaagatttaacagtttgcgtctccccactgttgcaactctatgcaaatggttcacctcaacatgtgtgcaaatcatgacaaattggatgccggcagttgcaactagcctgaagttcagagaaataagagaaactgcatg

SEQ ID NO: 3046 - DNA, 795 bp, Zea Mays
gcgtttgcggtgtgccgatgctgctcggccacgtctctccatcgctaaccacggaaacaaccccacaggctgcgcctggctgcacgcactgttgtgtagttattaccagcatcggtggtgcgccatccaacaagcatcagagctcggtgtcacaaaacctgaccgatggcggcccggtgctccacagctgcctccgtggtcagaacaggatcgcgagacctctccccctccttttccttcacagccgcggcgctcccctcggcgcgtctgaggccggtaggagcgtgggtccgcggtggagggtacacctgcaggctccgcgccgtctgcgccatgggctccgcgccgtcgtcgtcccaatccccgtcgccgcacacgccttcaggacaaacccaagggaaagcagattataaatcactgagtgaagaggagtggaagaagcgcctgactgaagagcagtattatgttactcggcagaagggcactgaaagagcattcactggggaatactggaatactaaaaccccaggcatttatcagtgtgtctgctgcgacacccctctgtttcagtcatcaaccaaatttgatagtggtactgggtggccatcctattataaaccaattggtgaaaatgtcaagagcaagcttgatatgtcaatcatttttatgccccggaccgaggtgctctgtgcaacctgtgatgctcatctggggcatgtcttcgatgacgggccaccaccaacagggaagagatactgtatcaataggtctagggattgtgtcattgcgagtcct

SEQ ID NO: 3047 - DNA, 863 bp, Zea Mays
atcgcgcacgcgctcgttcgaccctgtcctctctgactctctctatacaatatccacttcagttgcggatgcggccaccttctcccctttcctcagaccccaggccccagcccggcaagcagacatgggcaaccgtgcgtcgcgccaccaccgccaagccgccgagcagcaaccggcgacgccgaccctgccgaagccccagccccagatccagccgccgcctccgcctccgccgacgcagacgcagcagtaccagcaggcgccgccgcagtcgcagcagaagccgaagccggcggcggacgtgggggcggtggggcgcgtgctggggcggcccatggaggacgtgcgcgcgacctacactttcggccgcgagctcgggcggggccagttcggggtcacctacctcgtcacgcactcggagaccgggcagcgcttcgcctgcaagtccatcgccacgcggaagctcgtccaccgcgacgacattgaggacgtgcgccgggaggtgcagatcatgcaccacctcacgggccaccgcaacatcgtcgagctccggggagcatacgaggacaggcactcggtcaaccttgttatggagctctgcgagggcggggagctcttcgaccgcatcatagccaagggccactacaccgagcgagccgccgcctcgctctgccgcgagatcgtcgccgtcgtccacagctgccactccatgggggtcttccatcgggatctcaagcccgagaacttcctgttcctcaataacaaggaggactccccgctcaaggccacggacttcggtctctccgtcttcttcaagcacgatgtggatgtggatttgacttgaccgattcgccgggttggac

SEQ ID NO: 3048 - DNA, 1802 bp, Zea Mays
taccttgtttctagttttattttctttcagtgcattttgcaagcaagcatgggggatagttttgatgaagagcttgaaactggtgagttagatgacattctttcgaagttgaagagttcagttgagttagatcacaggcaagcagctgtttggaatatcctaggtttagttcttcttcggggtggtcagatacagagtgctatctcagttctatcttctctcacggctgttgctccagactacttggactcccttgcaaatcttggcgttgcatacattcaaagtgggaagctagagctgtctgcaaagtgctttcaagaacttcttctaaaagatcaaaaccaccccgctgctctggtgaactatgcagttcttcttctgtgtagatatggatctttgtctgcaggggcagggggcaatgtcagcacaggtccttacgtgcatcagaaagaagccttagttgttgcaaaagagtgcttgcttgcagcagtgaaggctgatcctagagctgcatcagtttgggttaatcttgcaaatgcatattacatggatggtgagcataagaactcaaagaggtgcttggagcagttctaaaagaaggagacccttccgcagttgacgccccaattgcatgggctggattggcaatggctcacagggcacaacatgaaattgcagccatctatgatactgaaaacatcaatcttaatgatgcagaagagcgagctcaatatacactaaaacaggcaatccaagaggacccagatgatgctgttcaatggcatcaacttggcctgtacaatatttgcatgacccggttcagcaggtctgtaaattttcttaaagcagccttagcccgttccccagattgcagttatgcttggtcaaatcttggtattgcgttgcaactatcagacgatccatcctctgaaactgtatataagcgggcactggtactatcatcaactcagcagctgcacgcaatcttctctaatcttggaattctttatcggcaacataggaactatgaatttgcaaggaagatgttattaaggtcgttggaactgtgtcctggatttgcaccagctagcaacaacctgggtcttgtatttgtcgctgagggccgttgggaggatgctaaaagctggtttgagaaagctctgcaatctgatcccctgcttgatgcggccaaatcgaacttgttaaaagtcctcacattgtctacgaaacagtagaacaagagaagacctaactcctaaggaaattgccactgaagcctcagagttcagacacggaagcgcggtcaccaaatctctgttctgaagtgtctcaactgccagctcaaaattgatgcttggtgcctctagtctactgctcattgctcacagagtcacaggtgtaggaagtttcagaagtgcggcttcgaagactgcatttgattttgactgagttgctgcctatatgacaatcaaagctgcacaggctccgaagtggctgtgatgtgttcttaaagagtcgcatcagcgcaggaagagcccagattttgaagttcatgtgtagctaaatttcgatataagcttgaacggcttcccttagctgatgtatataaataaatatactccaacttgaggtgtactccaagttgagcatgtgcaagttataggttcagtgttccagagcaacttatggttctgtgcggtgaaactaacagcatctaaacctcaaatttggcagcaatttcactttggagtcaaaagggcgtcctacgagtgtataaaaatggagacgttaactgattaaca

SEQ ID NO: 3049 - DNA, 1332 bp, Zea Mays
agagactccactgcacagacctactgagctctctcctcttctcaaccattcaccagtaaacgaatccaccgaccaccactcccaggagcagggtattccgactttgattacatggagccaaggaggagatgaggtgttcctggaaggatcgtgggataactggacatcgaggagggcacttgagagatctggaaaagatcacgccgtcttgttggttctgccatccggagtctaccattaccggatcatcgtggacggggagctgaggtacatccctgaactacctcacgcagctgacgaaagagggcgagtggccaacgtcctcgatgtccatgtcagtaagaatggcattattcaaacctgtgacagttttaaacagcaaagacaagcaaattaccatctctcattctcgtctgtgttctttggacaggactacgtgccagaaagcctcgacagcgtagccgagttcgaagcgcccccgtctcccgtgcacagctacgacctgcattgcccgggcgacgaggagttcgccaaggagccgcccacgctcccgccccagcttctcgtgtccgtcctcgggggggacgtcgatagcgctggccatggcaatcaagctttgaagccacagcacgtcgtcctcgaccacctgttcatcgagaaagggtgggggtcgcagtcgctgctcgccctcggcgtcacccaccggtttgagtccaagtacgtgagctttgtgctctacaagccgttggagaggtgatggtggtactgtctactagctgtgtgtgagtggaagaacagagtggactgctggaggtgaataatgtgtgtgtgtgcccttgtatagaagggaaatgcatgcaggagcttgtagctgtagctgatcttttattttatttttttattttcctttcactttcgacgaaagtaataaattagttgaccatgcatgcatgcttcgtgcaaatctgaatgtttgtgtggtctgaatgcgtgcagatatccggactttgttctgatgtggagacaccatgggaaaaaagaaaaaaaaaggaaaataacgacaccagcaaatcagtggataaagcggatttgtcgatttgatggaggcggtagttaactaggacaggtaaagaaaatgatggatgcccgctgatgtcgatgttcaccaaagggacgatagataacgtcgtgcgatcacgagctgcctggatttgtcaaaaagcttgacagcgactaggggaggaaatggtctttttctctcgattttttggagtccgaattcgtttttatgaatgatttccatggggtgtctgtatgtagattcgattccga

SEQ ID NO: 3050 - DNA, 1096 bp, Zea Mays
cctcttctcctcctcctccccctccctgtctcgctcgcgtcgcccctccactgcacccgcctctctccctcctctcatggtcatcatggccggtgcctccgaccgccgccgccaccaccaccacgaccaccacacagccacggccaagcccgctccccccgccgcggcgtctccgtccccgacgccggctcccgccaaccgcacccgcctccacgacttcgccttcccgacgcaaagctggggcgcgcaccgcctcctccgctgctccaaggacgtcggcggccctgcgtccccgccgccgcacccgcagacgccgtcgccggacaaggagaagcaccagcaggcctcctcccccggcgccgcggccgcgtcgcagcccccgcgcccctggaacctccgcacccgccgctctcccaccgccgcgccgctcgcgtcgagatcggacgccgcggcgccggcgggcggagcgcagccgccgcagctccagtcgccgcccccgccggccgcgcccacgaagagggccttctccgccgcgctcagcagggacgagatcgccgaggacttcgccaccatccgcggaacccgcccgccgcgccggcccaagaagcgcccgcgcgccgtgcagcgccagctcgacatgctgtacccggggctgtctctcgccgacgtcaatctggactcgtacaagatcgaggagaggtgatcggcgccctgctgctgctgctgctgcaaatcggaggagcttttcagatgtttccagctgtccctttcttggtgcgatggctaacatcgccatcccatggttcttctagttcctgtggattaggatgccgaacgcttgatttccagtgctaatctgtacagggagtcctgctattaagtatatgataaattagttatggggccgcttggtcatgctcgtgcttccttatctgatgttgagtctggggtattatggttctggtaggattggccgattgggtaatgtcctttggccatgagaagctgtcatgggattgtacatggttctaatctatgaaatgttcctgtttctctcattcaaaattccaacaagtaaagtgctgattgaatggca

SEQ ID NO: 3051 - DNA, 1481 bp, Zea Mays
gtccgaccttgtcacctcgatgttaattacctgtatgatggagggtgcagtggccagtactggacccagtcttccagagggttcgcgtagtgcttcaggaacgacctggccctgctgatcccgtcccttgagctcgtgtcatacctgacaggccttccgatgtcggtcgatgcaaacagctccttgtgctctggcgagagctggaagaactccgaggcggcctcgaatgcgcctgccatgacggagttgctgacgccgtggttcaccacctgtcaatcggcaccacaaggatatggtagcgtattgatcagcattggcactgaagcatcacaccagaatccgaggtttgcacaacatggagtttgttgacttgatcactggtgagttgccgcttaaagttccatggtaagtaagctggtcagcttgggtcacagcgtgagctgcatgggtgactgacacttgttttaaagggcacacaggacacgtgtgtctttgtttttttttcccctagagaatactcatggctggctgaggctggctggctgactgagttcactgtgactgtcagcgaacaagtgttgggaggacacggacagagcaacagacaagcagcacgcactgacctggaagcagccctgctcgcggcacgctctggtaatgtcctggatggcgagcgcccgcgtggccgggtccttcccgagcctgccaaggttgatgaccggcagctgccgcggcgagggcgaggacgaggacggcgccgtccgctgcacctggcccgccatggatgctgacttttaggtgccaccaccacgacgacgacgacgaggatgatgcaaaagcgctgggaagggaagatttcggtccaggagcaggccgcggggcccccgtccgtgcgggcgcgggcgcgcgcgtgcgtccaggtgaacaagatctttcccccaggaggcagatcgccccggttcctttcgcttggcagtggtcaccagctgtggagtgggcatatttttctgttattctcgcgccaagttgcgcttgcgccgtgcgtgtctctgcgtgtgtggctgacggctgaacgcgcccgcatctgggctgggctcccagataatgcttgtttttgcgccgggggttccgctgaatccacggcgacagccgactggggatggggaacgggaggtttccggtttcggctgcccggagctgacgacaacgatgggcgggggggggacacccgtctacgtgctgcgaactgcgaaactgacttctttttcgcgtggcggactggcagcaccttttgttttgtttttctgtggcttccaactgaggcgaagtgcatttagagcttatctgagagtaagaattgcaggagatcggaagactaaaatctactttctatttaatttgaatacgaagaggattttaatcccctcagtccttgtttggtaggaattgaaaggcaatccctcaatatcatttaatccctt

SEQ ID NO: 3052 - DNA, 1804 bp, Zea Mays
caggattgtgaggaagccatagtcggaatgaggagccagtccgaccttgtcacctcgatgttaattacctgtatgatggagggtgcagtggccagtactggacccagtcttccagagggttcgcgtagtgcttcaggaacgacctggccctgctgatcccgtcccttgagctcgtgtcatacctgacaggccttccgatgtcggtcgatgcaaacagctccttgtgctctggcgagagctggaagaactccgaggcggcctcgaatgcgcctgccatgacggagttgctgacgccgtggttcaccacctgtcaatcggcaccacaaggatatggtagcgtattgatcagcattggcactgaagcatcacaccagaatccgaggtttgcacaacatggagtttgttgacttgatcactggtgagttgccgcttaaagttccatggtaagtaagctggtcagcttgggtcacagcgtgagctgcatgggtgactgacacttgttttaaagggcacacaggacacgtgtgtctttgtttttttttcccctagagaatactcatggctggctgaggctggctggctgactgagttcactgtgactgtcagcgaacaagtgttgggaggacacggacagagcaacagacaagcagcacgcactgacctggaagcagccctgctcgcggcacgctctggtaatgtcctggatggcgagcgcccgcgtggccgggtccttcccgagcctgccaaggttgatgaccggcagctgccgcggcgagggcgaggacgaggacggcgccgtccgctgcacctggcccgccatggatgctggtaagaagcagaccggcatgcctcgtcgtgaacctccaagccagcaaagcagttccctagtcagtgtagctctggagatggagaagctcggtgcagtggtgtgcatgccaccaggcgacggacgtacctatttataggctctgctttgctgaatgtgcagcgaaaaggcagcagccgatggggactgccagtgcccactggccacagtggagtggacaccccctcccccccttttttttcttcttgtctctgcaagctgaccctgggcaaataccttgtacgtagacttttaggtgccaccaccacgacgacgacgacgaggatgatgcaaaagcgctgggaagggaagatttcggtccaggagcaggccgcggggcccccgtccgtgcgggcgcgggcgcgcgcgtgcgtccaggtgaacaagatctttcccccaggaggcagatcgccccggttcctttcgcttggcagtggtcaccagctgtggagtgggcatatttttctgttattctcgcgccaagttgcgcttgcgccgtgcgtgtctctgcgtgtgtggctgacggctgaacgcgcccgcatctgggctgggctcccagataatgcttgtttttgcgccgggggttccgctgaatccacggcgacagccgactggggatggggaacgggaggtttccggtttcggctgcccggagctgacgacaacgatgggcgggggggggacacccgtctacgtgctgcgaactgcgaaactgacttctttttcgcgtggcggactggcagcaccttttgttttgtttttctgtggcttccaactgaggcgaagtgcatttagagcttatctgagagtaagaattgcaggagatcggaagactaaaatctactttctatttaatttgaatacgaagaggattttaatcccctcagtccttgtttggtaggaattgaaaggcaatccctcaatatcatttaatccctt

SEQ ID NO: 3053 - DNA, 2867 bp, Zea Mays
cctagacgctcatgggccggttctgccttatctccctccctcctagtcctaccacttcctcattccccacgtactctctcggctgctcgcttatggcgatcgaagctgcgcgcctctcaccgtccatcgccgccgccgccttcctcgccagccgcccccctcttgccctccgcccgttctcccttcgtcgcaggtttcccctcctccgcgtcctcgccaactcatcgggaggggacggacgcgtcgtcgctctgtcctcgtctgagctccgaaagcgccgaggcctgtcttcctcctctggggctgcggactccgcatctgacggggatgagaagctacgctcgcttcgtcgactcttcgcgcggcccgacgttgctattgacgcctacatcgtcccttcacaggacgcccaccagagcgaattcattgcagaatgcttcacgaggcgtgcctatctgactgggttcactggcagtgctggtacagctgtggtcacaaaaaataaggctgctctctggactgatggccgttattttcttcaggcagagaaggaattgagccaccactggacactcatgcgcagtgggaatcatggtgttccaactactagtgagtggttgaatgatgttttaccatctggttgccgagttggtattgatccgtttcttttctcatttgatgctgctgaagaactgaaggattcaatcgccaataagaatcatgagttagttttggttcagggcatgaacctagttgatgagatatggggagatgcaaggccaaatcccccaaaagaaccaactagggtgcatgacatcaaatatgctggtattgatgtgccatcaaagttgtccttcattaggtcacaacttgctgaaaatgggtgtgatgctgtggtaatttcaatgctcgatgaagttgcttggttgttgaacatgagaggaagtgatgtcccacattcaccagtattttatagctacctcattgtggaggttagcactgctacactatttgtagacaacagcaaagtttctaaagatgttctggagcaccttgagcaagctggtgtgaaacttaagccatatgaagcaattatttctgaagtagaaagaaaaaagatcttgcgacaattcaatagggaaaatataatttttgcaatgttgctgttgatcaaaacattgatcgctttgtcaagactggcagagaaaggtgcaaagctctggttggattcttcaagcgtgaatgcagccataattactgcatttaaatcaagttgtgacatgaaaaagaaaggaaaagcaggtgaagaagttggagaaaaagaagcatcttcaaacgaccggataactggagatcctagtgtccacaatggagtcataagtgctgtatacaatgtttcaccggttgcacttgccaagtcagttaaaaatgatgcagaaattgagggaatgaagaattcacacttaagagatgctgctgctttagcagaattctggtgctggctggaggaggaaatctgtaaaagtgtgccccttacagaggtgcaaattgctgaaaagcttcttgagtttcgtcaaaagcaagatggatttatcgagacaagcttcgacactataagtggttatggtgcaaatggtgctataatacactacagaccaaccccagagagctgcagctctgtaggaagtgacaatctgtttttgttagatagtggtgctcaatacattgatggaactactgacataaccagaacagtgcattttggtgaggcttccccaaggcaaaaggaatgcttcaccagagttttgcagggccatatagctctcgatcaagcagtgttccctgagagaactccaggctttgtgctagatgttctggcacggtcatctctgtggaagattggactggattatagacatggcacaggccatggagttggagctgcgctaaatgtccacgagggacctcagagcattagctatcgatatgggaatttgacagccttacagaagggcatgattgtcagcaacgagcctggttattatgaggacaactcatttggcattcgtatcgagaatttacttctggtaaaggagcttaatctggcaaattcgttcggtggaatttcataccttggttttgagaaactaacctttgttccaattcagagcaagcttattgagtcatccttgatgtcaccttcggagatcaattgggtcaatgattaccacgaagaagtctgggaaaaggtttcccctttgttgagtggccattctcgcgactggttatggaagaacactcgacctcttttagatgtgtaataataactcaacgcacagcacggcttgactgcgtaagtgaaagaaatgaacagacatgtttggctggagcatctcttgaagatctgatggccttcaatggaatgcaactatatggcagtaaacagaggcaagacaatagatgcgtaggctggccagggttcagcggatgataggttgaggctggtgtatttgacatccagccaatttggtgcaacacttgaaaaatgaattacatgcaagccttttctatttattacactatcgacgacaccgtccattgtttgatgaatttattatttattacatttggtacctttttttatacaaaaaaacatctttttagagtgatgaagccatttgagaccatggtttcgtatatggaatcagtcagattcttagggtgctcttggtagggctatggcgaaaacaatttgagctatgatttttgtggtgaattatgatggagctgaagctattttgaagaaaacgattgataaaatagtttggtgacttggcgttactattaaaaaagactgaaatatccat

SEQ ID NO: 3054 - DNA, 1060 bp, Zea Mays
aggtttcctttccaccaccgctactccgctaggttcagcagcggcaccagtcggctgagcggatctccggtgaggttgagggatcagggatggcgaacggcggcggctacgtgtgggcccttgcggcgggcttcaacgccgcgctcgccgccatctccgccaaattcatcgccactctggtaccgcgccagtgcgccaccaacctacccctacctccctctatcgctcgccctccgtacacgatccgagattccttttttgctctcggcttcggagcttcgagttagtcaatgattttggatgatgagtttggggccatcgactagtttcctaaatccggaagtttgtgtaggaggatttgaccgtaggcttcactgaacacaaattggagcaccgatagaaattccgcaaatgcgtcatgacgtatttgaaaagggaattcagtcggtttttatgattggctacagtattaactttggtttgtgacgaatagctcactagtttgcactttactcagtggtcctctccatgcttatagtgaaaacgaggtacacgagaatctgtgcatcaaaatagcaggggaaagagggggtattcctcctatgggccaacaaccagcacaatatcaacttgttagtatggagttcacaattgaaacctttcttgctagagtttatcttgaacaagagatgaaaaatgtcatccattcaggaaaagggaaaacaagcatgcgcaccaatggaaacacaaagataactctttcttagtaatgtgccaatgctttcagtttactctgtcgcttactctgatcggatctaacgcagccgctcaaatatggcacggtgatacttttcaacgtgacaatgtgggggtgctacgtcaacagcctcaaagctttgtcgtccctccaggcaacagtcacaaacttcgccgccaacttcctctcgtctgggcttgcagggtatttcctgttcgaggagccgctgccttctaaggaaagagtaacacgctggaacagctaattgctagacagcaagaacaatgtagcgcactagcttgc

SEQ ID NO: 3055 - DNA, 3700 bp, Zea Mays
attcgatttctacacctccagagcactcactctcctggcaaaccccttcgtctcccaaccctagagagcagcagcagctaccgcagcccctgccatggcgccgagctccccgtcacccgccgcgcccacacgcgtctctgggcggaagcgcgccgccaaggccgaggagatccaccagaacaaggaggaggaggaggaggaggaggaggtcgtggcggcgtcctccgccaagcgcagccgcaaggcggcatcttctgggaagaagcccaagtcgccccccaagcaggccaagccggggaggaagaagaagggggatgccgagatgaaggagcccgtggaggacgacgtgtgcgccgaggagcccgacgaggaggagttggccatgggcgaggaggaggccgaggagcaggccatgcgggaggaggtggttgcggtcgcggcggggtcacccgggaagaagagggtggggagaaggaacgccgccgccgccgccggcgaccacgagccggagttcatcggcagccctgttgccgcggacgaggcgcgcagcaactggcccaagcgctacggccgcagcactgccgcaaagaaaccggatgaggaggaagagctcaaggccagatgtcactaccggagcgctaaggtggacaacgtcgtctactgccttggggatgacgtctatgtcaaggctggagaaaacgaggcagattacattggccgcattactgaattttttgaggggactgaccagtgtcactattttacttgccgttggttcttccgagcagaggacacggttatcaattctttggtgtccataagtgtggatggccacaagcatgaccctagacgtgtttttctttctgaggaaaagaacgacaatgtgcttgattgcattatctccaaggtcaagatagtccatgttgatccaaatatggatccaaaagccaaggctcagctgatagagagttgcgacctatactatgacatgtcttactctgttgcatattctacatttgctaatatctcgtctgacagtgataccgcttcgggtatttcttctgatgatgtggatctggagacgtcatctagtatgccaacgaggacagcaacccttcttgatctgtattctggctgtgggggcatgtctactggtctttgcttgggtgcagctctttctggcttgaaacttgaaactcgatgggctgttgatttcaacagttttgcgtgccaaagtttaaaatataatcatccacagactgaggtgcgaaatgagaaagccgatgagtttcttgccctccttaaggaatgggcagttctatgcaaaaaatatgtccaagatgtggattcaaatttagcaagctcagaggatcaagcggatgaagacagccctcttgacaaggacgaatttgttgtagagaagcttgtcgggatatgttatggtggcagtgacagggaaaatggcatctattttaaggtccagtgggaaggatacggccctgaggaggatacatgggaaccgattgataacttgagtgactgcccgcagaaaattagagattttgtacaagaagggcacaaaagaaagattctcccactgcctggtgatgttgatgtcatttgtggaggcccaccatgccaaggtatcagtgggtttaatcggtacagaaaccgtgatgagccactcaaagatgagaaaaacaaacaaatggaaaatatgctttgagctgccttgttgctatgaagtaccaagcgcggcttggaatgatggtggctggttgctatggtctgccacagttcaggatgcgtgtgttcctctggggtgctctttcttccatggtgctccctaagtatcctctgcccacctatgatgttgtagtacgtggaggagcccctaatgccttttcgcaatgtatggttgcatatgacgagacacaaaaaccatccctgaaaaaagccttgcttcttggcgatgcaatttcagatttaccaaaggttcaaaatcaccagcctaacgatgtgatggagtatggtggttcccccaagaccgaattccagcgctacattcgactcagtcgtaaagacatgttggattggtccttcggtgagggggctggtccagatgaaggcaagctcttggatcaccagcctttacggcttaacaacgatgattatgagcgggttcaacagattcctgtcaagaagggagccaacttccgcgacctaaagggcgtgagggttggagcaaacaatattgttgagtgggatccagaaatcgagcgtgtgaaactttcatctgggaaaccactggttcctgactatgcaatgtcattcatcaagggcaaatcactcaagccgtttgggcgcctgtggtgggacgagacagttcctacagttgtaaccagagcagagcctcacaaccaggttataattcatccgactcaagcaagggtcctcactatccgggagaacgcaaggttacagggcttccccgattactaccgattgtttggcccgatcaaggagaagtacattcaagtcgggaacgcagtggctgtccctgttgcccgggcactgggctactgtctggggcaagcctacctgggtgaatctgaggggagtgaccctctgtaccagctgcctccaagtttcacctctgttggaggacgcactgcggggcaggcgagggcctctcctgttggcacccctgcaggggaggtagttgagcagtaaaaggatgacagatctgagctgagctgggcaacatccagcggcaggagcatttctggttcggttcgattcgggctcacgagcgcattgtgctgattcgcagggtgcactcgagctcgagtgcggagttgttgtaatgtaggttgaggtttcaaaacatccatccatccatcggccccgcctatttgtggatggtgtttctcgtgccattttagttcagctgtattgatgcttcgtcatgtatgtgtattgtaccattcgttcttgttacctactagtaaggcaacatttgatccatgttcaacgcgagcaaaattccatccactttaggtactgagatgctcaagtagttcagtcatcaggtaacatttacaacctattattttgcctggtattatctgaaaacgatttgctgaggatgttttttttttgaagtaaaggtactgtaggaaggtcctacagtaatattattaaatcaaaagaactaagtttagggagacagaagaatattacaaagaaataaaagggagagtgaggagggggaagaattctggatacatgtatttactctatttcacataaacatatggacatcaacatagatgtgaaggtatctaatctaaataagcgccgacatgctttacaagatagtttgatctataaggtgagggatgttgtggatgaagattgtgaccaactagctcatgtgtagttttgtttgtagtacctgtcctaaaaaatatgtaattctaagtttaatttgaatcagccttgttttttaaaatttttttgaccaagtccgttaaaaagtaataacattttttacttcaaatagatttactatgaaattttgtcttatggttatctaatgacatttatttaaaactgtaacaaaaactggtttggttaggggactgagggagtagtgcttaaaatggaagacgataggagagatcacattagtggtggc

SEQ ID NO: 3056 - DNA, 5273 bp, Zea Mays
ggcccggccaccccagcaggcttgggccgtggtctgctactctgctcgccctctcgcctcacttccactctcacccaccaccgcctttctccttcccccgcgccgatcacgccacggcggccacgccatagggctagggtcggagatccgctcgcccggtgatcgattcgcacctcctcctctacccggatttggaggttagagtaatgaaataaaatgctgctcaaaagcaagtttaagttggccacaaccattggcatcgtgctgtcgatgctatcgctgctcgtgcacctttttattgctaattattcagctgggggcattacaaattacagcatgcacatggacgatatccttccatttggactgaggcctcgaccacggaggctgtggggtccattggtcccactcgatcacttgcatccttttgcgaaacctagcaaaccatatgctgctcccagtaagcataatggttttatttatgcaaagatatatggtggctttgagaagatacagtctacaatctgtgaccttgttgccgttgccaggctattaaatgccactctggttattcctgagatacaagcaacaactcgtgcaaaaggcataagtccgaagttcaaaagcttttcatatatatacgatgaagatcatttcatacatgcactttccagtgatgtggttattgtgcatggcttgccaaaggatctcagagaggctaggaaaaagataaaatttcccacactatctcctaggaattctgctactccagaatactacatcgaagaagtattacccagacttgtaaaatcgaaagttcttgggataattgttaatggaggtaattgtcttcagtcaattctccctgcaagcttggaggaatttcagaagcttagatgcagggtagccttccatgctctaaggttgcgccctcaaattcaggctcttgggagccaaatagtaggaagattgcgagcatctggccgtccttatgtggcctatcacccaggactgcttagagatactctagctttttatggttgcgctgaactgttccaggatattcatacagagcttattcagtatagaaggaatcagatgattaaacgaggaacagtaaaggagcagctagcagttgattcagtgtccaggaagatggctggtttgtgtccactcatgccagaagaggttggacttctacttcaagcagtaggttacccaccaactacaataatattcttggccggttctgagacttttggtggacaaagaatgcttattcctctacgagctatgttcgctaacctagtagaccgcacttcattatgtagtcagagggagctgtttgatttagttgggccagaagatcctcgaaccccagatttgccacagcctccacctcccaaaagtgaaaaacaacttattgaagaatggaggagagcagggcctcgtccaaggccgctgcctccacctcctgcaaggccattctatgcacatgagaaggaaggctggtatggttggattggtgagaatgacacagaaccggatgcttcactgatcgagttcaggaggcaagcacaccagttgctctgggatgcacttgattattttgtttctgttgaagctgatgccttcttccccgggtttcacaatgacggtagtggttggccagactactcaagtttggtcatggggcaccggttgtaccaaacaccttccggtataacctacaggccggacagaaagattattgctgcactgtttgaagatgttaatgatcatcggtatcatccacctcggaattggacaattgctgcacgtgagcacctcaacaggagtgcaaatgtggagggcgtagtgtcatcagctatgttatcaagacctgtatcttttctcgcccaccctttgccagagtgctcttgcagcacatcgaagtcacctgctgttgaaccggtgaaagatagcaatggcagattcctatttggaggtgaggaagagtgtgctggttggatggcacgcagccctgcgatggcgtctgccaggaataatgaacctcaaattgaggactatgaggataatttgcctgaagaaggctctagttcagacatgcaggaatctgacagaagtgactcgaataaatcttcggagcaagatgaggagatggatctggatgattagagatatgtggagcatggatgtatggcacacctttcaaccgctaccagctccaggtccaggctactcgaagacaagcatacatacgctcagaatctcctggacaggtgggaatcatcttgcatcgcgcagcgacacatcagcatctggattagtcccaggatcacaattcacaaggtcatccagcgtgggagcttgcctggaccgtactcggtatacaacaaggctttaatacgaaactaacactttgttcccttcttcattcacgtgtcattttttgtgggtacagccctaagaaactgtttatgtacaaatgtcttaactgggaatacatcattttttttgggtgagtttgatatctaatggcgactatgagctaatgagattggcttatggtggacagatgtgcacctgtatacaggacaacattgcaattgtttgtgagttttattgatcgccgaagagtgtgcttacacggatggagttggttcttctgcatgacctgtgctatggatcagaaaatcgtgtatatctactttggctacacgaaaagtttgtgtttcacatgagaagtttttgagtgaaaaaccttctctgaattcggctggctgctgtagtcggatcaaactgttgcatcttacttgttcttgttcatacagggagtgaacagaatgcatcgctgttcagtatatcgaacgcaggattccaaagtttggacatttcaatgcttgtaataaccagtggcagatcttaaaaaggaggccatgtctcctccccagttttaaaacacacatctttgtcaagctccgccactgcctataactgttaaatacatctcaataatcaacattggccatgagacttgacaaattgagattcttctgtctgccaggtgtaacttccaaaactgtaggtcatcatgctattcatttcaatctcttctcatcccaagagcatcaagtgtatgttgctgctttgtgtgaggaccgaattgaaaatggtgtgccacttatacaaatctggatgggtatgcttgctgtcttagatgtcaaaagtgagcttctcgttgttcatggcagctgctacaacacaatggcactataggaaaactgaatataggaacacgctactcgtcgaacacaaagttaggatcctcaacaacaaatacaaaggggtgagtgtagtagtgacacatagaagagacatgccgggcgcggcacaacaaaggtggtcaaaagtgattgtatgagcacataagctccgtgaccacgggatacgttacaggtggagacagtcgtcccgcagtcaacagtcaccacctgaactgaacctgatgcggaggcggtggtgcggcggcccccggttttggcattgggcaggcacggacggagacaaatccgcggcacggacggagagacggctgcaccgccccacacccacccttttccgcgcccgcgaagaaaacgaaggcagtggaacccgaagcggaggggccagaaagcgacccgaccgtctctccgctccctccctcccccacaccacccacctgtgatctcccgcgcgggagatccgcccgccccatggcgccgtcgcgcccgctcatgcgggggatccgcccgccgcgcgtcttcccgacccgcggcggccgcgcctcgccgtacgctgtcgccctcacggccctgctcctcgtctccgccgccctcctcgcgctcatcgccttcggcgtcttctcgctccccgtgtcagcgccgaacgccgccgccaccaccacagccggaggggagaccgaatccgccgacacccgccccgcgcgcccccgcgcccgccgggacctgggggaggggctgggagagcgcggcgcgcagtggaccgaggtcatctcgtgggagccaagggcattcgtctaccacaacttcctgtctaaggaagagtgtgaatacctaattggattggccaagcctcacatggtaaaatcaacagttgtcgacagcactactggtaaaagcaaggacagcagggtccggacaagttcgggcatgtttcttcaaagaggaagggacaaggttattcgagtaattgaaaagaggattgcagactataccttcatacctgtagatcatggagagggactccaagtactgcattatgaagtcgggcagaagtatgagcctcactttgattattttcttgatgagtttaacaccaagaatggtggtcagaggatggctactcttctgatgtatctatcagatgttgaagaagggggcgagactattttccctgatgcaaatgtgaacgtcagttctttaccatggtacaatgagctttcagagtgtgccaagagaggcctttctgtcaaaccaaagatgggagatgcacttcttttctggagcatgaaaccagatgccaccctggacccattaagtttgcatgggggttgtcctgtgattagaggaaataaatggtcgtcaaccaagtggatgcatatccacgagtacaaagcttgagccttcaagactcgagagtcgagcgtaccaaagatggatctctatgcatgtgacttggggctgtctactgggttgacacccatgtatgctttacagacccactgaagctgtattctttgctcctttgttggaggggggagaattgcagataataggggccaataagcaggggccttgctcatccctgcagtatttttgggtctgatccttgctgacttggcttttgtcttttcttttctttttcttaccttgccgtaccccagctatagaggaatggtgtagtgtctgggggcatagagtttgagattttgttttgtgccacacctgtgttactagtataagctttggtactaatgaataacgaggcctaagctcacatctactacatgaatggtgtaatattgttgaagatagaaagcatctaatgttcggtggttttcgttatggtttcggttattacgacacaagattattgtgacaaaaagtgtgttttgagagataatagagctcacatctagtacatgaatgttgtattactgtttaatgatgacacgagattatttgataattatgactgaaagtcgcctagag

SEQ ID NO: 3057 - DNA, 1243 bp, Zea Mays
attgcagtagtacgccatctgcgtgcggtcgtgtggaactgtagtgctggacatcctcgccttccagccttctcgaaaatcgaaaccctagaccgcgcgccccctcgccctccggccttccacgtccgatccgatccaaaatgcataagctaggcagaggaagccgggacaaggtgcaacagttcatggcaattaccggcgcaaggctcttaaagctagtgattggcacttggaaggagcttttgatgttttctacagccagccacaaattgctgttgctaatactcgacatctggaagagctctacaacagatataaagaaccagatgctgatatgataatggtggaaggcatatcacagatctgcaatgatttacaggtggatcctcaggatattgttatgcttgtcatatcgtggcatatgaaagcttccactatgtgtgaattcactcgccaggagttcattggtggactgcagtcaataggagtggattcaatagagaagcttcaggcgaagttaccttcattgcgagctgagcttaaagatgatcagaagttccatgaaatatacaactttgcatttgcctgggcaagggagaagggccagaaatctctcgcattggagactgctattggcatgtggcagttgctatttgctgaaaggagctggcctctcattgactactggtgccaatttctacaggtaaggcataataaagcaatctccagggatacatgggcacagttattggagtttgttaagacaattgatcctcagctaaccaactatgacgaagaaggtgcttggccctacctaatcgatgaatttgtggactacttgaaagagaacggtcttgcctagcatagaaggtgtacggaattgggctgtaggggggagaatttgtcacccacaaggccaccatcattgtataacttaatggtcggatgcttgtattcattgcactaccaatagctaatgcggctcgtgcgtctggggatggagtttatcctctatatagacaaaacttgttgaatgatgtgggtgtaaaacgaaggctagaatggaagtcaagccctggttatcgccattttgaattcctcatcacgtgcctcgcctacgtcattgtgactttgccatcctgagctcgttgcttgaatgatcttgagtattactgcccccgttcgcttatatttatcgctgtttgaactaagcagcgtcaaaatcaaaaaaaaataaaaaatc

SEQ ID NO: 3058 - DNA, 1909 bp, Zea Mays
gccggtgcttcgaaactgacggtcggatgcccggtacggtgtggtgctacagagaaaccagccgcgcacaagaacccctgcgacgggcagcaaagcattccttgccggagtgagctggcagaacccgcctctcctattggccaggccacggcaccacccactaaactgccactctgccaggaacgaggaagcttccttcctgtccttcctcgcgaagcaagacacagataagagagtccactataaagcaacacagctgcgatcatagcgacaaaatatctcgccgttcccatggacatcgacctcttccccgacatcgaccttgacgccctcctcgcctccttctccggcgaccccgctcggggaggtggcgctctcggagatcgagaggctcctgatgcaggagggggaggcggaactgggcggggaggtcgatgggatcagcgtggaccagttcttcgacgcgctgtacgacggcgaggaggcgaaaggtgagcgggaggcgggggcaagcgcggatgtggactccggcagggacgatgtgctggaagtcgtgacgccagaggcggggacggtggaggtggatggcgatgatcccatcagcaagaagaagatgaggtacgttgttagcgcagttgcgctggacatacgaaggttctttcctcttcgcttgagaaattgatcgaggggagttgtgtcctcatgcttgctagtgaaatttaggagctactacctggcagttagggatgggacagaccctaggtttgggtgggtttttggagatgggaatacttaaaactccttggtatttgtgttgttgtgaactctaccgaatggaagaaatatctgcgagtgaataactgctatatacatgcacaaatgcttactttggtttcaaactgctacgtcgaaatttggtcagcggacgggaggaatctgattcatgaattcaagatgctttttttctccttacattttttctttctgtctagttaggtattttttctcctgtataaaacctacttgccttgcgaatttatcaggctaatgaatgaggaacagaaggaatatgactcacgaattcaagatgcttttttttctccttttccttttacgcttttgctttctaagtctagttaggcaatttatctcctgtataagaccaacccaccttgtgaacttatcaggcaaatgaggaacagagattccgccatgaaatccagggagaggaagaagtcgtacataaaggacttggagacaaagagcaagcacttggaggcagagtgccgtcgcctcagctacgcacttcagtgctacgcagctgaaaacatggcactgcgccagagcttgctgaaggataggcctcttggtgctcccacagccacgcaggagtctgccgtactcacggaaaccctgccgctggtttccctgctttggctggtgagcatcgtctgcctgttcctgatgcccgttctgcccaaccgaagcccagctgctccaagcagcggcggaagagacctcgtgatggcagccggaaagacaagcagtgagaccccagagatactggaactcatcctccatggaaggcgttgcaagagcacgagggcgaagattaagctatgtattttaccatttcatgcaggagctgcttgctagtagttgctaggctttgagcctcttgcaagcttacctctatatgtagtgtacccgcaaatcttaccgtgctcgctatgcgcctgtcttgcagagaagcctgtcgatatccatggagtagtaccttttttttgtttaatagctcctgtgctacccagaatatgtttaaaatctggattttgtgttattttctatttcttcaccttatctctagttgctcctgatataaagttccttcgctcgaaaaatcttagga

SEQ ID NO: 3059 - DNA, 4406 bp, Zea Mays
  misc_feature (4405)..(4406): n is a, c, g, or t
cgcggggccacacgagacggagcaatcgaatcacgggcgagctcgacggtcggtgcaggcagctgcacccagtccggctccggcccgtgcccgtcacgactcacgcgagacagcgaaacttttcccagcggcgaagcggagatcggagaaggaaccccaccctgcccagtgagatcttctcctagcagccgcaatctctcctccctcggcgcggaggacgagcagcgctgtagattcgatcgtgtgtgctcccgagatggcgatcgggtcggactaagccgaagcgaaagcgagagccgctgcccccgtcgtcactcgatgaccaggcggacgggtgggtgcgccggcggcttcctgctgccgttgctgctcctggcagcttctttacttgattggagcttggtttctcttattaatatggtcatcttctttgctattcgatttgctgttccaagaagaggtctttacacctggaggctgcacattgtattgtggtgtacaattatttactcagtccttgctattttagcacaagttgcgtttcatataatctggtacattgagggcaagggatggtctgtggctcattcttggtgggcgaagctggtgggtttagcaagggaccagccatgggaatcaccatcagttatctattttcttgcattacagctatctgctgcaggccttgctttggtcgaagtccttggaggaaggcttcaagattcttgctggttgaacttctcttttgaggttgagcaaataggttaccatttgcgggtagcatgctgcttattactgcctgctgctcagttagttgtcggtattagccatccttcatggatttcattaccgttctttgtatttagctgcattggccttgtggattggtccttaacaagtaactttcttggccttttccgaatggcctgagctgtcttctggaatttctcttctggtatattatttcatgttgtcatcagcgaaacgagacatacaggaaatgggttcacttatatctctagaaaatgatagcttaacagaggaccttctgccttctagaaatgcgtttttggtccgccaatctcgatctggcagaaggcatggaaacatattactgagaggatcagttttccgaactttcagcattaatttcttcacttatggattcccggtcttgctgcttgccctttccttctggagtttcaacttcactagtatttgtgcttttggtctcctagcatacgttgggtacattttatatgcttttccttctttgttccaaatgcatcggctgaattggtcacttctagtgttcattctgctttgggcagccagcacatatgtcttcaatgtggcattcacattcttcaacaaaagatttcaaaaggatatgatgatttgggagactgttgggctttggcactattctattcctggattatttttacttgcccaattctgccttggagtttttgtggcactgtgtaatcttgttaacaattctgtttttctttacttgacttctgaagggggtccttcaacaagtgatgatcacctcattgatggactgttctttacagagaaggaagatacaatggttctgattgtagcaacaatagcatggggtctacgcaaactttcacgtgcaattactttaacattactctttctacttgtgatgaaacgaggatttattcatgctgtttacatgtgctttttcttggtgtttctggtgaatcattcaatcgacaagagactgcgccagatcttagtattgttttgtgaggttcatttttcgatactgtacattctccagcttgatctagtgtccagtgctctggagcgcagtggttcattaacaatggaggtactctcacagttaggtctctcaaataatgctacagcaaaggatttcatggagataggctcaatagtttgcttctgtgctgtgcatagccatggttttaagatgcttttttcattatcggcggttcttcggcatacaccttgtccacctgttggattcactattctaaaggctggtttgaacaagtcagttctactgtcagtttatagctcgcaaaattcacgagacggtgaagaccaccgtaatttacatgagaaaaaaatcgcatcatatctgagtaaaattggtcagaaatttctcttagtgtaccgctcatatggaacttatgtggcttttctcacaatacttttgactctatacttggtgacccctaattatatatcatttggttacctatttttccttctattttggattattggaaggcagcttgtggagaaaacaaaaaggcgactgtggtttcctctaaaagtatatgctacggttgtttttatttttacctacagcctgagtgtttcaccgatctttgcagaatcagtctcaaagttccttaaactataccctgatctgggatttgaccctgaagcttctttgctggaaaatgtttggcaatcattggccattctagtcgtaatgcaactttacagttatgaacgaagacaaaacagtgacaagaactttggtgtatctgatgcttcagaatctggacttctggggttcctaagaaggtttctaatttggcacagcgacaagatattatcagtttgtgtgttttatgcttgcttatcatcaatcagtttatctggcctaatttacctgttagggcttattgtgttttctacgttaccaaaagtttctcgaattccttccaaggtttaccttgtctacactggtttgcttgctgcatctgaatatctatttcaaatggtgtgcaaacctgcacagatgtgtcctcatcagcacttctatggtttgtctgtgtttcttggtctgaaatactatgattctgggttttggggtatcgaatacaggcttaggggaaaagttttagtgattgtggcctgtaccattcagtataatgttttccattggctagatttgatgccaacatctctagtacataagggtaaatgggaagagccctgtcaactttttatctcttccaacccaccttatagtcctgtcagaagcaacgaagaaagtcattcatctaataggtttacttcattgttttctaaagttcaaggtcttataggtagtagttcaagttcaagctcatcagtgggtccaggcagcattcaccagaaattagagtatgttgataatgccatcgaaggctcagatgaggacaaaagacactcatttgcaaagatttggggattgtcaaaagaaagccacaagtgggacaagaaaagggttatttttctgagaagagaaagattcgaaacccagaagacaacattcaaatgttacatgaaattctggatagaaaatcttttcaaactgcgaggtctggaaattaacatgattgtgttactattagcaagctttacactgttgaatgttgtatcgatcttctatatcatgtgccttgtcctttgcattcttatgaacagagatctaatccagaaattgtggcccctttttgtgtttctgtttgcttctgtcttaatacttgaatatgttgctctttggaatgatgagataacctggtatcatggtaccaatgacattgaagtccattgccgtgagtgctggaagaattcaaggattttttttgactactgctcaaaatgctggcttgggataattgctgatgatcctcgaatgctgattagctactatgttgtgtttatattttcctcttttaagcttcggtctgatcacttttcgagcttctcagactcggacacatatcggcagatgatgtcccaaaggaaaaatgcagtagtatggagggacctctcactggaaacaaaaagcttttggacattccttgactatgtgcggctttatgcctattgccatttattggacatagttttggcactaattgcaattaccggtactctagagtatgatgttctgcaccttggttatctcggatttgctctggttttctttagaatgagacttgaaatcttgaagaagaagaataggattttcaagtttctacggatgtataattttggtctcattgttttgtcacttgcttatcaatctccttatgttgggcaatttagctctggcaagtgcgatcaaattgactacctatatgagataattggattatacaaatatgactatgggtttaagataacatcacggtcagcttttgttgagatagtaatcttcctattggtatctgttcaatcatacatctttagctctagtgagttcgattatgtgtcaagatatcttgaagcagagcaaattggtgccatggtccgtgagcaggaaaaaaaagctttaaagaaaactgagcagctgcatcatcttcgcaggtctgaggagcataaacgtcagcggaatatgcann

SEQ ID NO: 3060 - DNA, 968 bp, Zea Mays
ggtcactggcaaaagcgaaacgtccaagtcaaccaacgaggcaacgacgcgggcaaagcggcataggggaagcgagaagcccaaccaccgagccctcgcctcaaaatccagctgccacgccgagcccaagctcccaatcgccatgaagccggcggcgcggcggccgctgctgctgtgcgcgctggcggcggcggcggcgctctccatcctgctggtcgcgccgccgcctctcgccgcgcacctatcatcactgctcctcgccttcccggcgtcgccctacgcgggcgggcccaagctggtggtcctcctcgccggccagtccaatatggcaggccgcggcctcgcgccgtcgctgctcccgccgcagtttcgcccgcacccgcgcgtgctccgcctcgccgcgtcccgccgctgggtcgtcgccgccccgccgctccacgccgacatcgacacccacaaggcgtgcggtctcggtcccgccatgcccttcgcccaccgtctcctccacgctgcctccccggacctcgtcctgggcctcgtgccctgcgccgtcggcggcaccaggatctggatgtgggccaagggggagcctctctacgaggccgccgtcgcccgggggcgcgccgctgttgccgccggcggaggcaccctcggcgccgtgctctggttccagggggagagcgacaccatcgagctcgacgacgccacggcctacggcggcaggatggagcgcctcgtcaacgatttcagggctgatctcggcatgccgaatctgctcgtcatacagagttctctgaacttcagtttgccgagaggcttcgtgagaatgtccccaagctgctcctctgtcctgatgaacttcacttcaatttggcctgaatttgcatactcccggatcaaatgaaatcttgtatctatatgctttgaccggtcgtgatgcactgggtttttaatcaatgaaatggcag

SEQ ID NO: 3061 - DNA, 2082 bp, Zea Mays
ctgcatccacacacacttgagccccacccgtgccgccgccccgcatcccttagcgctgccgctgccgctgccgctgccgccgcccatgtccgccgccccgccccgccgcgtggtcatctgcggcggcggcgtggtgggcgcgtgcacggcctacttcctcgccacccacgccgcgtcccccaccgtcccgacgctcgtcgagaggtgcgccccggcgtgcgccgcctcggggaaagccggcggcttcctggcgctggactggtgcgactccaccccggcgctctccaggctcgcgcgggcctccttcgcgctgcaccgccgcctggccgacgccctcggcggcgccgacgcctacggcttccgccccgtccacaccctctccgtcctgctccccccgcaccccgccgcctcctcctcgccgccgcacccgctgctcccgccctgggtcgacccctccgcgtccgccgccccgccgagggagcccgggacccccgacaccaccgcgcaggtccacccgggcctcttcaccaaggccgtcctcgccgcgtcgggagccgaggtcgtcatcggcgaggtggagcgcgtcgccgtggcctgggacggccgcgtcgccggcgtcgtggtcaaggggcgcgacggcgtgctggacgccgacgccgtcgtgctcgcgctcggcccgtggtccggccgcctcgaggtggtcagcgaggtgttcgacgtgtccgggctcaaggcgcacagcatcgtgctccggccgcgcgagcccgagaaggtcacgccgcactgcctcttcctcagctaccagccggagcccggcgccaagatgctcgaccccgaggtgtacccgcggcccaccggggaggtgtacatatgtgggatgagcaaggacgagaacccgccagatgacccagcaacgataacaggcgagccagactcgattgcaatgctgcataagatcgcagggaaagtgtccagccagctgaagaaggaggagggcgctgaggtggtcgcggagcaggcgtgctacctgccgtgcaccgccgacgggctgccggtcatcggggagataccaggcgtgaaggggtgctatgtggccacgggccacagctgctggggtatcctcaatggtccggccaccggcgcagccctcgccgagctcatccttgacggcaaggccaagatcgttgatctcgaacctttcagcccggcaaggtttctcaagagaaggagcaggcgtggagtctgacagtgtgaatgttcagattcaagctcgctactgaataaaacactcttgacggacaacttgccaacacccatgatcagattcagatgttcatttagctgaggttgagctcgacaagctgttgcatctgcagctattctacgtacaccatgtctacgcaatgtttccttgtggtcaagtgacacaagtaaccttataaaaaagtgctctttctctccgtatggttcaccacatgcctgtgatctctctcaagctaggtatcatagaagtccgtcatggaattgaagtggtagagtgccttcctttcccagcttctgctcggtgacatctaccagcttccagacacagtagctcagcctgagtgttaacggactcgagcaagaagatgccatccttcagcaagttctgcttcggcataagctgtttgcaagttgctctcgcccacctctgcttcagatggttctgaagaactggctgcctccgtacccccaccagcaggtgcgcctgaatccgtttcttcctgctgtgcctgcgcagtgctaggcggggaaccaggtggcgggttctgttctgccagactaagacgaagcgacctcccttccagctcctgcattgccgttccataaccatgttagccactgcaacagtaaggtcaatgggactcaagtgatatgaactatgaaggtatacactcaagtaaatcgcaattcatgtattcacattgacgaagtgcaattagcatctatattagctaccttgtgtgctctaatttgttgattcagtttgaagtgcccacaggccacagataacaatgccactggatcagttggcatttccat

SEQ ID NO: 3062 - DNA, 980 bp, Zea Mays
agacttccctctaattcccaaattttccagctaccgcctctcctgagtcgccgccccatccatcctcctcgtcgatctgctctagcctccaatcccgcttgggcatcgggcccagccaccctcgcgctagtgctaggctgctaaccatagccagtccttcctcctctcgcgtggccgcgcctgcatccggccacgggccaccgcgcacagccctagccagacaccgtgcacgacccagcctagccgcagcggtggaggcgcgcagccccaccccgccccgcacgaccaaatgaacagccgcaaccagcgaggctaggcccgcaacagcaacgcccttcgctcgccagcaacggcagtgcgtccgacatccttcgctcgcctagttgccctgcagatggccaggaccagcaccactgcggtctgcagcagcgcccctaactgttgaggataagaggaggttgacatgggatgacaagttgacaacctgctaattgcaatgttcaattcactcttcttcaactaccaggaggattgctagcagaattgtttggccgaagaggattgcatggaggcacctggggcctttgtcctccacctcctcaagtgcgtgcttgtcagcggtggtgtggctgcgttcctcgcccttgtgcatctttctcctattacgaccgcgtcctgcgtaatatggatacaatggaagcacttgcggccgagcctagaatagaagaaaaagaatctaagacccgtatagaagcagttgctcaagtattggcttcatcaaaatttattcaaattgttggtcttgtagctgcaaaaaagagaagcaataatgttggtgatgtgacacgtgtacaagcagcaatgttggtcttgtagcatcaagatttggttattgatgaatgatatctatgataaatatatgtgatgatcattgattatagtttaattataatgggttgtgcttcttatgctacattgcc

SEQ ID NO: 3063 - DNA, 1976 bp, Zea Mays
gccgctaattgagcacacgttcgtcttcctccttccgtcccccggcgtccttatccccacacaagcgccgcttaccgccgggacaggactgttggaagtccccagacggcagcgatggcggaactatcgacatcttcggatggattggtggacgaagaagcgaggcagcaggaaccaggttcaatttggcaagggatgctcctgtagtcctgttctctttggcttttatatgctaattgcttgtgctgctaaccgttagggtttcatcgccttgcctgttcgaagggttaggggttcctactgtccaaattcacctgatccaacctcgtccgttcataccgtttcctgatacgtactacaccacatcccggagatgtgttcactttcaattttgaaggcctgtactgtactgtaccctagttactaaaccttgggtttccctcgtctctcgcttcatttaggatacgtacgacgcttaagtcattcagatcggctaacctatccggtggaatgagtactgtctgcgaatctacatcatgcctttgtgaattttccttcaactttagtagtattattaaattatacccgttttgagcccatacgcttaaaagaggggaaacagtaatattatagctttaacgaacacacgattggagtgtcaagcatggatcatatttcctctgttcctgtttatatagtaccatccgtgatgccgttatagtatttatggaagtcaaactttttttgctggactgcatacaggacaaggaagcgctgaaggtagccatggtctgcaagacacaaaggagcaggacataaaaaagggaaaggcggctcttgtttccactgaactgctgagggaggatctggttcagagtgctgttagttttctgaaacacccgaaagtagtagcctcttcagatggacagaggcgatctttccttgtaaataaaggactcaccatggatgaaatagatgaagcatttcgacgtctacaaagcccgtcatcgaattctgcgagctcaaatatgtgcacatctcaaggggtgtttgatcattcatgcaggattactgagcaggaaattaaagtcgatagaaagtgtatgaatggtttagtcattttggctttttaggtatgtagattttgctgtgcacctaactctaagcctagacacatagtaaaaacaatatatctagaaaagccaaaatgacttacaatttgaaaaaggagggagtactttcatttatagagagggtggaacctgaagctggacctgtggcccctgtggtacctcgtcatccaaaatcatatatggagatcatggaaatgatacaaaggggtgagcggccagacgatatacaggatattaacgatgaccctccaaatcctgatcaaccaatctcagaacctcgtatggcaccgaaaccaaagccatgggaaaagcaaggtcaagggagtttggcctgtgatttgaaatcgctgccaagggaatccgacgtgctgaggtcagaagttcagcacgacgacggcaccaaccaggttacggagtccgccgatggcgccaaccaagcggactcattgctgcaggcaggcgtagctgctggatctgaatctcctggggttccagatgacgccgcttcttcgcttgagtaaccaccgcgaaaataaatgaatgacgccgtaatcagacgcgaaaacaaacgacctcattaccacaacactgttctgatatttttgggtcctgagagagccacttgagttcacaataaatgtagtacccatcactggatgatcttttttagttgctggaaccatatgatatgagcattgttggcacttgctctcagcagcaaggaagccaacaagggtgaacggtggtgacaacagggttacgcgcacgggggcaatagctctgttgatctagcctctcacgggcactgtgcgggggtatttataggtatctgagtgcccagcg

SEQ ID NO: 3064 - DNA, 2340 bp, Zea Mays
atgaaagaaggggaagaactcaatactgacaaaatacactactcgctgcgaatgaatgaaaggaagaactcaatactgacaaaatacactactcgctgcgaaatgcgagtgaatgaaaggaaagtgaatgaaaggaagaactcgatgctgacaaaatacacactctcgctgcgaatgaatggaaggaaaacgaatgaagggaagaactcgatgctgacaaaatacactcgctgggaatggatgaaaggaagaactcattttcagctcattattataagctgtcctcgctattacgagggggaaacaaaaacaaaacgaaaaatagggacacgccacatcatcgccatcctcatttcgtcctgttatctcgtagctccacagtccacacccaccatcccgttctccctctcttctcctctccaaggtccctgccacccacacaaggcttggactcttgggccggccgggggggaagaagacaagacaaacgcagccgccggcatgatggcgatctgcagcgcgcacaccaccaccatctccctgcgctccccatgcacgacgaccgtctcgaacgcggcagctggcttggtgcagaagcaagtcatcttcttgaccagcatcaacaggaggagcggcagcagaaggcgtggaggaggggtgagcaggaccttactccaggtctcgtgctccgccgacggcaacaagccagtggtgatcggcctggcggcggactccgggtgcggcaagagcaccttcatgcgccggctcaccagcgtcttcggcggcgccgcggagccgcccaggggcgggaacccggactccaacacgctcatcagcgacaccacgaccgtgatatgcctcgacgactaccactccctggacaggaccggcaggaaggagaagggcgtcaccgcgctcgacccgagggccaacaacttcgacctcatgtacgagcaggtgaaggcgatcaagcaaggccaggcggtccagaagcccatctacaaccacgtcaccggcctcctcgacccgccggagcttatcacgccgcccaagatctttgtcatcgaaggttcgacgagcgtgtgagggacctcttagacttcagcatctacttggacatcagtgatgaggttaagtttgcatggaaaatccagcgggacatggcagagcgtgggcacagccttgaaagcatcaaggccagcatcgaagccaggaaaccagatttcgatgcatatattgatccgcagaagcagtacgctgacgccgtgatcgaagttctgccgacccagttgatccccgacgacgacgaagggaaggttctgcgagtcaagctgatcatgaaagaaggggtggacaaattcaacccggtctatctcttcgacgaagggtccaccatctcctgggtgccctgtggaagaaagctcacgtgctcttaccccggcatcaaattcgcctacggcccagacatttacttcggaaacgaggtatctgttttggagatggatgggcagttcgacagactagacgagctcatctacgtggagagccatctgagcaacctctcgaccaagttctacggggaggtgacacagcagatgctgaagcacgcggacttccctggaagcaacaacgggacaggtctcttccagaccatcgtcgggctgaagattagagacctctacgagcagattgttgccgagagggctggcgcgccagtggaagcagccaaagtttgatggcccgcgtgcattcagatgtcctaaaacgggacaggcctcttcaaactcgacgcacgtctgttggggatatatgcatgggcagcatggcgaggaactaggagcctaggaggatgtggaagaaacgtcatttgcagagctcaggaaaacgtgcagcacttgtttagatgtgtgccttcttccatgcttcattgcagaaagaaatcaagtgcctctactactatcaggtactcctattcaagtgtaggagacgaatccataccacttccattgttggttattgtttctctgacccggagccaagaacagtcaacaaggacccgaggttgaacatctctttttatggactactggagagtaacaacatgtccgtttggttttaattagtactggattggactgcttctacagtactttgtctttatggattatagctgtagtagtcggttttaattcgtactggattggactgcttccacagtattttatctttatgcattgtagctgcagtagtccgaacaactggttttaatccgaggagagcattaatgttcttgccatctagcaattgaaaaccatagcaggcaaacaaaaaaaatcaaaa

SEQ ID NO: 3065 - DNA, 2833 bp, Zea Mays
ttcactggactatcggccccacgcttgggaaaccccacacgacagtggcttcaacacgttacaacgccagcgcctaacggaaaatatctcgagaggtcggggtggtcggtatcatgctagttgtttcgttcgctggttaatgagtcgagctctttcccttctcgcttcaaaccaaaccaaaatcggagcggcggagcaaaacgatccgtagcctcgcttaccttcgattcagctcgaccagggcactaaccgggaagccaatgccgcgcgagtcgcgagatctgtagcgccaatcggcttcaccggcggcggggtgggcatggaagcgcagaacggctcctgcggaggggcgcccgtggtgctcaacgtgtacgacctgacgcccatgaacaactacctctactggttcggcctcggtattttccactctggaatcgaagttcatggtatggagtacggatttggagcacaccagtttccggcaagtggagtattcgagagttccgctcgttcattgaaaatcttgcaggaaagtacaacggcaacacgtatcatttgatttcgaagaactgcaaccattttacagatgatgtctgtaagagcttgaccaagaaatcaatccctgggttcattttttaattgtcttctaccagaaagcatccaagtttccacagtaagacacgttcctactcaatctgcattttctggtgagtttgtgcctggaaattcttcttattaggatttgtgcagttgacctgtttttttttaataaaaactgttacgtaggcggtagacgcctagaccttgttgtgaaactttacatttttaactgtcctataaacatcaacaaattgaacctccgttggactggtattccttggtgtaatgagtggctgaccatcctgaatactttactagcaagtaatctggtagacttttggccatattcgaaataaccacccagcctagtaaaaaagaggtaatgataatgtatagctagtaagttagataggactgagttatcaacactaagattattagtttctcagaattcattttcttcagctcaatatcttgtgaccttctataagccactccagattctaactgagacttcaaacaagggcggatctacacccgggccacccggtccagggcccggggcttgatccatataactgagccttagacccgtgctctggcgtgggatagacgaggagatttttttaaccacggcctggaattcgctcccacggggagtcgaactcagtaactgagtgctactcataccacctaaccaactcagatgatgatatggattcggtatcttcatcggttcttggagacagtgatctgggagagttagaccaacaccttctgccatcgtcaactgctgacgtccattctatagacgtgccaccaaatctagccaaggatcttctctgaattatccaaccctttggattccacgtagcaggatagcttaaattgctgcagttgatgtccacttagtgcctctccaggtggcataggaatgcaggagtgtagatgaatgctgctgattgtgttgattctttgccactgaatttgttacatacgcacacacagctctcgacagaaatgacgtgctttctaattattttcctgttatgacttgtgacttcatcgtagatttgtaggtacctttgtgttcgagtaatactgtacgcactgctgcactagagtctagaaaatgccgtcactaagggggcgtttgtttgggattataatctacccagattatataatctaacaacttagttctaaagtggttggaatatataatctggatagattataatcccaaacaaatgcctcctaattatggcacaaatggaagttgtgccttttgaaagtgctcatttggaagagaagaaatgttctaaaaatttcaggggattattaggatttgggaaatcaatctttgtatgtattgacaaagaaacatacatactatatgtatgcttagtagataaagatcatgtcaacaaatgcatgtaacatatactctcttcgtcccaaaatagtattcgttttagagtgttaatggattcatacaatatttgatgtatgtgttttatatgcgtgtctagatttattgtcatccattttaataaggacaaaaaagtgttaaaacgactaatatattagaactaagggagtatctcttaataggaattggttttgcaacaatcagttatcttgtaaaagtaattgatggccaacatataatccgaaaagactaaccggattcaaatacaccttacgaaaagagaaattatttcattgttttgttctaccatatgctcatgcttagttatcagataagttgctctgtccgcccaacgattattgtcgcataaatatctgcaccaagattcgatagggctctgtttcagagttcatgtccatttgatattagccaagatttggtggtatgtcggtataagtatggaaagaaggtggaggcaaagctggtgatctttgattttgatggaacttataggagtcggtctcatcgacttcggggagaaatctctaggtctgatcttaattggttatatctggccttgaccatgatgaatgcattatctgaagtaccgagggtcttttctcttaggtgaaaacctttgatctggcctttattggtgggtcatcgggcctttattggtgggtcatcgcaacgacagcgtcttatatgttgtattcttcctaaagacgtttcttatggagtgtctcaaccttgatcctagtattgtctagttagtggttagcgtgaaagactgttgtgagt

SEQ ID NO: 3066 - DNA, 2477 bp, Zea Mays
ctcggagttagtgcctccatgtcctgacgcggatgcgggcggagcacaccacatgcggatgtgctgtgctgttgcctcatatgattccgactaggacttggggattgtgctgctactcagctgaaagtttatagaaggtggagaagttgtggtgtttccctacctgttagtctgcacttctttgttcctgatcaactgctccgacacgattgttgtcttctcaacctctcttgccaagcatggctgggcaaacggcaaaggcaaaggaagcagaaaaagatgacagacaagaacccggagctgagggggcgaaaaacaagctactgccgtctcaccagcagcaagactctccagcttctgtggcggacaatgattcttcaggtgtctcttcagttcctggcgatgagtcgcctgtcctggatggggattctggtgagttgaaagtggaggaaaacttggatggtaatgggagtaaggaaaagaaaacgtctcagaagagcagtactagtgacggctttgcttctgctaaagtgagtgatgggacaagtagtttgaggaagaccagtggtagtgcgacgatgagtacacgggccgatttcactgagagtgggaagagtagcatgtgccgtgtgagcacggccagtgacattagcgacgagagctcgtgcagcagcatgagcagtgccaccacaaagccacacaaggggaatgattcaaggtgggaggcgatccatgttgtgaagtccagggataatgttcttggactgaatcattttaggctgcttaagaagttgggttctggtgatataggaagtgtgtatctctctgaactgagtggtacacggagttactttgcaatgaaggtaatggataagacttctttggcgagtcggaagaagctgcttcgagctcagaccgagcgggagatcctacagtccctggaccatccatttctaccaaccctgtacactcattttgagacagacaagttttcatgcttagttatggaattctgccctggaggtgaccttcatactcttcgtcaaaggcaacctggaaaatatttctcagagcaagcagcaaagttctatgtggcagaggtactccttgcattggaatacctgcatatgcttgggattatataccgtgatcttaaaccagaaaatgtcctcgttcgggaagatggccacatcatgctatcagactttgatctctctcttcgctgttcagtaagcccaacggtgatcaagtctgcaaatcctggcctagatgcaatgcagaggaacaatgcagcatactgtgcccagcctgcttgcattgaaccatcctgcattcagccctcttgtgtagctccaactacttgctttggcccccggttcttctccaaatctaaatcaaagtccaagtccaagtccaagaaggacaagtcaaagcctgatgctccaaaccaagagaacctcttcccagagctcattgctgagccaactgacgctcgctcgatgtcctttgttggcactcatgagtacctggccccagaaataataaaaggggagggccatggaagtgctgtggattggtggacctttggcatattcttgtacgagctgttgttcgggaagaccccattcaaaggttcaggcaaccgggctacactcttcaacgttgttggccagcccttgaggttcccagagtccccaatagtgagcttctctgcgagggacatgataaggggattgctagtcaaggacccgcagcaccgacttgggtataagcgtggcgctaccgagataaagcagcatcctttcttcgagggcgtgaactgggctctgataaggtgtgcgagccctccagacataccaaagcctgttgagctcgagtgtcgcccaaagcaagtgccatcagcaaatggaaaggtcgcgccagcccctaaccaaaaggggccagataattatctagagtttgaattcttctagggaatttttttttgtgatttctgaactgaaagagtgcatctgggcagatgctgtgaaagaaagtgaaagatgatgagctactctaggcatgtgcttggctggatcttttttttttctgccattagactgtacgctcgtttcaggatatccgagttgttttttcctgctgaactgcttaactctagggtgtactcaatccatcatgtatgttgcaattttcagaacttgcctatggtacttgaaatggacttcagggctacttgctccagctctctgtgtaattgctaatatacattgtaattgatgcttcatcttaggagttaggacatgtcttgctcttcaaatgctgatatctgaacctcgcattgctaatctcagtctgtcgtgaaaaacagaaaccggtgtttgcatttcttggttatccgaaggtgagacatcggcaaggcaatgcaacaagaagcttcgatcttgtgtaatacccaatttgtagatataatataaaag

SEQ ID NO: 3067 - DNA, 795 bp, Zea Mays
tgctggcgcgcccctgtgccggcctggctgcccgcgcccgccgctcgccccgcgtgacgtgagtgaccggagttggccatggccgggcacgccgcggaggccgacgtggatggactgggtgcgaccgaggggacgacatcgacggatgagattgagacgcagcgacgtcggccacgagggcgcgcgtcctgagcaacccctgctcgtgtggtggccagaggagtgcgacgtgccgcccacagcgtgttcgacagattgctttcatgaattacggtttggagcctcggaagaatctctgttgttacaactcttttttctcaacgaccgctgctagtccacttcttgtagagactggacctgaactagctacgaagagtccaggccatcatgccatgtgtataggtgatttggtggtagtggcaccatcggcgattggtggcagctgttggttcttgatggagacgactggtatagctagcagctaggtgtttagttattcagttcttcgaaggtgtatgttcatgttcaggcctcgaagacaaaactagcaagatggtgcttctaccttgtggacttttacagaacaatactacgagtcaaatttcctttttttggatgaaacttgcaagatcaacggagaggtgtatggacacttgtttggcgagtcatccagatatgtaatatctttatcatattatttgatttttcccccggggggataagcgtgcaattcattttctcttttcacagtgtggtagtgttaaaaaaaaacatgcatgccttggttacaaagag

SEQ ID NO: 3068 - DNA, 1895 bp, Zea Mays
caacaaagcagacctcccgtcccgatccccccaaactgtttggatttcggaccggacgcgtttctgaacttcttgcgccggaagaaagagaaaccgagaagaggagtcgcggctcccgacatatgtggcggcgggcggcgacagcggcgctgtcgctgggcgccggtgccggcgcggtctcgatcgccacctccgaggaccccgccgcgacgttcaaggtctgcgcgcacctgcctccgcgcctcctccgcgactctgtcacggccgccaccatcgcgtttgactacaagtggtccctctggggcctcgagccgggcacccccgtgtggcagagcgccaagcaccatgcccacctccgttccgccaaccgactccaggagctctgcttccgcaacggtggcatctacatcaagctcggccagcacatcgctcagctggagtatgtcgtgccggaggagtatgtgcaaacaatgagggaatccatgctgaagaggtgcccggtctcatcgtacgagcaggtccgcggggtgtttaccaaggatctcggtgaatcgccagaaactgtttttgcagaatttgatcctgctccatttgcaagtgcttcccttgcacaagtccatgttgcccgaacgcacgatgggcaaaaagttgctgttaaggttcaacatgaccacctcacaaatactggtgttgtagatatagccactgtggatttgttagtgaatgctctgcattatattttccctacatttgactacaggtggttagttgatgaagttcgagaaagtgcccctaaggaattggatttcttgaatgaagccaaaaacagcgaaagatgtttgaataactttagaaagctgtctcctcagattgctggtagcatatatgcccccaaggtttattggaatctcagcacatctagaattctcaccatggagtttatggatgccaaggaggtaactgatgttagtggcattaaatcaattggagttcaccctgttgatgtttcaaacctagatggaaaaggccacagctggttcttcttgaccacggcctctacaaagagcttgattataatactaggataagctacgcttctctttggaaggcacttgtttttgctgatgcaaaagcaattaaggagaacagtgccaaactgggtgctggggaggatcttcatgcactctttgctggtgttctcactatgagaccatggaaaagggtgattgacccatctcctgatcatcttgtactaggaaaaaatactgattattcagaattacagaattacgcctccttatattttactgagatctccgagctactgaggagattaccaagggttatattgttgatgcttaaaacaaatgactgtttacgtgcagtcagtcatgccctggttgggggcagttccttggagtcgtttatgattattggacgggtatcttctgaagctgtgctggatgctaaaaggatgaacaggaggtcctttctcgatggattgaagatatggctggaggaagccctgctggaagctcgattctttactttgaagctgatgctatgtgttatgcaacttaggaagttgttgcctggctaaaagcagttaggcgtatcagcagcctttttgaccggtagaactgcggagttgacatctagttccatatattttcttgagggcgaaacttgacattttgcttagaagattgcctttcttttcgtatacataattcttctgtcgatcattttctcaccatgagtggccatttttcatggtcgatacttgataccttcattgggtgaatacaagtatacaaactgctgacgtggacaaatgtaagagcaaaactgttttctttttggaagggaatcaacattgacgtgtagcaaatttc

SEQ ID NO: 3069 - DNA, 1994 bp, Zea Mays
cagacctcccgtcccgatccccccaaactgtttggatttcggaccggacgcgtttctgaacttcttgcgccggaagaaagagaaaccgagaagaggagtcgcggctcccgacatatgtggcggcgggcggcgacagcggcgctgtcgctgggcgccggtgccggcgcggtctcgatcgccacctccgaggaccccgccgcgacgttcaaggtctgcgcgcacctgcctccgcgcctcctccgcgactctgtcacggccgccaccatcgcgtttgactacaagtggtccctctggggcctcgagccgggcacccccgtgtggcagagcgccaagcaccatgcccacctccgttccgccaaccgactccaggagctctgcttccgcaacggtggcatctacatcaagctcggccagcacatcgctcagctggagtatgtcgtgccggaggagtatgtgcaaacaatgagggaatccatgctgaagaggtgcccggtctcatcgtacgagcaggtccgcggggtgtttaccaaggatctcggtgaatcgccagaaactgtttttgcagaatttgatcctgctccatttgcaagtgcttcccttgcacaagtccatgttgcccgaacgcacgatgggcaaaaagttgctgttaaggttcaacatgaccacctcacaaatactggtgttgtagatatagccactgtggatttgttagtgaatgctctgcattatattttccctacatttgactacaggtggttagttgatgaagttcgagaaagtgcccctaaggaattggatttcttgaatgaagccaaaaacagcgaaagatgtttgaataactttagaaagctgtctcctcagattgctggtagcatatatgcccccaaggtttattggaatctcagcacatctagaattctcaccatggagtttatggatgccaaggaggtaactgatgttagtggcattaaatcaattggagttcaccctgttgatgtttcaaacctataaagcatttgctgagatgattttcaagcatggctttgttcattgtgatccccatgctgccaatatgatggtccgaccaatgccacaagacagcagaaaactttttggatggaaaaggccacagctggttcttcttgaccacggcctctacaaagagcttgattataatactaggataagctacgcttctctttggaaggcacttgtttttgctgatgcaaaagcaattaaggagaacagtgccaaactgggtgctggggaggatcttcatgcactctttgctggtgttctcactatgagaccatggaaaagggtgattgacccatctcctgatcatcttgtactaggaaaaaatactgattattcagaattacagaattacgcctccttatattttactgagatctccgagctactgaggagattaccaagggttatattgttgatgcttaaaacaaatgactgtttacgtgcagtcagtcatgccctggttgggggcagttccttggagtcgtttatgattattggacgggtatcttctgaagctgtgctggatgctaaaaggatgaacaggaggtcctttctcgatggattgaagatatggctggaggaagccctgctggaagctcgattctttactttgaagctgatgctatgtgttatgcaacttaggaagttgttgcctggctaaaagcagttaggcgtatcagcagcctttttgaccggtagaactgcggagttgacatctagttccatatattttcttgagggcgaaacttgacattttgcttagaagattgcctttcttttcgtatacataattcttctgtcgatcattttctcaccatgagtggccatttttcatggtcgatacttgataccttcattgggtgaatacaagtatacaaactgctgacgtggacaaatgtaagagcaaaactgttttctttttggaagggaatcaacattgacgtgtagcaaatttc

SEQ ID NO: 3070 - DNA, 1800 bp, Zea Mays
ggggctaacctccgagcggcgaggatgaggggcggcggcaggatgattgacgatgaagagcgggtgggccacgcggagatcccgaccagcttcggccccgagctgcgcgcctgcctccgatgccgcctcgtcaagacctacgactaggaacccttctccgctggcgccgctcccctcccccctcctcacgcctaggcctgcggtctaggttcaccagccttccgttgaagggacggttcgaggactgggggtttcgtttctcctggtgcggtccgttctcggcggcggctaagaattatctctttgatggaccccagtaggagttgggcagctcgttggttgagaattggtgacccttgttctcgtgtatcctgcagtaggttcattccgggttgctacacacttgctgtttcggaggaacttcaagaagagtatcaggggatttgccaagacaacaacgtgtagtatgtgccacccaagcgatgtctagagctcctgaagcagtatgaataatttagcttatataaaatggtgcatgtgcttgttgccaagcgaactgccctgctttgttgtatctgagtgctaatcaggacccctaattaaccctttcgtgctacgaatgggttttttagccaagatggcataaaacattagcacaaatgtcagacacatgaccaagacaagttcataggccagcaattctgttcaacaaacacctcgtcttcgtcgtacacggatgtggataccaatttgcagattgcgagccacgagcccatctaccagtagcctctccagtgtccatactgagaaatttatcgcaccagcaccactgtcacaatacaatggtacaggtactgcaccgtgcacgtgcccacaagctttcgacatctgcgtgtcagcatcggttatcatcaatcaccaagaatgactggaccgtggcgcgctggtcctctgcgctggtcctccgggaggtcagatgatacgggcgtaacttatctaagaacaatcaaataaataatttaattcggctgagcacaaagtaacatttgacccgattaataatccaacagtcaatgtttaccagtactttaaagagaagaacacagcactaccaaatgctgaagtaattcacacaaacagatcaaaagctagtcttacaaaaccatcggtagttacacagcttgatcggtcgacggactccacaaatgacacggtacgaagtctttgcggcaaatcatcagcattcagatccaggtcaatcgaccagtcagcgattctgttgctagaacctctcccacgccttctattgctgaagaagggtaacgagcaccaaaaaatacaaatactcgcatgcggcatgcaatcatacctttcctactctagatgcattagtgcagtatttcatgcaaaacatgaaccattaacttgcaagcctacgtgggtatgttcaaagaacagttggggtagccagataaggatacccttttatgaccataagcatgtcaataaacttgaattgcgtcacaagtgtgtatacagctttaatactcacctgcttaagacatgcgcttatgcattctcgataagacatgtttggcaaaccgcagaaatgaattgacagcacatccagtgcatgcaacgattaattgtgcacatgcagaccttatgatccaaaaacccaaaacaggactatgatagatcagtgcagacacatctaaatccaaatactataatgggggttaacacctatagcatgtagatgcatggggcgatgcataaatcattggaatcttacttgtc

SEQ ID NO: 3071 - DNA, 1874 bp, Zea Mays
ggggctaacctccgagcggcgaggatgaggggcggcggcaggatgattgacgatgaagagcgggtgggccacgcggagatcccgaccagcttcggccccgagctgcgcgcctgcctccgatgccgcctcgtcaagacctacgactaggaacccttctccgctggcgccgctcccctcccccctcctcacgcctaggcctgcggtctaggttcaccagccttccgttgaagggacggttcgaggactgggggtttcgtttctcctggtgcggtccgttctcggcggcggctaagttcaggcagaacggctgaacgtcgtcaactgcaccacccccaacttcaccagaattatctctttgatggaccccagtaggagttgggcagctcgttggttgagaattggtgacccttgttctcgtgtatcctgcagtttgtttgcctcttcaatctagtaggttcattccgggttgctacacacttgctgtttcggaggaacttcaagaagagtatcaggggatttgccaagacaacaacgtgtagtatgtgccacccaagcgatgtctagagctcctgaagcagtatgaataatttagcttatataaaatggtgcatgtgcttgttgccaagcgaactgccctgctttgttgtatctgagtgctaatcaggacccctaattaaccctttcgtgctacgaatgggttttttagccaagatggcataaaacattagcacaaatgtcagacacatgaccaagacaagttcataggccagcaattctgttcaacaaacacctcgtcttcgtcgtacacggatgtggataccaatttgcagattgcgagccacgagcccatctaccagtagcctctccagtgtccatactgagaaatttatcgcaccagcaccactgtcacaatacaatggtacaggtactgcaccgtgcacgtgcccacaagctttcgacatctgcgtgtcagcatcggttatcatcaatcaccaagaatgactggaccgtggcgcgctggtcctctgcgctggtcctccgggaggtcagatgatacgggcgtaacttatctaagaacaatcaaataaataatttaattcggctgagcacaaagtaacatttgacccgattaataatccaacagtcaatgtttaccagtactttaaagagaagaacacagcactaccaaatgctgaagtaattcacacaaacagatcaaaagctagtcttacaaaaccatcggtagttacacagcttgatcggtcgacggactccacaaatgacacggtacgaagtctttgcggcaaatcatcagcattcagatccaggtcaatcgaccagtcagcgattctgttgctagaacctctcccacgccttctattgctgaagaagggtaacgagcaccaaaaaatacaaatactcgcatgcggcatgcaatcatacctttcctactctagatgcattagtgcagtatttcatgcaaaacatgaaccattaacttgcaagcctacgtgggtatgttcaaagaacagttggggtagccagataaggatacccttttatgaccataagcatgtcaataaacttgaattgcgtcacaagtgtgtatacagctttaatactcacctgcttaagacatgcgcttatgcattctcgataagacatgtttggcaaaccgcagaaatgaattgacagcacatccagtgcatgcaacgattaattgtgcacatgcagaccttatgatccaaaaacccaaaacaggactatgatagatcagtgcagacacatctaaatccaaatactataatgggggttaacacctatagcatgtagatgcatggggcgatgcataaatcattggaatcttacttgtc

SEQ ID NO: 3072 - DNA, 2038 bp, Zea Mays
gcaggggctaacctccgagcggcgaggatgaggggcggcggcaggatgattgacgatgaagagcgggtgggccacgcggagatcccgaccagcttcggccccgagctgcgcgcctgcctccgatgccgcctcgtcaagacctacgactaggaacccttctccgctggcgccgctcccctcccccctcctcacgcctaggcctgcggtctaggttcaccagccttccgttgaagggacggttcgaggactgggggtttcgtttctcctggtgcggtccgttctcggcggcggctaagaattatctctttgatggaccccagtaggagttgggcagctcgttggttgagaattggtgacccttgttctcgtgtatcctgcagtttgtttgcctcttcaatctagtgcgttcatttttgtctttttttttcttcactcgtgcaagggtttagtattttgaactgtgagcgaagtctcacatcaggtgcagtttatattaaatgttgtttatgtagtaactcccttggtttacatggttttccagattagagagcaacatctgtaggaaaggcacttttattttcagttgtcgttcatagcaaaactgcacagctaaggtaggttcattccgggttgctacacacttgctgtttcggaggaacttcaagaagagtatcaggggatttgccaagacaacaacgtgtagtatgtgccacccaagcgatgtctagagctcctgaagcagtatgaataatttagcttatataaaatggtgcatgtgcttgttgccaagcgaactgccctgctttgttgtatctgagtgctaatcaggacccctaattaaccctttcgtgctacgaatgggttttttagccaagatggcataaaacattagcacaaatgtcagacacatgaccaagacaagttcataggccagcaattctgttcaacaaacacctcgtcttcgtcgtacacggatgtggataccaatttgcagattgcgagccacgagcccatctaccagtagcctctccagtgtccatactgagaaatttatcgcaccagcaccactgtcacaatacaatggtacaggtactgcaccgtgcacgtgcccacaagctttcgacatctgcgtgtcagcatcggttatcatcaatcaccaagaatgactggaccgtggcgcgctggtcctctgcgctggtcctccgggaggtcagatgatacgggcgtaacttatctaagaacaatcaaataaataatttaattcggctgagcacaaagtaacatttgacccgattaataatccaacagtcaatgtttaccagtactttaaagagaagaacacagcactaccaaatgctgaagtaattcacacaaacagatcaaaagctagtcttacaaaaccatcggtagttacacagcttgatcggtcgacggactccacaaatgacacggtacgaagtctttgcggcaaatcatcagcattcagatccaggtcaatcgaccagtcagcgattctgttgctagaacctctcccacgccttctattgctgaagaagggtaacgagcaccaaaaaatacaaatactcgcatgcggcatgcaatcatacctttcctactctagatgcattagtgcagtatttcatgcaaaacatgaaccattaacttgcaagcctacgtgggtatgttcaaagaacagttggggtagccagataaggatacccttttatgaccataagcatgtcaataaacttgaattgcgtcacaagtgtgtatacagctttaatactcacctgcttaagacatgcgcttatgcattctcgataagacatgtttggcaaaccgcagaaatgaattgacagcacatccagtgcatgcaacgattaattgtgcacatgcagaccttatgatccaaaaacccaaaacaggactatgatagatcagtgcagacacatctaaatccaaatactataatgggggttaacacctatagcatgtagatgcatggggcgatgcataaatcattggaatcttacttgtc

SEQ ID NO: 3073 - DNA, 4577 bp, Zea Mays
gaaataaaatactccaagccaagagagcggcaggccgcaggggcaccccccacacccacaggccatccttcaccagcacacactcatctcccacacctagcctagccttgctttgtcctcctccgtctcgctctcgctctccgtctccattcccacccaccaccaaacaccaggcccaaaggaccccccgccttcccaactaagagcaccagcgcagcggggagggggaatcagggcagcaagatccgagcagcaggagtggcaagcagcatttgtagccacagctcgctcactcaattgcagctagccgcggttgcggttggactggatcggcggcagggcagggcagggcagggcgcgcggcggtggtggtagttgcagaagtgacggtcaagttttcctcgctccttgcttcggccgagactccgcctgacgctactaccaacatctccacctgaatccatctctatctacctcgcacgaacgaacagagacaggggaggggagggggggaattgaagtgtaacccaaggaaaggaaccatgatggtgtggcaggcggaggaggaggattgatccatccgtcaacccatcagacccgtccatccatcggtggtggtggtggtggctgctgttactcgctatcaccatctgctgctgcctgctttagtcttttgcttcacttctcttctttctatccttcctccccctgtctgtttgtctgtcttattgccctccctgttcttgttgctgcttgcattgagaaaagagagagagagagacagagagagatagaaagtggttgctagttgtatggtcgtccggtgggcgcgatgaccatggagcacggcgaggattgctgcgtcaaggtggcggtccacgcgcgccccctcatcggcgacgagaagctgcagggctgtaaggactgcgtcgccgtcgtgccgggcaagccgcaggttcagatcggcagccactccttcaccttcgaccatgtctacggcagcacaggcacgccgtcggcggccatgttcgacgagtgcgtggcgccgctggtcgacggcctcttccagggctacaacgctacggtgctggcatacggccagaccggatcagggaagacgtacaccatgggcactgcctgcaaggaggggtcgcatatcgggatcatcccacgagccatggctgcgctgtttgacaaaattgagaacctgaaaacccaagtggagttccagttacgagtatcgttcatcgagattctgaaagaagaggtgagggatctacttgaccccactgctggtaccgtgggcaaagcagagaatggcaatggccacgcaaaactgtctgtgccagggaaaccccctgtgcagatccgagaggcgtcgaatggagtcataacgctagctggatccactgaggtgcatgtcaccactcagaaggaaatggccgcatgcctcgaacaaggttccctcagtcgcgcaactggaagtaccaacatgaacaaccagtcaagatggaatgcctattgaagagatgaatgaagactatctctgtgccaaactacacttagtagatcttgctggatcagaacgggctaagagaactggttcagatggcctgcgcttcaaggaaggtgttcacatcaaccgaggacttctcgctctcggcaatgtcataagtgctcttggagatgagaaaaaaagaaaagaaggtgctcacgttccttatcgggacagcaagctcacccgtcttttgcaggactccctaggtggaaatagtaagactgtcatgatagcttgcataagtccagcagatattaatgctgaagagacattaaacactttgaaatatgctaaccgggcacgtaatatccaaaacaagccgattgtcaatagaaatcctatcgctgatgagatgaaaagaatgcgccagcagattgaatacttgcaggcagagcttgtttcggctcgaggaggagccacatcagatgatgttcagggtctcagagagaggatttcatggcttgaacaaacgaatgaagacctctgcagggaactatatgatagtcgcaaccggtctcaaaatgatccatgtgaacctgaaatacaaaggactttaaacggctttaccaaaagcgaagggctcaaaagaagcttgcaaagtacagatccatttgatgttccaatggctgactcagtaagaggcaaccctaaggatattgaagatgaagtagctaaagaatgggaacacacaatgctgcaggatagcatgggcaaggagttgaatgaattaaatcgacaacttgagcgaaaagagtctgagatgaaaatgtatggatgtgatactgttgcacttaagcagcacttcggaaagaaacttatggagcttgaagaagagaaaaaagcagtacagcaagagagggatagattgttggctgaagttgaaagcctaagtgctgatggccaaacacataaactccgagatgcgcagctgcagaaactaaaatcccttgaagcccagattctagacctaaagaaaaagcacgagaaccaaattcagattttgaaggaaaagcagaagagtgatgaagctgctaagaaactgcaagaagaaattcattttataaaagcgcaaaaggttcaactacaacacaaaattaaacaggaagcagaacagttcaggcaatggaaagctacccgcgagaaggaacttcttcagttacgcaaggagggacggagaaatgagtatgaacgccacaagcttcaggcacttaatcagcggcagaaattggttttgcaaaggaagaccgaagaggctgctatggctacaaaaaggctgaaagagatattagaagctaggaaatcttccgcccgtgacagttccgctggcagcaatggtacatctcaaggctataatatgggtgagagatcgctgcaaaaatggtttgatcaagagcttgaagttatggtgcatgtgcatgaagtccgaaatgagtacgaaaaacaaagccaactgcgtgctgcgcttggtgaggagcttgccattttgaaacaagaagatatacgggctggtggatctagtccccaaagagggaagaatggaaactctaggacaaataccttgtcaccaaatgcaagacaagctaggatagcatcacttgagagcatggtgacaatctcttcaaacactcttgttgcaatggcttctcaactctcagaagctgaagaaagagagcgtgccttctctgggcgtagtcgttggaatcaattgcgatcaatgggggaggcaaagagcttactgcaatatgtctttaatgttgctgctgatgccagatgccaagtaaaggagaaggaagtggagatcaaggaaatgaaggaacaaatgacagagctggtgggcattcttcgacacagtgaatcacgcagaagagaaatggagaagcagctcaagcaaagagaacagacaactccaatggccactacacctccgaaaagtggaaatggcacgacgaagcactctgctgatgaccccaacacaccactgtcccctgtcgccgttcctgcacagaagcagctcaagtattctgctggaattgtaaatagccccagcaaaggagttgctgcgataaaaaaagagcaacttaagatggttccaattgcacagttgtctgcggggaagagagtttcaatagcagggcattcaggaaagctctggaggtggaaaagaagccatcaccagtggctgatgcagttcaagtggaagtggcagaagccgtggaagttgtctgaggtgatacgacacagtgatgaaacaatcacgaggattaggcccagacctccacttcttccacataaacctcataactgatgtgaaacggacttgtttttgtctcaacaagaactgacacggtttgcaaacctacacagctaactgcctgcacaaggtaacaatgcagttaatactccatgagatctccttcgtgcttgtttttacttggccacgggatcgacaagtatgtgttcatgggtgactcttgtctatggatagatgtaaattccctgtgggttggtataaagtgagatgtcaacgtagagaaagaaaatagttagtgggtgagtgagcagagtgaatgggcattctttcatgcaaatactgagcacaatgcttaatgtttcagccttcactgacggtgacatgtcaatagttggtgttcgtcttcacaaaggaatctgtcaaaggaaggcgccttgtaaagtctttcttgtgctgttgtgtgatagttttgtgtgaagggtaactgaaagttgaatgggttttgtgctcgagtgatagtctattttcccctcttcttttgtttgttgatactaaaatgagaaaagacaagtgatattggtttggtttgctaggagtattgtgatgtaatgcagaaacttgttcccctatatcagtacacccttttaatctatgtattgtggagtactgattgctgactactgttgatgtccgaagggatccggattacacaccgcacgtcttcggttgacacacgacattaaatacagcagggaacatagaggatgg

SEQ ID NO: 3074 - DNA, 2622 bp, Zea Mays
aggagccagctgctggctcgtgagtgtcggcgtgtcgggccacaacccgaacgctgaaccaaggctcgggaccgcgacactcgtgtgtccttctcctcagatctcgccggcggcggcatgctcccctcgtccggcagcggctggggccgcggccgcggccgccacctattgctcagcagggccctagctctcgctgcactgctcgcgctcgcctccgcctccgagtccgaccacaagtacaaaactgaagagccagttaagctttgggtgaataaagttggcccttacaataatcctcaagaaacctacaactattacagccttccattttgtcaaccgtctgagaaccccacacataaatggggtggtcttggagaggtccttggtggaaatgagctgattgatagtcagcttgaaataaagttcttaaaaaacgtggagaagggcttcatttgtacacttgagcttgatgctaaaaaggtccagcagtttgctgatgccattgaaagctcatattggttcgaattttttatagatgatctgcctctttggggttttgttggggagtctgacaagaacagtgaaaacaagcattacctttacacacacaagaacatccttgttaaatacaatgataacaggataattcatgtaaatctcacccaagagtctcctaagcttcttgaagatggcaagaaactggaaatgacatattcagtgaagtgggtagcaacagatgtgtcatttgcacgccgttttgaagtgtacctggactatcctttctttgaacaccagattcactggttctccattttcaactctttcatgatggttattttcctaactggtttggtttcgatgatattgatgcggactttgagaaatgattatgccaagtatgctcgtgaagatgatgatctagagtccctggagagagatgttaatgaggaatcaggatggaagcttgtccatggtgacgtatttcggcctccccgaagtttgatgtttctttctgcacttgttggtatcggcacccaattggcagctcttatcctacttgtgattgttttggccattgttggcatgctatacattgggcgaggggctatcatcacaaccttcattgtgtgctatgctcttacatcgtttatttctggatatgttagtggtggtctttactcaaggagcggtggcaaaaactggattaaagcgatggttcttacagcatccctctttccgttcttgtgtttttcaattggtttcgcactgaatacaattgctattttctaccgctcattagcagcaataccatttggcacaatggttgtcatgtttgtactttgggctttcatatcttttccgttggtgcttttgggaactgttgttggtagaaactggagtggtgctcctaacaacccctgccgagtaaagactattccacggcctattcctgagaagaagtggtaccttacaccttctgtcatctcattgatgggtggcctgcttccctttggcagtatcttcattgagatgtacttcgtgttcacatcattctggaactataaggtgtattatgtctatggtttcatgttgctggtcttcgtcatccttctaatagtcaccatctgcgtcaccattgtgggtacttatttcttgctgaacgccgagaactatcactggcaatggacgtcgttttcctctgcagcgtcaaccgctttgtatgtgtatctgtactccatctactactaccatgtgaagacaaagatgtcaggcttcttccagacaagtttctactttggttacacactgatgttctgccttggtctaggcatactttgtggtgctattgggtatctagggtcaaccctttttgtaaggagaatctacagaaatatcaaatgtgattaaatccctgctacttactagcagcagaaagaccatatgtattgtcagtggaagcaaggcctgaaaaaaatggattttgatggtagaccctgaataggtttttgaaactgctgatgacttgaccccgttgttcttatacgcacatttttgtttgcctgcttattcctgtgagatcgtcctcatagtgtatatctgtggtagttgaggattagcctgaaacacctgttttcatcattttttcttcattttaattacttcattcgttaggatgtaatcagtgaatattgatgcggcgcgagtcgaattaggactgttcggacaaatcactgcctatacgagtattgaggggtcacgattataacaccgaagctatgacgagcggccgcccgagcagaatgacaggataaggagaattgtataggatgtctctcgtgatgttaacgaaatattggttttggcatgtctgtcgtggctttgtcgatcttacttcgctctctatgagttttgtggaagtcagtggaaccattggaatgctttgactcaagttggagaggaaagaaggctctaggagatggctggggctaaggctgtctacagcaacgtctactaaattttgtcccctaaaagaatattctctgtactttacaaaacactctaaaagattctgtactctatatcatctcagtctccaacaacgttccttaaattcggttctct

SEQ ID NO: 3075 - DNA, 2381 bp, Zea Mays
gacgccgcgcgccacgacgcagcacgcccaagaaaccccgtgtcctcacaaaaaccctgcctgccggagatggccagcggcgaccttctcctccgcgcccacgccggcgccccggtcctagcgagggccttctcctgccgcctcctagtcccggcgaggcgccgcagcggactaatctcacctctggccgcttccaaggtcggcatcgccgacgtcgttgggcgggtcaggtcgggcggcgccgaccagaagaggcgacgcagggatgcgaaggagggatttgggttctccggggtggccacgaggagagaacttatcgacgacgagaaggtggagcaggacgaggaagatgaagctctcaagttgggagtggagaagaatggtggcgagacgggaggtgtggatggctcgtacctcagtgagacacggtttgatcaatgtgctatttcccctttatcgatgaaagccgtcaaagatgctggatatgaaaggatgactgaggtgcaggaggcaactctgcccataattcttcaaggcaaggatgttcttgcaaaggcaaagacaggaactgggaaaacagttgcctttttgcttccagcgattgaggttctctccactctacctcatcagcggggtcagttacggccacctataaatttgctggtgatgtgccctactagggagcttgcaaaccaagtggctgttgaggccaggaagcttctcaggtatcatcgcacgttgggtgtgcaggttgtaattggtggcacaagattaactcaagagcaacgaagcatgcaagctaacccatgtcagattcttgttgctacaccaggaaggcttaaggatcatcttgagaacacacctgggttttctaccaggctcaagggtgtgaaggttcttgttcttgatgaagctgaccgcctgttggatatgggatttagaagagatattgagaaaataattgcttcaattcctagagaacggcaaacactgttattttctgctactgttccagaagaggtccgccaaatttctcatgtggcaatgaagaaagattataggttcattaacactgttaaagagggtgatgaggagacacatgcacaggtgagccagatgtacatggttgcaccactagacttgcatttttctatcctatatgatgtattgaagaaacatgtcgcagaagatgcagactacaaaaaagtcgcagtctgcaagaactaaggtctcagacgaattcaggaaatcaaaaggtttgatactggtcagttcagacgtatctgcccggggcgttgactatcctgatgtcactcttgtaatacaggttggagttcctgcagatagagagcagtacatacatagactaggccggaccggacggaaaggcaaggaagggcaaggactcctactattggcaccttgggaaaaatattttcttggtgctgttaaggatttgtcaatagcagagtctgctgtaccaccagttgattcaagtgttgagacagaaaaatgcggtcagaaaagtagagatgaagagcaaagaatgtgcctatcaagcatggttagggtactacaactcgaacaagaccattggtcgagataagtccagacttgttcaccttgcagaagagttcagccaaagcatgggtcttgcagttcctccagccataccgagaaacattcttcgcaagatgggccttaacaatgtccctgggcttcgttcatcataatctcgatgtcacgatatcaagcagaagacgtgtgctacagcacagtacatgcatttgaccagccataatgctgttaacttcgtaaacaacacttgttgctggacttaagtaccgcagttaacataagcagattggtttgctgatgacctgaagtttctacaagcatcctcatttccaacccgtacacaagtcctcgggtgtagccagaatatgcattcattttgaagccaaattttgttcggtcgagacatcaacacttcacagagaatgctcaaacagacaaggtgattctacgtatacaaggatttgtcaaaagcatagtgatgtgtatgaagtattaaaagttcgggaagaaaaatgcgctttcctgatttatcgtcatataggggaatgcatgtgttcagtttcaaattctgacgttgtttgtacgcgaatgaaaagaaaggtatagggttgtgtaggggcaacaactactatacaaacaaccgttagatataaacatgcaagcaggtcactcggtctgttagatctagatccaatcatatgttatactaggtgagtgcccgtgcgttgcaacgggatcatataataccaataaaaatatatatataacacggaatgataggagcgttaataagtagtagagat

SEQ ID NO: 3076 - DNA, 2903 bp, Zea Mays
cccacctcaacctcacctgccactgccatcctttctcacactcgcgcaccggcgcgcgtccgctgcccgcaccccgtcccgttgtactgcagggcggagcctcgctcgccttttgtactgcacgcccacgcgtccacacgcgcgcgcggcccggacctggctacgaagcgcaggcagtacagacagcaccgcctggtttgagcggctgccgccgctgcatatactccctccctgccttccagtgccaggggtgaccggcgtgcgtgccattccacgctctcgcggctcgtgtgccagcggtgaccagcgctcgtgctcgtccagtccaccaggcgctgctgttccggcaagccagccaggattggatattttccgccaatcggattctggtgacatatacgttagcgtttgaggatccccatttgggaaatttcggtttccattgcaaaactgaataaaaaatatatccaagagaagaaagaaggccaaagcagcagccgccgccgccgccgtctcggagctcgagctcctagtcccccggggccgaggcgccggcgccatggaccagctccggcccgagccggccgcgggcgcgcacgagatcgagaagacggcggcgccggacgtggagtcggagcccgcggcggcggtgccggagccggagcgcgtgccgccgtggcgcgagcaggtcaccgcgcgcgggatggtggcggcgctgctcatcggcttcgtctacacggtgatcgtcatgaagctgagcctcaccacggggctcacccccaccatgaacgtctccgccgcgctgctcgccttcctggcgctccgcggatggacgcgcgccctcggccgcctaggcattgcatgccgccccttcacccgccaggagaacaccgtcgtgcagacctgcgtcgtcgcctgctacaccatagggttcggcggtgggttcgggtcgttcctgctgggcctggacaagaagacgtacgagctctccggggtgagcacgccgggcaacgtgccggggagctacagggagcctgccatcggctggatgaccggattcctcctcgccgtcagcttcgtggggctcctcaccttgcttccactcagaaaggtgctcgtcatcgactacaaactcacttatccaagtggaacagccaccgcggttctcataaacggattccacacacctcaaggagataagaatgcaaaaattcaggtccgtggattcctcaagtacttcgggatcagcttcctgtggagcttcttccagtggttctacaccgccggcgaccactgcggattcgcccagttccctactttcgggctccaggcttttaaccagacgttttccttcgacttcagcctgacgtacgttggtgctgggatgatctgctcgcacctcgtcaacctctcgttgctgttcggtgccgtcgtttcctggggcgtcatgtggccactcatcggcaagcagaagggcaactggtatccggcagatgcatctcagaatagcatgacaggcatctacgggtacaaggccttcctttgcattgcccttctcgtgggagacggtctctacaacttcgtcaaagtcatagctatcactgtcaagaacatacgcgagagatcacgtcgcaagaacctgaacagagtggcggacgcggacacgatggcgctggacgacatgcagcgcgacgaggtgttcaacagggacaacatcccgacgtggctgtcctacgcggggtacgcggcgctgagcctgatcgcggtgatcgccatcccgatcatgttccgggaggtgaggtggtactacgtggtggtggcgtacgcgctggcgccggcgctggggttctgcaacgcgtacgggaccgggctgacggacatgaacatggggtacaactacgggaaggtcgcgctgttcgtgctggcggcgtgggcggggaaggacagcggcgtggtggccgggctggtggggtgcgggctggtgaagcagctggtgctcgtgtcggccgacctgatgcacgacttcaagacggggcacctgacgctgacgtcgccgcggtcgatgctggtggggcaggccgtgggcacgctgatggggtgcgtcctggcgccgctcaccttcatgctcttctacagggcgttcgacgtgggcgagccggacgggtactggaaggccccctacgcgctcatctaccgcaacatggccatcctcggcgtggagggcttctcggcgctgcccaggcactgcctgcagctgtgcgcggggttcttcgcgttcgcggtgctggcgaacctggcgcgggacctgctgccgcgccggctcgcgcggctcgtgccgctgcccatggccatggccgtgccgttcctcgtgggcgccagcttcgccgtcgacatgtgcgtggggagcctcgtggtgttcgcgtggcacaagctcgacggcaagaaggccgcgctgctggtgccggccgtcgcctcggggctcatctgcggcgacgggatctggacgttcccgtcgtctctgctcgcgctggccaaggtcaagccgcccatctgcatgaagttcacgccagggagctagagggcgcgctgacgatgcgtacagaacagagggcatcgttcgtcgtttgtggggtggaatccgtgtagtagaattacataccaaccaggcctgttctaatgtccatatgagcttaatgtacggtgtatatatatgtaaaaatggaaatctgaaggatgacaggatgaattgcctgttgtctagtagcacgcatattattattattatagcatagcactaagagcaagtccaatagactcggtaaacagtctctgctcggtaaaaaaatgaaaatcgtcgtgaaaacaaattccaagagactcgccttcgtcctcacttctccatc

SEQ ID NO: 3077 - DNA, 3916 bp, Zea Mays
caggaatccaaatttctcccagtggaacggtggaagtgtggaaccatcgcataaatgccccactcgtcagcgtggagcgtggctatatggacccacatggcattcggctacacgcattcgctaggtgggcctcacaacagagcacacaggctggttcgagaccccgggcacgtttctacaaatcctaagaaaactccaaaaaaagacaaaataacccagaaataaaaatcgccgtggaggcgagtcgccgccggcaccgcccggcacggccttcttctccggcgaaggcggagctcgttacggggattccgcatccgttaatcggtcccaccggatccctcgccgcctcccacgggccgggccgcgccgtggcgcgcgcgcaggccgagatgcggaagaggatggagagcgtcgacgatctgatcgaggaggcaaagctgcgcaccgtctgatacaagtaaatcaatgtggacaaatgtgcccatgtcaatccttatacttgcatttctgcgatatctctccttcaaagtggagttccgttggagggaacaccctgtacgtaagcagacacatttgtctcaagcctcaaagagacagttgtctgcaaatgatcatcgcctttcgactgtaccaccagtctccagatggagaaggaaagttggttcaccttctgttgaggctgcttttgaaagtttcattgagaaaattttacgagactttgttttagacttgtggtactcagatattactcccgacagagaggcaccagaactgatacgtggcttagtacttcatgctcttggtgaattatcaggcagggtgaaagagatgaatctagttgacatgctaacaagggatatggttgatttgattggtaatcatttagatatttttcggaaaaatgaaattctaattggcgttgatgtcatgaggactttgtcttcagaggaaatagatgagagactgaagcagcacctaatagtttcacaggaacttcatccagcactgttatcttcagagcatgagtacaagggaattgatgacctgcctaatcttgcagcctgttatgaacttcgcaagccctgtctacatcaatgagttggttgtctaccttctaaatgccaaagatacaggtagcgctggaggtacaaacatggctaatacaggaacagtaacactagtgccttacaaaggaggctcacaaggttgtcaaatggaatcaaggaatttgactgtagaaactagcggtttagttccaccaaataattctgggatgagatcacttgttacttctgaatgtggaaagtcaaaagtgtcagaggatgacaatgatggtaccatccaacctcgtcagccagactgggcggcggtattggatgcagctactaaaagaaggtcagaggttcttgcccctgagaatcttgagaacatgtgggcaattggaagaaattatcaaaagaaaatggttaaattagaccactcatcaagacagaaaggctctgaaggttcagataatagtacaagtgcaggggcagttggtaaagagctatcctctaacttcaacgacagaattgcatctgttgatgataaatacatggtcaatttgatgcaaagtaaaaataggaatgctcaatctaccttcgtcacaggtagtcatccacttgctctacaaaatatgaatgaagtgaaaccaaaagaggggagtcaagttaattttaccagcaaggaaaaaccacatgaaaccagcaacagagtaaaagcccaactaaaacggtgtaatagtactcctgatattgagaaaagatatttggcaaaaagtaaccagcccatggtttccagtgaaaggctaaatgtgaggataaatcaggatgagagaggtgttggtcctgcctcacatgttgaggtgctaatgcatgttccgaagataagatgtcgggttgttggtgcatattttgagaaacaaggttcaaaatcttttgcagtttattctattgtggtgactgatgcggataacaagagctggtttgtgaaaagaagataccggaattttgaacgtcttcatcgacaactgaaggagatacctaattattcattacatctgcctccaaagagttttctttcatctagcgttgatgattatcttgtgcaccaacggtgcattctcctggacaaatatcttcaagatctcttgtctatagctaatattgcagagcagcatgaagttttggattttctgagtgcatcctcaaagacttactctgctggaaagtcctcctctgttatgaaaaccttggctgttaatgttgatgatgcaatggatgacattgttcgacaatttaaaggagtttcagatggtttgaaacgggcggtcggcacatcaccttctagtgcaactgcccaatttgcagataataggatgtctctatcttggaaccaggaagagaaagataaccacaacttgcatcaaagaaacttggaaagggctcatagcctttcagatggtgatagtaactatgaagatcacatctcttctgtgaatagtggatgccattcagacaatgaggtcaataatagaggacatacttcaaatgatgttgagcacatcgaaacatgctctagtttggataaacaagccagcgaccaaataggaaaacctgcaaaggaatattctgattcttcaaacatgtcatctctaaatgcatttgaggatccaacaggaattcctcctgagtggatgccaacaaatgttagtgtgcctttattgaacctggttgacaaagtattccagctaaagcgacggggttggatacggagacaggttctttggatatcaaaacaaattttgcagttggtcatggaagatgcaattgatgaatggatcataagacaaatcaattggctccgaagagaagatgtcatcgtacaaggaatacattggattcaagataccctttggccaaatggtatattcttcaccaagttggatgaatataaagggaatgcaggcacaagtgaatttgacaagcagtcattagggagtcccacactggctgttggcaataaaaagggccgcacaagctcttttgaacttcatcttgaggcatccagaaatgccagtgaggtcaaaaaacttattttagatggaactccatcggccttggtcagcataattggatacaagcagtaccggcgcagcgcaagggacatgtactacttcctccaatccaacgtctgcatcaaacagctcgcatatgcaatgctagagcaggtcctcgtgacagtcttcccagagcttcgccagctaatagaagacatacatgagaaaggccgcaaagagcaagcctcattcacataccaactctgacccaagagaaaacatgctaattcagagaggagtcgcaacaattttgaacgcacttgcattgctccacggtgagttactgaaacacaaagcctttgcaattatattttgatgatgcataagttggattgaggaagtgcttggtgcttaagaatgatctgtacagatgtatatcagaggttatgtaaattatccccctgatgtagtcaaccagaacaacttacagtgagatcttgtaggtgttgaatgtaatgtatcattctttaattcccccccccccccccccccccaagaattaagttattctcccccctgacttatgctgaggcttgtaaagttttgaaagttccaagtgtatagctgtactgtttgtgttgctgagtaaatcaaaatgttgcgcgagatgccatctctgtttcccaatatttgtccggtcgcacactcaggaggcagaaggtatgtaaattttttaaccaaactaagtgattccttgttgttttggatgaaatataataacatactataatacccaaacagcgcaaattcacgtggata

SEQ ID NO: 3078 - DNA, 3989 bp, Zea Mays
caggaatccaaatttctcccagtggaacggtggaagtgtggaaccatcgcataaatgccccactcgtcagcgtggagcgtggctatatggacccacatggcattcggctacacgcattcgctaggtgggcctcacaacagagcacacaggctggttcgagaccccgggcacgtttctacaaatcctaagaaaactccaaaaaaagacaaaataacccagaaataaaaatcgccgtggaggcgagtcgccgccggcaccgcccggcacggccttcttctccggcgaaggcggagctcgttacggggattccgcatccgttaatcggtcccaccggatccctcgccgcctcccacgggccgggccgcgccgtggcgcgcgcgcaggccgagatgcggaagaggatggagagcgtcgacgatctgatcgaggaggcaaagctgcgcaccgtctggtgggcgctctgcatcttcgccgtctcctacttcctcacgcatacaagtaaatcaatgtggacaaatgtgcccatgtcaatccttatacttgcatttctgcgatatctctccttcaaagtggagttccgttggagggaacaccctgtacgtaagcagacacatttgtctcaagcctcaaagagacagttgtctgcaaatgatcatcgcctttcgactgtaccaccagtctccagatggagaaggaaagttggttcaccttctgttgaggctgcttttgaaagtttcattgagaaaattttacgagactttgttttagacttgtggtactcagatattactcccgacagagaggcaccagaactgatacgtggcttagtacttcatgctcttggtgaattatcaggcagggtgaaagagatgaatctagttgacatgctaacaagggatatggttgatttgattggtaatcatttagatatttttcggaaaaatgaaattctaattggcgttgatgtcatgaggactttgtcttcagaggaaatagatgagagactgaagcagcacctaatagtttcacaggaacttcatccagcactgttatcttcagagcatgagtacaaggttcttcaagaaattgttgggggcattatggctctagtgttgagaccacaggatgctcagagtccgctagttcgctgtttctccagggaattgatgacctgcctaatcttgcagcctgttatgaacttcgcaagccctgtctacatcaatgagttggttgtctaccttctaaatgccaaagatacaggtagcgctggaggtacaaacatggctaatacaggaacagtaacactagtgccttacaaaggaggctcacaaggttgtcaaatggaatcaaggaatttgactgtagaaactagcggtttagttccaccaaataattctgggatgagatcacttgttacttctgaatgtggaaagtcaaaagtgtcagaggatgacaatgatggtaccatccaacctcgtcagccagactgggcggcggtattggatgcagctactaaaagaaggtcagaggttcttgcccctgagaatcttgagaacatgtgggcaattggaagaaattatcaaaagaaaatggttaaattagaccactcatcaagacagaaaggctctgaaggttcagataatagtacaagtgcaggggcagttggtaaagagctatcctctaacttcaacgacagaattgcatctgttgatgataaatacatggtcaatttgatgcaaagtaaaaataggaatgctcaatctaccttcgtcacaggtagtcatccacttgctctacaaaatatgaatgaagtgaaaccaaaagaggggagtcaagttaattttaccagcaaggaaaaaccacatgaaaccagcaacagagtaaaagcccaactaaaacggtgtaatagtactcctgatattgagaaaagatatttggcaaaaagtaaccagcccatggtttccagtgaaaggctaaatgtgaggataaatcaggatgagagaggtgttggtcctgcctcacatgttgaggtgctaatgcatgttccgaagataagatgtcgggttgttggtgcatattttgagaaacaaggttcaaaatcttttgcagtttattctattgtggtgactgatgcggataacaagagctggtttgtgaaaagaagataccggaattttgaacgtcttcatcgacaactgaaggagatacctaattattcattacatctgcctccaaagagttttctttcatctagcgttgatgattatcttgtgcaccaacggtgcattctcctggacaaatatcttcaagatctcttgtctatagctaatattgcagagcagcatgaagttttggattttctgagtgcatcctcaaagacttactctgctggaaagtcctcctctgttatgaaaaccttggctgatggtttgaaacgggcggtcggcacatcaccttctagtgcaactgcccaatttgcagataataggatgtctctatcttggaaccaggaagagaaagataaccacaacttgcatcaaagaaacttggaaagggctcatagcctttcagatggtgatagtaactatgaagatcacatctcttctgtgaatagtggatgccattcagacaatgaggtcaataatagaggacatacttcaaatgatgttgagcacatcgaaacatgctctagtttggataaacaagccagcgaccaaataggaaaacctgcaaaggaatattctgattcttcaaacatgtcatctctaaatgcatttgaggatccaacaggaattcctcctgagtggatgccaacaaatgttagtgtgcctttattgaacctggttgacaaagtattccagctaaagcgacggggttggatacggagacaggttctttggatatcaaaacaaattttgcagttggtcatggaagatgcaattgatgaatggatcataagacaaatcaattggctccgaagagaagatgtcatcgtacaaggaatacattggattcaagataccctttggccaaatggtatattcttcaccaagttggatgaatataaagggaatgcaggcacaagtgaatttgacaagcagtcattagggagtcccacactggctgttggcaataaaaagggccgcacaagctcttttgaacttcatcttgaggcatccagaaatgccagtgaggtcaaaaaacttattttagatggaactccatcggccttggtcagcataattggatacaagcagtaccggcgcagcgcaagggacatgtactacttcctccaatccaacgtctgcatcaaacagctcgcatatgcaatgctagagcaggtcctcgtgacagtcttcccagagcttcgccagctaatagaagacatacatgagaaaggccgcaaagagcaagcctcattcacataccaactctgacccaagagaaaacatgctaattcagagaggagtcgcaacaattttgaacgcacttgcattgctccacggtgagttactgaaacacaaagcctttgcaattatattttgatgatgcataagttggattgaggaagtgcttggtgcttaagaatgatctgtacagatgtatatcagaggttatgtaaattatccccctgatgtagtcaaccagaacaacttacagtgagatcttgtaggtgttgaatgtaatgtatcattctttaattcccccccccccccccccccccaagaattaagttattctcccccctgacttatgctgaggcttgtaaagttttgaaagttccaagtgtatagctgtactgtttgtgttgctgagtaaatcaaaatgttgcgcgagatgccatctctgtttcccaatatttgtccggtcgcacactcaggaggcagaaggtatgtaaattttttaaccaaactaagtgattccttgttgttttggatgaaatataataacatactataatacccaaacagcgcaaattcacgtggata

SEQ ID NO: 3079 - DNA, 1684 bp, Zea Mays
agaaaatgacttcatccggttatttatgagcggcataggggcctggtactactggcggtgcaagcgcatctcccgcagctgaggtcggcgccgtgcaacatgctgaccatggagggcagctgcgagcgggccggcggcaccagggccgccgtcttcttcgtggcgctgtacctggtggcgctcggcgccggctgcgtcatgcccaacatgaccgcgtacggcggcgaccagttcgcggcgggggagaagggcgccaagcgcctctccacctacttcaacctctcctacctgggctactgcgtcgccgaggtcgccgcgctgacggccgtggtctgggcgcagacgcgcttcgggatggccgtcggcttcggcctcgccgccgccgccctgggcgccgggctcctcgccctcgcgtcaggcgcggcggtgtaccgcaacaagcccccccggggcagcgtcatcttcactcccattgcaagggttttcgttgctgcgttcagcaagaggaagcagatctgcccttccggctcctccaaccctgcccacaccgcggccggagatgcggcggctgtcgtcgacggcggcgacttccgccacgccaacaagttcaggtcagcatctagttcgtgcaccttctgcgttcagtattcggacacgtgacgtgacgtgacgtgacctgactttggcaggttcttggacaaggcgtgcatcagggacgcggcggacacggtgccggagagcgagtggcggctgtgcacggcgggcgaggtgcggcagaccaagaccctgctggccgtgctgcccatcgtggcgtgcaccgtcgtcaccaacaccgtgctggcgcagctgcagacgttctcggtgcagcagggcagcgccatggacacgaggctggcgccgtcatccttccgaatcccgccggcgtcgctgcaggccatcccgtacgccatgctgctggcgctggtcccggcctacgagctcctgctggtgccgctcgcgcggcggctcacgggcgcgcgggccgggatcgccccgctccagcgcatcggcgtcggcctctgcctcgtcgcgctgtccatggcctccgccgcggccgtcgagcgcaggcgccgggacgccgccgtgccggcgtccggcgggcggcggcagcagcagctgtccgtgctctggctcgtgccgcagttcttcgtcttcggcctgtcggagctgttcaccaacgtgggcctcatggagttcttctacgagcaggcgtcgtcgaccgccgggacggcggcgcacatgcaggccttcttcatggccttcttctactgctccttctcgttcgggttctacctcagctcggtgctcgtgtcgctggtgaacagggccacggcgggcggcggccgccctggctggctcggcgacaacgacctcaacaaggacaggctcgacctgttctactgggtgctcgccgcgctcagcgtcctcaacttcttctgctacctgctgtgcgcgaggtggtataattctggtgccgccggctctgggcctgatggggctgcccccggtggcgaggtcgcctctgaggaggaggacgatggcaaggggctcatctgaacatcactggaacgaccatggcactaaaaagctgatgtatatggcaaccattcgcgccttgctggaggcacagaggtctgacgccgac

SEQ ID NO: 3080 - DNA, 2520 bp, Zea Mays
gcggagcacaagagaatcgagaacgtcaccaaggccgtctgaaagcgaaaaggccctttgcctctcgctctaccccaaaccacagcagtcagcagcagaccctcgccatgggactgagatccccgctcgtgctcctgctgctcctcctcttcctcgccgctactttccgtcccagcgcggccgctttggcccctccaacaggcagcatcgtgaagcagctgtcgtcggtcgtcaggtggccgcgggccgccccctcgacgcacgggcccaaacagcccggccacccccagtacgccgatggccacgtgggggtagccctgcaatttgagagcggctactttgtagagacacttgttgagggtgacaagcttggtgtcacgccgcacaccgttagagtatctcctgttgagggcggggagctccttgcggtcgactcggcacatagcaacattgtgcggataaccccgccactttctgagtatagcaggggaagacttgttgctggttctttccagggccattctggtcatatagatggtaaaccaagtgatgcccgattcaagcgccccacaggcgttgccgtggatgatatgggcaatgtttatgttgctgatacagcaaacttggcgattcgaaagattggagaatcaggagtgaccaccatagcgggtggtaaatcgaatatcccaggatacagggatggccccagtgaagatgcaaagttctctacagattttgatgtggtgtatgtgaagaaaatgtgttctcttctggttattgaccgtggaaatgcagcccttaggaagatttctcttccacaagaagactgtacttaccaggattctgcactcctatcttcagatctcatattggtcattggtgctgttgtggctggatatatcttctctggtttccaacacgggtttggattctcaggctccgagaaggtagtttgctggccctgtattttccatttacatagatttttccacttgatatgcatacgtgtaataatctcctcgaagttggtaccacagtattcctagtcatgcttaaatagcaccttgtcctttctcagttctatagtggacccgaaaatgagaaatatctgctaattcagtagtttgtttctgtgctaatgccatggcaggtagaggcacctgaaaacgagcagcacgagagcagcacaatcgggaagccacctctggtggtggagagcctgaaagaggaaccaggagctgggtggccatccctcgggacgctaattgccgatctcttgaaacttgccatcgagggagtggggaaactgctactcagcgtagtccctcaacgcatgcaacacgggaagaggaagacagatctcaccccgctcagggacaggctggtgatgcccgaggacagagaggagacggcagcggcggcgcagaagctcagcagcacaccaatgcggcccgagacagcccacgcccctaaccccgtaaccgagacggcagcacccaaggccccgaagagcacgaagccatccaagctcagggattcttcgaccctgtcaagcaagcacaggtcctccaagcggcaggaatacgcggacttctacggcacctccgagcccgctcccgtaggtgccgccgccaaggtccccaaggacaggctccgccaccgccaccaccaccgcgagaagagcggggaggtcgcctacggcgccgcccatcacgacctgaagcccgcggaagcgaagcctgccgattacagcgatccgagctacgatccgtacgtgaggagcaagtatgccgccgagagtgggtacaggtattgacgtgtcgctagctgtcctgtcctgtcctctcctgccgggggaaacagcggaatgaaaacctttcgccggcgtctgcctggcaatgttgtaagtgtgaagctatatagcctccacaagcgcaaagcgaggcgcaaacaaagctgctgctggtgcctggtgctgctcatggtttggtggtgcccatgagatgtggcaagtagtcatcctagttaggttaggtatggacggccaggacggggttggcatctggcccggtttcaggatatgctaagtgcgattttcgcagagggcgacatgtagagcctggcggcggttttgatttcgtatctgcagttcgatgtatccatccatggatcgatcccttgtgcctgcctgcctctgcctggcggcgcgtgtcggcacctgacagcaggtgatgcctcgtgacgggcagttaacccttttgccggtggctcactgatctgctgcctgcctgcctggcccggacgtctgttcgctgtccctgaatgcgatgcatcgtctccgtttcggtctgcacgtcaggtctagttgtgccgaagctgtagccatcacaggccgacctggcgtcgagagaagcgaggatggctgtgtgtagtcaatctctgtcgtactactactgtccactaccagctttggtggcgtcggtccgcatggcatgtgactggaataggctccagttagag

SEQ ID NO: 3081 - DNA, 4424 bp, Zea Mays
cagtgatcggtccgcagctcacgccacgccctagtttttcgaaatcctccgagcgggcgccgggcgctgctcgctctcaagtctcacccgttcgccattccgctcgtctctctctctcttcctcccccgccctctctcccccctcgagggggcgatcgaccccaagcctagctaagctcgccgcatcctaaatccccaaaccacgtgcagctcgccgttgtatgtcgcagagcgtggctaatccggctcgatccgccggtttgagggttccgatggagaccacagaggcggcggccgcgcatccgcagaaggacagtgtgaaggtggccgttaacataaggccgctcatcacggtggagctgcaggatggctgcacggattgcgtcacagtcacgcaaggcgaacctcaggttcaaattgggccccatgtcttcacttttgatcacgtctatggcagctcgggcccttcatcatcattaatatttgagcaatgcgtgcaccccttgatcgatgcattgttcagcggatacaatgccactgttctagcatatggccagaccggttctggcaagacatacacaatgggtactaactatagcggtgaagagaactgcggtgggataattcctcaagttatggatacaatatttagaaaagttgacacctcaaaggatggctcagagtttttaattagagtatcttttattgagatattcaaggaagatgtttttgatttgctcgatgcaaatcaagctgctgtaagacttgatgcaggttctatggcaaaagcatcagcccctggcagagtgccaattcaaatccgagagactgcaactggaggcataatccttgctggtgtcacagaggctgaggtgaagtcaaaagaagaaatggcatcatatttgacacgtgggtcgtcgtcgcgtgcaacagcaagcacaaacatgaatatgcagtcgagtcgctctcatgccatctttacaatatgtgttgaacaaaagagaacatctggtacatccgacaagtcagccagcagtgactatgatatactatcatcaaagtttcacctagttgatcttgctggttctgaaagggctaaacgtactggagcagatggacataggcttaaagaagggatacacataaataaaggccttctagctcttggcaatgttataagtgcattaggtgacgaaaagaaaaggaaagaaggggcatttgtaccataccgggatagcaaattaacccgtcttctacaggattctctaggaggaaacagcaaaacagttatgattgcatgcattagccctgctgatataaatgcagaagaaaccataaacacactcaaatatgccaatcgcgcacgcaacattcaaaacaaagcagtggtaaaccgtgatccagctacagcagagatgcaaaaattgaggagccagctggagcagctgcaaactgaacttttgttttctcgcagtgggagtgcagcgttagaagaacttcagttgctgcagaaaaaggtctctcttcttgagctaaagacttctgagcttaacaatgaacttaaggagaaggaattgtcatgtgagcagttggcagagcgggcacaggctgctcagttggaaagggatcagttgatgctgaagattgaatccgtgaggaatggaaaatcgttggatgatattgaaaatattgataacgaccaagacatggaccttttgaagggctacatatcaaaaatacagcagttggagagtgcgctgatgcgtcaaaacttctccaatgcttgcagacatggcttacatgaccagcttgccatggaccaggacatttttctaaatgaattgggttctggatgtgaagtagaaacaactgatgcttcaaatgaagttgatgaagaagaaaaggagagggaacattcattcatgcaagaccaacttgataaagagctgcaggaactagataaacgacttcagcaaaaggagagatgaaacaatttgccaagagtgatacttctgttctcaagcaacattatgaaaagaagttaactgacttggagcaagaaaagaaagctcttcagaaagaaatagagaatcttcgccatgcattaaccaacatatcttcttctatggatgataatgctcaaaaagttaaagaaaactatcttcagaagctgaatgcacttgagtcccaggtccatgagctcaagaaaaagcaggaagctcaacaacagcttctaaggcagaaacagaggagtgatgaggcagcaaagcgcttacaagaagatattcagcgtataaaatctcagaaggttcaacttcaacaaaagatcaagcaagagtctgaacagtttaggtcttggaaggctgcccgtgaaaaggaagtacttcagctcaagaaggaagggagacgaaatgaatatgagatgcacaagctcttggccttaaatcagaggcagaagatggtcttacagaggaaaactgaggaagcagctgctgctacaaaaagattgaaggagttgctggaagcaaagaagtcatcacgtgaaacatatggcagtgcaaatggttcggggatgcaggccttaatacgagctattgacgatgaactagaagtcactgtaagagcacacgaattacgctcatattacgagcgacaaatgcaagagagagcagcaatatccaaggaaatagcaaaactaaaggaggaatcaaagcacaagatcagtgattgtcctcaagctatgtcacctagtgctagaagttctaggatatcagcattagagaatatgttgtcctcctcatctagtgctatggtatctatggcttctcaactgtcagaagcagaggagcgggagcgtgtattcaatggtaaaggtagatggtaccatgtcaggtccctcccagaggcaaagaatataatgaattaccttttccagttagcatcatctgcaaggtctcaagtactggataaagaagtaatttgtaatgaaaaagaacacaccattactgaattgaaggaaaaggtggttgtgcttaatggtggaattaggcagttggaaacacaagtgagggatctaaggagccaaaatacacagcttttcactgcattgaacaatgcaaagaaatctgctaggtcgaatggcactggatttgctgggcgtaagagtgttcgatcttcccagcattttggttatagtaaggacaacttcaattgggtggatgatatggacatttcagacagtgagcactcggatgagttagagaatatgagtgatggatccgattcagactgggtacagtcgacgaggaaagccaaaaaacaccagagaagagtgtctagccattcaaatcctaacctggattgtcaaaatacacaaggcagtgcagaaccagagaagccctcagatgaaaagtgcattttgcccaaatacatttcatcagacggctgttcatgctcaaaatcctcctcatgcaagaccaacaaatgcgagtgcagagggtcaggtgcacaatgcggtgcaggctgtggttgtaaggattccaaatgttctaacagggattcttctactatagaaaaagccaatcagggagccatgcttcttcagaccgcgttttctgagaaggaagcccaagatgcaaagccaagaaagcctttgactaacattggtaataatgtggttaaccaaactgccgagacaaagaagcccaggaaaaaccggcgcaagtcggcaattcaactcgtcccaggacctctcctgccgtccgagccagtggccaccgaagctgcccctcgggacattgccaacattcccctcaagctaccgagagccatgtcctcggtgactcctgcggagagcaaccctcccctcacagaccgcaatgctgccaaacccgacgaatcagtgagcaccggcagcaagaatagcaccggagctgcagccacgagagcaccgtctcagctgagaaaaaacgcaaccaccgagaaggagaaccagttgcgataatccgattgctgacatgcagtatccgtgactccgtgtcgcttaagccttctgtttaacagtgggggaggctgcctcggcgtcctttggagaggcaggtagactctggaagggctggcgctctcgggttcctgtgggaaatggcgtgttctgtggaaagccttagctctgctttggctggaatgcgaccttcttgtataatggaaaagtaacatgctggattaagctatgtcagtctcgtaaatggtctccgttcattttgaacatactgaggaaatcaatctgcgcatctgtatgcttagactggtacactgcaggatgcacatttcctccacagttcgacagcataacagatgcaatcgtatatatcgttgcaaccaagtggtgttcttttgagattataatatatcttgaaaaagtcaaa

SEQ ID NO: 3082 - DNA, 760 bp, Zea Mays
aattttccaaaatttccagctcgacaagttggacttgttagagaccagtcagtagctgccattcatccactcccctttcccatcggaggaggacgagagatccgtcctgcggtgtgcgatggactcccccagctgccggctgttcggtgcccagagatcgccgcacgatctcctcggcggcggcgccgttgcggatgtggtgctgtggaggaagaaggaggtggccaccgggacgctggcggccgtggtggcctcatgggcgctcttctactgcgtgcccggctacactctgctctccttcctggcccaggtgctcatgatcctgctcaccgtcctcttcgtctgggccaaggctgcgcagctgctcaacagggcacctccgcctatcccattgatgaaaatttctgacgagtcaatgagtgaagcagcagaaatggttggtagcttcatcaacaaggtgctcaaggatttcgaaaacattgcacttgggaaggataacagcctcttctacaaggtggcttttgtgctgttgctggcctccatagttggacgactgaccgatcttatcactttagtatatacaagtgctattattgctctcacggtccctgcattgctggagaaatccgaagaacacattgccagattcttcaagaaaacttcgatatatgttcaggcatttggcagagcatgcaaagagtataaatgttctgttcagaggtactcactggctcagactctggtcgcggctccaaagaag

SEQ ID NO: 3083 - DNA, 748 bp, Zea Mays
gctactggtacttcacaaagcttttctttatataagagacacgatttattacctaccacttcaggagcaggggagacccaatgtcaaaggctcacacatgagtagggtttgagagggataaatcgtggtaaatcttccaccacaaatacagagtggccgagaggctacttcgaacctgtgacctagtggcttagttatatagctcacgccacggcacgaggcacttagttctatagctctccccactgcaccatacacagtgaatcagtgatataaccctcgcaccatgtctgttcttctattatctaccactatcctgcagcataagtatctttaaagatgctaagagcatagagttttaactcattaagtcactgatttcaataaacagtgaaacaaatgatcagttaattacttaatttgacctaacaaactgctgcaccaacaataatattttttgcaggagcatcaacatgtaggaacagtgaccatcaggactttctacaactggaagatactatttctccaggagtttctttcaagttgaaaacttacgcaaaatatgctaattggaagccttataagttactcataacttttcaagtcttttcccttacattgatttaagcatttgcctctagcagtatatattggagcactctcttatgaacacttgcttgcttacatgtaaaattccgctgactagtcatatctggagaatcgaaaaagttagttacctgttgcgaac

SEQ ID NO: 3084 - DNA, 799 bp, Zea Mays
tccaaagccaagcgctctttctccatgccgctcagcctcctctctgtttcagtcgtggagcatcagcaatccacatcatctccgttggccgagcggttccctcgcggcgcccaggatccttcccagacgcgctcggctccctggtctgtctgtcaccttgccgacgcctcctctgctcctccacctgtagctcgcccctatctcctcctctccccatggcggctccccctggatccctccctgcgcgaaccctctcctgcagcacgccagtgccgaccacaatctcccatggcgcaggagctccccattctcctcttgctagggcgccgtcgctgggctcgcccagtctctcgctttctctgctccagcagcaaccgtctcaaggtattccagttcgtgagcagcagcaatcgatatagctcctccgcaccgtggcgcagccagccgtcgatgccatgtccctgcaacctcgtgtcgtcgtcgtgcccgccttggtggagaagaaggttcagttcaacactccctaagtgttcgatgatatgctccggtggccatcgtcgttcttgcaaaaaaatcaagtcggatcatgatgtggtacgttaattgatcacggagtgggagaacaagagctgagttgatctcaagggatactgatgaatgaacttgaagatttgcgtgatcgaatcaagcgccaggataagagatgctccccaagcggacgtcatctaacaacactgacttagtgttatctcaggttgtaattttgtaattttgttctgttgtggatgatgctaagtgc

SEQ ID NO: 3085 - DNA, 1654 bp, Zea Mays
ccgtactgtactgctcgtcgtcaaatcaaaggaaaattgaacgaaagcagcccaaccaaaatcccctcgccgcatctccccttcctgttcccgtgttccgttccgtcccgtccctgctcgacttctcgcgtcccgacgtcgcctcaatctcgaagcctctccggcgcagccgccgcaatctcgactccaaggcctctccgaccaaaattcatctagggttttcgcttcgtccgtcgcgatgggctccaagaagcggtcgccccagcatcccgcgtccccagccggcggagaggtcggtgctcaggcggcggggaaggccacgccggtgacggcggcgccggaaacggcgcccgtggcggtggtgccgaagcctcccgacgtggcgccattcctgaccaaggtctacgacatggtctccgacccggccaccgacgcggtcatctcctggagcgccggcggcggcagcttcgtgatctgggactcgcacgtttttgagcgcgacctgcttccgcgacacttcaagcacaaccacttcaccagcttcatacgccagctcaacacctacggatttcataaagttgatccagatagatgggaatgggccaatgaaggttttattaagggccaaaaacatcttctgaagaccatcaagagaaagaagaaatcctctcaggatgtacctagtgatctgcagtcggtgcctgtcaaaactgcacctggcactgagaatatcgagataggaaaatatggaggccttgaaaaggaggttgagacacttaagagggacaaggcccttctaatgcagcagcttgtagatttaaggcagtaccagcaaacatctagtcttgaagtgcagagtttaattcaacgcctccgtgtgatggaacagaaccagcagcagatgatggcacttttggcaatagttgtccacaatccggatttcctcaaccagctcgtgcagcagcagtgcaggagtaactggtggaatgatgatgggaacaggaaaagaaggttccaagctttggaacatggccctgtagatgattctgagacttctggtggaggcgcgcaaattattcaatattgtcctcctgttcctgaaacttccaatcaaccaacaccagcaaatgaagctttctgttcaagccctgtacaatcagtttcaagccatgcacttgagatgcccatggatgtagaaatggcttcaaacaatgttggtacacttgattcaactgggaatgattttactgacacctctgctctatgtgaatgggatgacatggatatatttggtggcggactagagcacatccttcaacagacagagcaagactttcaagtggaccctctaacaattgaagattacggttatgaccgtccatggttagagcaggactgccaggtagaagcgcaacagaattgcaaaaatcctcaatatgctgatgtcataactgaagcatgagcggtggtcccagagaattttgtccaataacgtaagtggatagaggtgctttgcaattaaaaagccctttgcgctttgttctattcatgaactttactattacttggcatgatcaaacacaaaccagggtcaagcattcatttgactccttaactatacaatagcttccttccaaaacacagaatctacttc

SEQ ID NO: 3086 - DNA, 1886 bp, Zea Mays
gtcctcaccgcgtcgggaagaccagaatggtgaccctcggctgtcatgctttggtctgatgaaaaacagcagggatggaaaaagctatagcacgaacctagcatatacacctccagaatatctgagaaatgtgaaaaatatgctgttctctatttgttcatgtcagtataactggtggttttcagcagacaatcattttttaatgttgctactacaaagacatgatttctgaaagctgagttccaaaattgtagtgttgatctttttattttaaaagaaaaaatgtacatctggaatttagttttttggaaggatcagtgactcagtttaagattttctgattcctttgtatgtgctatttaaattgagcatattgtgcccttggtaagtcagttaccaggtgctgtgagatggtctggttagtgtgtccttggtctctgtctgtcattgaaatcaataagtaatgcaaacaaaaaagcaagaaatgcttcatctgtattattttctgaggaaagttttattttcaggcagggttactccagaaagtgtcattttcagttttggcactgtacttcttgaccttctcagtgggaaacgcataccgccttcacatgcgcttgatatcatgagaggcagaaacatccaagcagttatggattcacatttggagggaaactactcaattgaggtggctactacattggtgaatcttgcttctcagtgtctacaatatgagccaagagatcgtcctgacataaaaaagttggtttccattctggagcctttgcagaaaaaaatagaggtaccgtcctatgtgatgcttggaattgcaaagccagtggaagaaccacaggcacctcctactccacagcgccctctttctcccatgggagaagcttgttccagaatggaccttactgccatctatcagatcctattcacaacgcattaccgagatgatgaagggagcaatgagctgtcttttcaagaatggacacagcagatgagggatatgctggatgcaaggaaacgtggcgactctgccttcaaagacaaagattttaaggcagcaatcgattgctatactcagtttgtcgatgtggggataatggtgtcaccgactgtattcgccagacgaagcttgtgctaccttatgtgtgaccaacctgatgcggccctccgtgatgcaatgcaagcgcagatcgtctaccctgattggccaacagcattctacatgcaggcagttgcactatccaagctaaacatgcagagtgacgccgtggacatgctgaacgaggcatcacagctagaagagaagaggcaaaagagcacaagagttccttgaatggcattgccagctcagagaagtggcacgtcttctatacatataacatagattgcacactatgtagtacagtagtatattctccaacctttcccaccctgtaaaaagcgcatagtatattgcgtggtctagaattagaagtaaggagaagtgaactgcagagaagatgctctttgctccctggactctggagccctgtgatggcacttgtgtgataggttcaattttttgggcccatgtatataacatccgttgcatgggagtttagagtataggttgccggttggtcaggagggccctgtcgccgaagataataaacatgttatgtttgtgaaaaactgtctgggtatcgcttccagcagggcatgttagtaagggcttgtttgtatctcagagctaaaacaaaagtgactaaagttttagtcaggctaaagatctaaacattaagagctaagagctaaaagtgactaaaataacaaaaatatatcattcccgtcacttttagctcctaacgaggggtcaaactttagtcaaattgttt

SEQ ID NO: 3087 - DNA, 617 bp, Zea Mays
gcgaggggcaaaggccaaagcgaactgaaccgatccgcggttgtgcccgtgccgcgcgccagcgccacgcttcctacaatcctactgtagtttaatccgcttgcacggaggagcaacgccgagcaatggcgctcgcagccccttcttccctccgcctcctcccgaccacgccatcgcaggcgccatctccgccctgtgcctcccgaccacgccatctgcgggagctccgtctctgccagagactcgccaccgccgccgccgccgccgccgccgccgcggccgcggccacggctccactcgcttcctcgcccaccacctccgtggccgtggaggagcgtggtgcggggaagggaacgccgatagatctcgcggcgctcgatggcacctggaggctgtgttacacatcggcatcagacgtgcttgtgctgttcgaggcggccgagaggcttccactcctgcaggtgggccaaatataccagaaatttgagtgcaaagatcgatcagatggtggaactgtgaggaatgttgtaaggtggagcatcgagaacttgctggagcacaactgctggtacttaaatgcatggaccttggaatatataaagagtatgacagttgga

SEQ ID NO: 3088 - DNA, 1658 bp, Zea Mays
ggaaaacaacagctgatgccccccgcgaagatcccgatgctgtttcggtgatggatcgtcggcgtcgcaggcgaggcggcccacgcccacacgccacgagcccacgacggccgagggaagggagaagggaccgacccggcgcccgcggctgcggtcgttgggctcgggcgccgcgctaccaaccaaaccaaaccccgtaaccccaccccatcttcccaaaaaagcgacgaatcgcgcagcgcggaagggggaatcgctgcgatttcttgtggcccggcggctccagccccacggctgccgagcggataacgaacgactggcggcggctcgcgtcggccttcctcctctccttctctctcctcgcatcgcagtcgcagcaggcaacaaaccaaatcgcttaccgcccccgaagcgtctcggttcgcatagcagagctgctcttgcaacaagccaaacaacccagtggctgctagccgagacaggggatagattgagagaggcgcgcagatggcgacgccgtcgtcgtcgctttgctccagcttcgcctccctgcggaccgcctccatcggccacccccgtggcatcgcctcctccacgcccaggcattccatgtgagggcatcagctcgggttgacaagttctcaaagagtgacatcatcgtgtccccttcgattctgtctgcaaactttgcgaagcttggtgatcaggtaaaagctgtggaggtggcaggatgcgactggattcatgttgatgtcatggatgggcgctttgtgccaaacatcacaattggacccttggttgttgatgctctgcgtccagtgactgatcttccgttggatgtacatctgatgattgtggaacctgagcagcgagtccctgattttatcaaggcaggtgctgatattgttagtgtccactgtgaacagacatcgaccatccatttgcaccgaacagtcaatcagattaaaagtctaggagcaaaggcaggagttgttttgaatccagcgactccactcactgcaattgattacgttcttgatgttgttgacctggtgctgattatgtctgtgaatcctgggtttggtggccagagctttatcgagagtcaagtaaagaaaattgcagaactgagaaggttatgtgcagagaagggagtgaacccctggattgaggttgatggtggtgttggtccgaaaaatgcctacaaggttattgaagctggcgcaaatgccattgtcgcaggttctgcagtttttggggctccagactacgctgaagctatcaaaggaataaagaccagccaaagacctctagctgtagccgcataaagagctggacgtgtaatcatttactctgtgcaagtttaccagtgatgcgatctgtatagatgtgtgtcttgtccagctatacgtataccggagatgaaaggagacggaggcagtgaagaaatatccttttttttcttctcatttttcacgaggatgccgtgcactgctcccagaatgctgtgtccaatttacaaacgcacaggtggcacatgaactagcagagtagctctctcttgaaaggaaactgtatttggggtcgatgaaccctctggtgttattcttcagactggtaaacgatgtaacatgtttgataatcaataaaaaaaaata

SEQ ID NO: 3089 - DNA, 3110 bp, Zea Mays
gagccgctctcttgctgtgacttccgcgggggtttcatgttccaaatggactgttttaagctgggtgagctacattttatcaggagaaattgatcaattgatttgaagtttgaacaatgtaccagaatgtatgaaataaagccagtaattgatcacgctcatggagatgggtgacgatgacaattcttcaagcagaaaatgtaacacatcatcattaaaaatgttactagagaaggagatgtctaaagaagcagagtcaaagagaagacatccaagtgtcattgccagattaatgggtcttgaggaggatttacctactaaagaaccaactgtacaccataccgtaagtgacttgagtagagatttgaatgccacaaacaacaccttacagggaaaagaacaccatcactttataatgtcgaagacacaaaactaccaatcctgtcatgaaaaaatcgaatacaatgatgtttttgaagtatctgaaggacaaccgggaacagactgttttcatgatagaacttcacagaaaggatggtcttccgagaacaagagtgagcaattcaatattgcacgagacaagatcatggaaccagaacagttagctattgaagagaagctcctttgtacaaaggagttgcctgaagctcttgtttttccatgttcaaatagagatttatttcttgaatttcctgaagaacataaccccacattctcaagacagtcgagtgggcttcatgcaaaccaagcaccgcctcaaacaaaacgcattacagtgctgaaaccaattagatctgttgatagtgatggcataagacgacccagagcagaaattggtaagcaaaatgtattgaagatgagaaggttccatcagattcctagttcaaaggaagagataccttcccaaccaagtagaataatccttttgaggcctaccccagggaagccaggtatatcaaaggcaaagctgacatccagggcaacttcatttcagttacctaaccgtaacagtctcaatggatcattagatgataaccaggcatccataggatctgcaggactagtgcatggtatgatgcagtgccggcaagatggatgtcaccaaagagatgattctttattatcttctgcatactcaaatggatatgggggagatgaaagctcattcagtgattcagaagttgattataccagtggctctgaaatcaactatattgaagattgtgataccctcagtgactccgagggaggtagccctctgtcaagacactcatggaattacataagaagatatgaaggtcaatgctcaagttcatcctttagcaaaatatcccacttttctgagtcgtcagttgtaacggaggccaaaaaacagatttcagagcgatggtcaatggttacatgcaatgagatgagtcaagtgcaactgtcgagaagaaaatgcacgttaggtgagatgctctccattaaggaagcaaaggaagacgaggccaccactgggatgttttatgtttccagcaaccagtcatgtggcctggagaatgaactgactacacgttctacaaatgtaactacttctagaaaaaatggtgacaatggggagagatcttcgaaattgccaagatcaaaatctgttccagtgatttcatccacgtctgataacatgacggtgaacatgcaagcttcaaatcctgagagctgcaaacttaaagtggctgttgtgtcaaataaaggaaaatcagctttcaagggaagagtttcagattttttcttgtctaaaagtaaaaggccaagaaggcagatgcctgcttatcatcaatctgattgtattgctgaggggcttgaaggctgtattactcataatagacaggactgcaatcataaaatggatgccatcgagaaagcgatgcattacgatgatgaattcaatagtttttcgacacgaatatcaactagcataccagatagaacaacttctggtgcatctgtttcattgggcagttcaaccggaaacctggataaactaggagtaaacaaatgcctaaatggtaaccgtgatcaaccaagccctacctcagttcttgatgcaccctctgaagatagcagttgtaatgagcctgaaacacttggaacaactacttccaagaatgcgaatgatgatgagtcagagtgccacgtccttgtgcaaaatataatgtcatcagctggattaggcacttcacagtcacgtatggttttcgccggctggcatttacctgatcaccctcttgacccggtgctgcgtaacaaagtatctcagctgcaggagaaaagttcatacagaaggcttctttttgactgcgtgaatgttgctctaattgagatcggtgagaacgccttactgagcgccctcccatggagtaaaagaagttccagaacatggaggggcacctcatctcctgatctgggggtggaggtctggagtattctcaaggactggatacacggggcacggatgtttgtggtgagcaagagagataatgctgggatcatactggacagaattgtgaagcaggaggtcgaagcaagagggtgggtgaaactgatgatggcgcaggtggttgtcatcaccgaggagctcgaagggggagtaatggaggagctggttgaagaagcggtgctggatttttacagtctgttttcagtggtgagatatcgattgtgactggtaaaactttccacggagcagctggtttgtgtatgctcttgttttgcagctacaccggtcgttcgccgccgtatccattcccccctggttctctttctagctggttctgcttcttgtattacaaagtttgtataaacttctggtagatgagaacatggtaattgtgcagttcatgagaagttttgtaggcaaaataaagtgagccaaactttccatggtgggatctgctgtttgtgcatttcacattgttcgttcattgttaatgagcaagagcagcgaaaggttttgccagattaataagtgctgtggagcatatattatctcattgagaatgtatttattaggcgcatagtaaaatgtaatgtaaacactacatacctcaaaagacaaaacgactcataat

SEQ ID NO: 3090 - DNA, 1845 bp, Zea Mays
cacaaacatacgcaccctctcgaccggttcgacttcagaacttccagcatcctatcagataccgaaatctccaactcccgcatcgcatcgaaccttcggcctgcaagcgaattcgtcctcccctctcctaccggcgcgaattcaaccgcccgcaaagccctaggccgatgcgtccgatccggctacccgagccgccgggtgtcgacggcatggagacgcccgagatcttctctggcagcggcactggtggcgccgccgtcgttcgccgcgccgtcctcataggcaacggctcccccggcgcagaaaaccagtgtctcggcctcgcccgcgccctcggccttgccgacaacctcacattctaccgtgtcacgaggccgagaggagggatcaatgagtggctgcactttctccccatttccatgcacaagtttatagaccaaatactcaggcagttcttccggaacacaaggttcgcaatagtggttcaggggaggaagccgcgtgtgctgaatggtgcatcagttgggttgtctgcagttctggaagcaaacgtcaagaagattgttactgtagcacgcgatacgtatgagaaggaaggtccgacgttagtcgttgcttgtggctgggacaccatatcatattcaagcttgataaggaaagtagcttcagataatgtgttcgtcatccaggtttgatttagtggtgactcctcgccatgattactatgctttaaccgctagtggacaacaagaagttccacacctgttccgcagatggattactccacaggaaccacccaggagtaatgtggtacttactgttggtgcactacaccaggctgattctgctgcgctacggcttgctgctatagcctggcatgatgaactcgcccctttgcctaagccgttgctaattgtcagcattgggggccccaccaggaattgtaaatatggtgtagatcttgccaggcagctcataacttctctgtataatgtgctagatagctgtgggagtgtcagaatctcattctctccgagaacaccatggaaggttgctgatactatatttaaagaatttgctggacatcccaaggtctatatttggaatggtgaagaacctaaccctcacatgggacatcttgcatgggctgatgcttttgtcataacagcagactcgataagtatgttaagtgaggcaggtagcacagggaaacctgtttatgttattgggaccgaacactgtaaatggaagttttcggcttttcacaagactctacgggagcgaggggttgttcgcccgttcactggattggaagatatttcaaatagctggagctaccctcccctaaatgacgccattgaagtagctactcgtgttcgtgaagtgattgcagaacgagggtggacagtgggatgatgtgatcataagtagctctctgttattctgtctaactttggtccagatatgatatatacggtaaactatagagtttggttagcatcactgtggattcagtttgtgtcgtttggaaaaaaaaaggagagaataacatagccatggaatggcctgtacaaaaggtgaccctctctttcatggtacacccccaagccaaaattttgagtaactgcacagctccgggagatttttttggctactggcaacatgttgcctgatgtaaatttaagctgctagaaggaattggagtaaatagagttgataatgagaaaatttgaagctgatgcaacgtttcgggttttgtatggttgtatgcttatgactttaccctgttttgattaaatttgtgtatgatgaaacatgcagaacccatcagcttttacccctttt

SEQ ID NO: 3091 - DNA, 1569 bp, Zea Mays
aatcgcagtcgttcatctgtctcacgcgggagagtgagacggccatggcggaggcgcaagccctagtaccggcgcaaggtcccgacgaggcgcccctcgatgcgtccgccattcatagccgggtggagcagctctcattgaaaaggctggaggtggagccggaggcggaggtggcggaggatgaggtggcactaggtttggactccacgcacaaggcggctcaggatgcgatggatgagtgggactcggccactgctgcggtttcaattgatgatttggatgcatacctggaacaactgagaaaggatgtagccatggcagagcaggggaatcagaaggtatctgatatgattcaattggatgttggtattgaaatgctggagtctttgatttcgaatcttggtccaaaggctttgaaccattttgatgaaagttctgttctggggctgtcagactcaactgattcatgcagaaatcgaagcattgctgacaaggactacatatatgagttggaacttgatcaccaaatagaaaaaagtacgatggaacttgaaattttacaacatctacaaagggatgatgaaatgtttcaacttgaatctaagttattgccatttggagcgaagatcttagactttaaagacgactgtctcaggatgttcctcaaggcaccaatattgacctcagattgtgaaatttatggacagaagtttaattgttctattgattcatttatttcagaccatgagctgctgatagaaattgataaaataaatatggaaccaaagaaagtacagatcattcctgatgacatgtctgtagatatactgattgagaggatggagtcctccagagatacagtttgttctccaaccttgatatggctaattcagcaatgccaacaccagtctataatcaatgctttgagacgatcattggtgaatgatgctaatagttcgaggcattgttttgagtacttaaacaaaaaggagatgattgttgctcacttagatcgtggggatcgtccaacaaatattgcttcaactatactttgtaagaccaaggaactggccaacgaattggagccgcagattcggcaacatcttctaacgcttgtggatgctgttgaagatattatcattcgagagctgcggtctcgttaggaccacgctgtcgacaggaatagctttgggggataatagacagcctctactggctcgtggatcaatgtttcactttcacattttgtacagaagcgactctatcaccgttacgcatctacggctgatttttttagtgtctggcgcgttgccagaaaagagaatcttgttcaactttattaagtttgaaccgtagcaaatttgaccagtcatgcctgattcctatacttgccttcatccttttttggcggcatgtattattacgagaatacactcgtttccattgcaaaaatgtactggggcaatgttaggtcaagatgcacatcatacgtgatccgcatgtcaggctgcagtgcccgtcatctgcaaatgtagtgcgcattgtcatgggataaacgtctggttcttg

SEQ ID NO: 3092 - DNA, 1854 bp, Zea Mays
ttccatggattctgctgttattgtactaataatgtcacatactccatgatcacaccaataattcatggataaatgaaacactggttgggggtggtataggtacactcaacggtgtaagcagaggtcgtgggccttcgcaaggtggaggcagaggtggaagccctatgtatcatcctcttatatggaatgcaggaattacatcaccacgtggtagaggccgtgggcgaggtcgaggcagtggccgaggtcgtagaaacaagagcagtgataggcagttagccattcaagcatccggtggatcttttgcattacaggctcagcccgaaacggtctgtgcaccagcacacatggtgcaagctacaaccagcagttcaacacggggtactgttgttccagctgcttggtgtgatatatgccacgtggggtgtaatagcaaggaaatccttgagcagcacaaaaatggaaagaggcataaacggtctgttcagagaatgcaagatatggctcgcctgcaaggtacgactcctgctatagctgacatgggtgctccatcatcttctcagttagctgaagtagaaggcccctctaggtcagtacatatggtcccacctcttggttcaacaagccttagtggggagcacaaagacttggctccagaaaatgtcggagcttcagtttatggggtgcaaattactgaggtgccaggcagttcttccaagcaaaacaaaacacatcatacatcaacagttggtcacggtgttgaagcacaggtagaactgcatgtcgctgttcaagcttgtcagccttcaaatgagatgaaagatggcggtgaagccccaccaaatgcaacaggtccatcaaatgcacaactggtggaagcaaggatgggtgtcaacggcaacaacaatggctcaaagaggaaaccgacaggagctggccgtggtcgaaagaagctgagagtgtctcaagccccacagcaaaggcggcctgagcgagtaagggagcaaccgctagtctgcaccatttgcaacgcgatttgtgatacaagagctgtatttgacatccatctggttggtaaaaagcatcaatcacgactcaagcgttctcaaggcccagacgtgttgttcggtcctttggttgggcatattcctccaaaccagtccgcagctcacatgacaggagcccctgagccactgtattttggctttaagagtatgggagcttctttggttgagcaggaggcatatctggctggcgcgatgcagcacgtgttgcccgttcttccacaagctggtccaaccatcatggctgctgattatcctgcacaaccggtggctagcaatcggtgctgctagcaatggaagacctgtaactgcatcactgtgcacagccgttggggaagctgaagtgagaatgtgacaggcatgcctgtatgtgccccgcatgatgtctactgcctcacaggtttcattgcttttcggtgggggcgactggagagcaaccgaattcgtagtagaagtagtactgaacaatctgaatatcagatgaaaccatagaactcgtctcccagtctgcaaaatgcacaaggcttccgtcgaattgctagtagtactatgatggaacaatttggttgacataggcctgggtgtatgtctgcaaaacgcttttttaaagtcggtctcaacagcgactttttatgatacattgtgttaataactgtgacaaccagcttcatctcattttctctcttcataattaatctatcaactaagtaaatttgccgatatgtcatagtattaattgagaataaaactcttttcaaacttcttcccctatccaatgcaacgaatcagc

SEQ ID NO: 3093 - DNA, 946 bp, Zea Mays
acacaccagtaccactgcacaaaagcacactctgttcggcttgccttgtcctttttccttgccatatggctaccaagatggtcctgtgtcgctttgtagccctcgcggctgtcgcctgcctcctccgccctggcgcgcccgtcgagctccaccgcaagctctccgggtggtccgacgacgcgggcgcgacgtggtacggcgcagccaccggcgctgggagcgacggtggtgcatgcgggtaccagaacgccgtcgaccagccgccgttctcgtccatgatcgccgccggcagtccatccatcttccagaacggcaagggctgcggcgcctgctatcagggtgccgtgcaactggcgagggctggacatcgcgttcaaggtggacgccggctcgaacccgaactacttcgcggtgctcatcgagtacgagtccggggacggcgagctggagtccgtggagctcatgcagcgcggcggcggcggcgggggggcgtgggcgccgatgcagcagtcgtggggcgcggtgtggcggtacaactccggcgacaccctgcaggcgcccttctccgtccgcctcacctccggctccggcaggacggtcgtcgccagcaacgtcatccccgcggggtggacgcccggcgccacgtaccgctcggtcgtcaacttcgacaactaacgaggacggacggacggaccgaaataacggcacgcccgcccgcccgcccgccggccggccgccgggatggccgtgaaaggcgtggcgctatagcttttagtttatgattcgagctgtgcgcgggtgcctactatgccgacgacgctactgtactgttgcgtgcgtgacatgtgcaaatccgcgcagtcaccgtgtaccgccggaatggcgtgtgtttctttgaataaaataaaggctggaccggaagcgaacaatggcttgatttttcgct

SEQ ID NO: 3094 - DNA, 2131 bp, Zea Mays
cgacggacgagatttaccaacagccaaccagggaagatgtttatgccacgtcatgtcgcgccaaagcttgtcaaatacagcggtcccacatcagtacgtcaccaatcgaactgaatggaccagtcgacgtcatcgcctccctcgcctatccgctcggccgttggcgctcaccaaaaccacccagaagcctccgcttgaccgcttcactcgctttccgcccgccgcgccatgagcgccgccgcctgcctgttcgctgccgccgtctccctatcattcccgtcgacctccgcaccctcttccgcaagacgccgccgcctccggagccccaccaccctcctccgctgctccccgactcgccgccgtgggccggtccggcggacactcgacgagcggctgctcgaggccgcgccggcggagaccgaagacgtccaaaccgctgttgatgtagaggatggaggagggatcgctgagggcgatgaagtgggaacagaggagatggaggagctggagcagcgaccgccgacgagggctttcgtgaagagcaggcggcagcggcaggaagaggaggaagccgcggcggggcaagaccggttcaagctcatcaatggcaaagagatatttcaagagaaggcttatctggttggtgttgagtgcaaacggacaggagggaacctgttcggcatagaggagtcccttaaggagctggagcagttggctgatacggcgggccttctggtagtcggctcaacctatcagaagctttctaccccaaatccaaggacttacattggttcaggaaaggtttctgaaatcaggactgcaatccaagcacttgatgttgagactgtaattttagacgatgagttatcccctggacaactacgtaacttggaaaagtcatttggtgggagtgtccgagtctgtgatcgaactgctcttattcttgatatttttaatcaaagggcagcaacacatgaagcttctttacaggttactttggcacagatggaatatcaacttcctaggttgacgaaaatgtggagtcacctggaacggcaggctggaggtcaagttaagggtatgggtgagaagcaaattgaagttgacaagcgcatcttgagaactcaaataagtgccttgaggaaagaattggaatctgtacggaaacaccgaaagttgtaccgcaaccgtcgccaatcagttcctattcctgttgtttctctggtaggatatacaaatgctggaaaaagtacactcctgaaccgcttaactggagctgatgtgcttgcagaggataagttatttgccacattagatccaactactagaagggttttgatgaagaatgggactgagttccttctaactgataccgtcggattcattcagaaattacccactatgctggtagcagcatttagagcaacactagaagagatatcggaatcatcagttatagttcatcttgtggacattagccatcctttagctcaacaacagatagatgctgttgaaagagtactgaaggagttggatgtcgagtcaatccccaaattagtcgtgtggaataagattgacaatacggatgaaccattgagtgtaaaagaggaggctcagaaacaaggaataatctgcatatcagcgatgaatggtgatggtttggaagatttatgtaatgcagttcaagcaaagttgaaagactcgatggttcctatagaagcttttgtcccatatgacaaaggagatctcctgaatgacatacataaggttggaatggttgaaaaaatggagtacaaggaaagtgggacatttgtaaaagctcatgtgcctctacctctggcaaggcttctcacacctctacggcagcaggtggcagccactgtgtgatgtgcatgtccccgatcccttgatgccattggcactcacaaaattaccacatcttgtagattcacaaaaggaatagctttgctgtagaaaacttagattatcttcattgtgtttctacggttctaccagagtaccgtatcaacaggtgcacaggactagatagctgtatgtacgcacaacagaaatgtaaatgttctcagcagaatttaagccccgtttggtttgggtaaaaacaaagaaaaaa

SEQ ID NO: 3095 - DNA, 2296 bp, Zea Mays
caacaacggccgcggcagccgcagagagacaaggtggacacgacaggactacaggacaccgccccgaagcggcacctgcaaggcggccgagaaaagcgcagccctgcgcccctgccacgactcggccacctctccctctggtctcctcctccacttgctcctgctcctccagacctccactccacccctccaaaaggtctagtaaaatagaaggaagccgcccccaatcgttcggtcgttcctagcccggcgcacggcgcacgaaggggttcgatcggatcggcgccggcggaggcgagatgtgggagtcggtggcgctgacgctggcgggcaccgccggcaataacatcggcaaggtcctgcagaagaagggcaccctcatcctccctccactctccctcaagctcaaggtggtcaaggcgtacgcgtcgaaccagctctggatcagcggtttccttatggacatgtgcggtgccgcgctcatgctcaccgcgctctctcaggcgccggtctccgtcgttcagcccattgctggttgcggtctcgcaatactctgcgttttctcccatttttacctcaaggaggttatgaacggcctcgattggattgccatcacgctagctggtctcggcaccataggtgtaggtgttggaggtgaggaacagaaagttgaccagatacctcttttaaatataccctggctagtgctctccattgtcatcttgtttgtaggtactgctcaacacttggcttcatatgtataaaaagcaaaggcgtgagcaagagttgactggacctgaagtgattgaggagatcatatatggcttagaatcaggcattttgtttgggatttcttcagtgatctctaagatgggatttgtgatgtccgagatgggttttccaaagattgttgtgcctgctgccatatcttgtagtgtttgctgcagtgcagtgggatttgtgtatcaggtacatctagttttttcgagatttgccaactgggtttgtgtcattcatcgtagcctccacaggaggtgcgatatgttgttgttcgtagaagataggccacagttgttttttctcttgtaccaattcacgaattatgtgcccacaccttcataaccttggcctttggggagggggggggtctgaagcggggttgcatagtggctgtagagacaaaagttgaaaacaaaacataaaattcataaacagcatgaccgacagggtatactgttgtaaccatccgttgaaaatactatagtcagttttttagtcatttagtgggactgagtgactttatttttcacggcgaaaagtatgtgctggttttatgcataaaatgaaactcctaggacacttacactgaaattgtaatttcaaggacatggattatttgcaaattttaatctcttgcctcactgcagatattgtactgattgttatttctattataaattgcactagtttattcgacctgttttttttttttgaaacattcgtatgtttaagatgaagcataaggactagcccaaccgttttcttgcagtgtcgttacttcatctatattctccttttatggttcttttatccatgcagactcgaggcctcaagcatgggagggcaattgttgtatctacatgtacatcagtggcatctatagtgtccggtgttgttgctggcatgattgcacttgatgaacatctgcctaaagctcccacagctcgatttttcctcttactgggatggttcttcatcatcacaggagtaatactgcttgttagttcaacccgattgattgcgcgtctacctaggcctgttcagaagtttttgaagagcaacatagagcgcacccacagcatcaggaggcctggttcagcacgagggaaggatcccatcccaacaacaacgatccatacgtcgtcactgcacttgcttgcttctccaacaaaggagaaggcctagaaaaatgttggcactagagcaacttcgtttcggcgcctcacgtttgccatgtcattgattgattgaatggttccgtgaacgtagtctagagtagcatcttaaaagcttgggtttggttattcaccatactgccctttataggtctaacagagacttggggaaaaattgctgagtttttatcaggtctcgttttttttgtttggttgctgagtgcaaaatccgaagctgttactctctgacccttcttaactctcgtcatggaaagtatgttggtcaaacttaaagactagatttatagataaatattattaatgtttgtgtttttaaataa

SEQ ID NO: 3096 - DNA, 3927 bp, Zea Mays
caaaggaaattcctctttgcaccttctggaaatcatcgacgaataagacaaaacaaagggcaatggggggacggaattttttttaccaccagctcatgattcgggcatagcacaggtgacgacgccaaagcgcacgacagacgccctctttccgcgtcaccttaaaactctcaaaacacgccttccaaattgaccgccttctccttgcactaatccacttccccgaaacggcaggagcgagcggttaccctttcccaagtttgtcgcgctcgcgcccgaacgctcccggctgacggctgggtccagcggccgatgggtttttaacgtcaccttccctccccatggccaggggaggccggagtaggcgctggtaaacatcgccaacaacaacgacgcacgcagccgcagccgcagcggggggagaggaggtggtggcattggcaagcatcaccacccgcaataacaacgacgacggcgccagcagtccagcaccaaccaccacttttttcgagggaaggcacgaacaggcacaggcaggcgcgcggcacggggtaggaacccgtcgcgattggcccgtccgacgacgaaccggtcgcgggcctcgtgcccgtggtggatctgactccacctgcgcgcggtcgcggtcgcgggcgccttgcttccccctcccccgctcatcgccgcggcgtccacggggcaatttccatccgcggggcgccgccgtgtcgactccatcttcctcggcggtcaatgcgggcgcggagatgagagccggcggcggggaggaggaagaggaggaggaggtgttctacgagtcgcgagaccgcgtgctctcctcctcctgctcctccacctccgcctcggacgatgacgacaacgaccacccgcgacggcgacgggacggggccgcctctgcggcggcggcggcgctcgacgtgtggacgtcggagccggcgcccgtgcaggagcggcgccggaagctgctccagatgatggggctcgccggggaccccgccctagcgcgcctcgagatgggccgatcggtctcctacgacgggcccgtccgcccggcgccggcctcgcccatcccccgatccagatcagacggcgccgtgccggtctcgtcgaccaagcccccgctgggcgggcggtcgcgccaggcgtcgtcgggctcctccgaggccacgcccgaaggggaggacgctggcccgaggtgcctaatccggaacctcgacgacggcaccgagttcgtggtcaaggaggagttccagctccgcgaggtcggcacgggccgccacttcaccatggaggagtttgttgacctctgcgtaggctgctcgcctatcgtccaggagctcatgcgacgcgataacgtggggagctccggctcgaacaacggcgcgtccacccccatccagaggtccaactccgactccagcaacggggctacgcgccaccggcggcacagcagctggcttcggagccttcgaaacgttgccggctccatggcggtcacctcccgcgaccgccgcagcagcgacgagaaggacacgtcctcggagaaaggcggccgccggtccagctcagcgacggatgacagccaggacagcgccggagcctccgtgcaccatggccgggtgcgcgttaaggtttagtccagatggccggtacctcgcgagtgctggggaagactgcgtgatccatgtctgggaagtgtccgagtttgagaggaaacgcgaggagaacggactgtgcaatcctcttgttgccatggcgtgcaacggttcaccggagacaacattagccttggccagcagtctggatgggagcaatcgtgagaagaagcgtcgggcaaggttcttggagggtcgtaggtctgtgagctcagaccggctaatggtgccagagcatgtgtttgcactgtcagaaaagccgattcggaccttcgtggggcattcagaagatgtgcttgatctctgctggtccaaatcccagtacttactttcatcttcaatggataaaacggtgaagttgtggcacatttcgagcgcttcctgtctaaaaacattttcacacagtgactatgtgacatgcatccagttcaaccctgttgatgatagatacttcattagtggttcactggatgaaaaagtccgcatatggagcattcaaaaccgtgaaattgttgattggaaagatttgcatgaaatggtcactgctgcttgctataccccagatggacagagtgcactaattggttcccataaaggcagctgccatatttatgatacatctgataataagcttctccaaaagaaacaaattgacctgcaaaataagaaaaagaagtccagtcagaagaaaataactggatttcagtttctcccagggagtacttcaagggtccttattacatctgcagattcaagaatcagggtttttgatggccttaatctagttcacaagtacaaaggtttccgaaacactaacagccagatttcagcatgtttagctgctaatgggaggtatgtgatctcagcaagtgaggattcccatgtgtacatatggagaaacgatggtagccttgaaaaaggcagaagcaaggcgaatgttactgtcaccagttcctatgaacatttccactgccaggatgtgacagttgctgttgcaccgccatctaatggctcagcagtggtatccagatcaaactccacgaagcacgatgagcgggattctgtattggagcatcctctgctgcatgctgtccctgaaaaactgcaagattcctccgatctgcagcctcaaagtggcaatatcctaagcaccagttcaaatcacagcggtgatagagcaacttggcctgaagaactgatgacgccaacaaagcagagccctcagtctagtgccagtcttctcagcggtgctgatcaagctccatgctggtcagcctggggaactgtaattgtcacagcaggccgtggaggtcagatcagagcatttcagaactttgggtttcctgctcgagtatagtactgtagctatgagaccgctgcctggtcttggcgtctgccctgcagcaagacgggtgatttttgtgtatagataggtgaaagtttgggtgatctgcacgcagtctgggactggattctgttgctgctcctaggtgcacctgcctgcgaacttcaactaacctacgacctggtactcaaggtacggcgaattcgtttgcccggaattgtatatgagaatggagcccgggaaggacgagcgggcgtcggccggttggagctagatctttgggatctttttgccagccatcttttcatctgttttctccattgagtccagtttagctttttcattttttttactttatgtttaccagctattatatatttttgtaagaaatcttagttctacagaaatagaaaagcaaaaaagagttgcatacagtggtgaattcgctggactggtatagcaggcttgagatgttagtggtacatgggtatagtagtaattgagggactaggagggtgtgaaatcttttgagttctgaagcttttggaccttgcttccggacaaggctggcagttcaaatgttcgatggcgagcgccgatcctgctagcggtggaggtgcggccacggtggcaaaagcaatctccagatgagctgagagatccttggcctgtcagagatatgagatattaggggggcatctgatcgagatgcctatcgaaggtgacgcgataaatcacgatcgcctcaccaggaacggtgattcgcgagattgtttgatgtgatgtggacgaaggtaatcagctcaacagtgtggtttttgctatttcgtttttagttagaaaattattatgcctagcaatgggagcatctgcaattgcattttttttatttctaattgagaaatgaaa

SEQ ID NO: 3097 - DNA, 1772 bp, Zea Mays
aactgctttcggcccaaaacacttccctgctctctcggtctctcccagagtcccagctccctcactctactctggacgcgactcgaacttaaaccctagagccgcagccccggtcgctccaccgaccccaaatctcaaatcagcgggagggaactcgcacgcgaaggcaaatacgctttagatcccccattgcttctggctactaggccagcgcgcctcgattttcttctccgttttggtctaattcgctgaactcatggctcgcgtctacgttgggaacctggatccgcgtgtcacggcgcgggagatcgaggacgagttccggatgtttggggttctgaggagtgtatgggttgctaggaaaccaccagggtttgccttcattgactttgatgaccgcagggatgcacaagatgccattcgtgaattggatggtaagaatggttggagggttgagctgtcaactaaagttggtggtggccgtggccgagaccgtaacggttctgatatgaagtgctatgagtgtggtgaagctggccactttgcacgtgaatgccgcttacggattggttcaggaggcttgggtagtggaaggcgtcgcagccgaagtcctagatatcgcagccgcagccgcagccgcagcccaagatatcgaaggagcccaagctatagcagaaggtaatttgctaatgacaccaattcaccacatgtattcatccagtagttttaattaagggttgggaaacacgacctagaaatcctaaaacttttgagaacgaagcaaaatttcggagataacacgttccctttaaccaagtgagtatccactatccagtatggtctcagatttgttggatagtatttaaccaaacattcgactatgcatttgacttattgagtgttgttctttatcttgcattggtactatataatacaatgcattctacaccccctcccacctgttatagctttgttagcgttggcctaatatttcaggggaacatgttgagagacttcataaaatacagatcaatgtcttcttgcctaactagcagccttttcaatgcgttattttatgttcatcctgaaaacaaatgttcggtttttccggagctacagcccgcgagatcgttctcctaggaggcgaagttacagcaggtcgccactgggatctcctgcacggagtctcagcaggtcaccgccgctgccgccgcctcctcccagaaataacagcaggtcaccaccggcagcccgagacgtgagcaggtcaccaccggcagcccgagacgtgagcaggtcgccaccaccacctcctgatgccagaagaagctatagtggatccccaggacagcagccacaacgcgacgagtccccatatgccaatgacgcctgagattctcttagctgccccaagatgctggaaaatgctaggggcccccagcatgttttgcctgtccggtcggcacaactgtaattctgtaggatcgagtctgagattttgttccagtgttttgggtttcccttgacacatcgctgctgatacaattgtggaggcaggagcacaacgtttctgttttaagtattgactggatgactttgggcgcttgtagttgtcaaggcaggacctgatttgtgttaggcttgtattactagactgcattcgaatttggagaaagtgttcatcgtgctgtatgttgagatatctcactaggtcaggctctatttttatttattttaactaaatttatttaggtctctaagaaattgtgaag

SEQ ID NO: 3098 - DNA, 3287 bp, Zea Mays
ctgccccctcacctcgcgtgctcgattcccatctcccccctccctgcgcacagccgcacaccagtaccaccaacaccattcaacagacgccgccgccgccgccgccgcccctcatccctgtcccgtcccgtcccgcgcgcggccgccgcatccgtccgggcctcctcgtctccccagccccgctgccgccgggttcatcagcagaagctgcttgctccgccgccgccgccctcttcctcctctactgattttgcttcggggttcggctaaatttcaggcgtgcccatgaagccattggggtcgtcaggagggcgttcgtgagcggcatgcgccccgacagcttcaaggcggtgcaggtgctcacagcgtgcgcccgcgtcgcggatctagagaccggggaggccgtgtggagggcggcacaacaggaggagggggtcacggagagcgtgttcgtggcgaccacggcgttggacctgtacgtcaagtgcggggagatggagaaggctagggcagtgtttgacgagatgaagaacaaggatgcggtggcctggagcgcgatagtcagagggtacgcctccaacgaacatcctcgggaggctctagaccttttcttcgcgatggaggtggagggagcgaagccggattgttacacggcggtcggggcgctctcagcgtgcacgaggttaggtgcattggatttgggatgacaggcggttgaaatagtgcactaggatgaggtccttgacaacccagtcctgggcactgcactgatcaatatgtatgctaagtgttggagcacaagagaggcatggatggtgttccagcagatgttggagagggacatcattgtttggaatgcgatgatcatggggcttggcatgattggccacgagaagattgcatttgtgcttgttggccagatgaagaactcgggtgtgaagctgaatgataataccttcattggattgctctgcagctgcacacatactagccttgtgaatgatgggcggcggtattttcataacatgactcatgtatacagtataagccctaggattgagcattatggttgtatggttgacctgttgagtcgtgcgggattgctggaggaggctcatcagctgattggtgacatgccaatgctggcaaatgccgttgtatggggagcacgcctcggtggttgcaagatccatcggaatgctgaccttgctgaatatgtgctgaagcagctcacccgactggagccatggaattctgggaactatgtcatgctttctaacatttactcgaacagtggaagatgggaagatgctgcaaagcttaggttggaaatgaaggcaaaggggattgagaaggtcgctgcctctagctgggttgagcttgatgataaggtccacaagttctatgttggggacgattcacatcctctttcagataagatctatgcaaagcttgatgaattgggccacggcataccttgtagattgagcccatagcagcccatatatgaagaaaaaacaaaagaaaaagagcccaacacgtaacaagcaacatctcgcattgattttgaagcgtgagaatctggtctgcttattctgttcgctgtgtttctttcgtccactcagctttccgcagccgccgttttacgttagccaattctgctgtcagcttgccgctgtccgctcgtcctttgagctttggttgtgtctcccaaatatcttgcctttttgttgcattggactcttctgtggttagaatggcagcacccaagcccatttctcgtcttatttctcacgtcattcttgatttggatggcaccctcttaaacacagattctgttgtaagtaaggtagtaaaaccatttattctaaagaatggaaaaacgtgggatagcaagaaagctcacaagctagttgggaagacaccttatgaagctgcagctgttgttttagaagactatggactcccttactctacagaagagttcctctcgatgattactccgatgttcagtgagcagtggtgcaacttaaaaccacttccaggagctaatcgactgataaaacatttaaagactaacggggtgcctactgctttggcttcaaactcaccaagatgtaacatagaagccaaaattttcttccaacaagggtggaaagagtctttctctgcaattgttggtggagatgaagtagagaaggggaagccatccccgaatatatttttggaagctgcaaagagaatgaactgtgctccttcaaattgcttagtaatagaggattccttgccaggtgttacaggtggaaaagctgcagaaatgcatgtcatagctgtaccttcaatacccaaaaagactgctgagttcagttctgctgatgaggtgatcaattccctccttgatgtgaggcctgaaaagtgggggttgccaccatttaatgattggattgaaggtaccttaccaatagaaccatggtttattggtgggcctgtgatcaaaggatttggccgtggttctaaagtactaggaataccaacagcaaatttacccgcggagaatttttccgacgtagtgtcagaacatacatcaggggtatactttggctgggcaggactttcaacgcgtggtatatataagatggttatgagcattggctggaacccatatttcgacaataccgagaagacagtagaaccttggctgcttcataatttcggcgaggacttctatggcgaggaggtgcgccttgccatcgttggctacataagacctgaggccaactttccttcgctcgagagcttgatagagagaattcacgaggatggaagagtagcagagaaggcactagacctgccaatgtatgccaagtacaaagactcgccttatctgagaaacccttcgaagcacgggagtagtactaccggtgggacccagtctgagatggattccaagtgacaacccccctacagggccactagataatatgttacttattttctctatggtaaatgcgtcggtgttgatgcagaaacaattggactctctgtgagctaactcgcttcttaattttcggaagtagatagtattcctcgaagtggtgtttttactttgtaatatagaaaaaaataaagtggggttgttgaaacttgagagtcaaattccgagacgttatgcacgttttgatttctgaattaatcgattggtatcacttgtactgtttttatacgatgatgcttgaaccattcatttgtcattttaatttgatatacttgaagtcaacaatatgctt

SEQ ID NO: 3099 - DNA, 983 bp, Zea Mays
agcaattcagcattcaccccttgataaaccgttttatacgcatagaggtcttcgtcgtgttcgtcctgcccaactgcccgctgaaaaacaaactcaccaacaaagtgacctgaaactgggagcaagcaaccgagggcgagagccatggcgaagcctcgcagcggcggcggcggcggcctcctggacttagaggggcactacgccttttacggcgcctaccacagcaaccccgtcaacgtgggcatccacgagctcttcgtgtggcccatcttcctcaccgcgctcatgctcctccacctcaccgccccctccacgcacgccgccggcatcagcgccgcggtctacgcggcctactacttcctcctcgaccgccgcgcgggcgcgctcgccgccctcctctgctacctctgctgggccgccagcggcgccctctctgcccgcctcggtttctctgttggatggaagaagcgagcgcctgctcttcttgacaatcttgtccaggctttcctgatggcaccattctttgtgctgctagagattcttcacacatttggcgggtacgaaccgtatcctggcttccacgacaaggtgagcaagttgattgaggaagcccggaaggaatgggaggacaagaaatcaaagaaatcctcatgagatatgcgtgaattaacggctccgaactgttggggtctgcctgctcgagataacctgctgattggatgaatctattgcaaggatggttaccgaatactgatgctatttatgttgtataagatgatgtgcgctatgttgtctgatgtttttatatatattataatggtgacgaaaccgaggtaaaaaataatttatatatgtatactggtgtgattgccttgctagggcccttgtttctctatgagaggaatgtcttctgttgaggtgtgttacaagcggacccaattcgtatttcaaacataagcaagaacgcgtgtaatctggcccat

SEQ ID NO: 3100 - DNA, 2112 bp, Zea Mays
ctactcctcagatctcaatgcctgcctgcctaaccaaaaggctaaaaacctatcccctccaaccccagccttccttccagcatccactgccaccatctccagagcttcatgctgactcccaaggatggcttgaccacctgagctgctgagcgtcagagagcatggcatagcatttcttggtgtcgctggatggatggggatgactggatcactcatcaagaggcggatcacaaaagagtactagctaaccactgccaagattccgccgcgcgcacgcatgcatctgtgttgagcttcttacacgccgcagagaaaactagatcacggcgctgcacataccgcagcgcgcgcaggaagcaagcggctaaggatcgatggatcaccatcaccaccaccaccatcacatgatcccgggccaagagccaccggcggcggatagctcagccccggacagcttcttcctcggccccgcgggagccatcatattctccggaggcgccggggtgtcgggggccggctcgtcgtcgggcgccgcggccctcggatcatccgcgggggcaggaggtgggccgtcgccgtccagctcgtcaccgtcgctgagccggtacgagtcccagaagcgccgggactggaacacgttcgggcagtacctccgaaaccaccggccgccactgtcgttgtcgcggtgcagcggtgcacacgtgctggagttcctcaaatatatggatcagttcggcaagaccaaggtgcacacgccggtgtgccccttctacgggcaccccaacccgcccgcgccgtgcccgtgcccgctgcgccaggcctggggttccctcgacgcgctcatcggccgcctccgcgccgcctacgaggagaacggcggcacgcccgagatgaacccgttcggcgcgcgcgccgtgcggctctacctgcgcgaggtgcgcgagtcgcaggcgcgtgccagggggatcagctacgagaagaagaagcgcaagaagccgtcggcagcctcggccgcggcccctgggccgtcgtccgagggaagcccaccaccaggaccgtccggcggaggaggaggattcggcacgtcggcgtcgccgcggttcatcatgccgacagcacagctggagttggaattcttgcatggaacgccattgttctggtagtagagcaaacaaaagtctaagccattgttctttgcctcctcctcctccttcggtggcttgcatttcgggaaaaaaaattctcgatccccttttcttttctttcctttttcttttctctgtttcatccgtgcgtgagtactggtttaatcgtggatgttttatttagctttcaatccattggcaacaagagcagtttatgatagttttgcttggtttatatatgctcctcccgagggatgcaaacttggcagaacagtttgagattccctagtccctaccaatgctagcttatatatgcatgtcatgtcatgtcatgccatggtgtaggagaagagtttagtttgcagttagcaacaacagtggcaaaaggctgtagctagctgtatgactagctactagtagcatcttttcagaatttgttcttgtatgcaacttgcaaagcaacactagtagtttggttctgttgcagaagccagcagccaaactaggttgctgtgctattcattatattggctgaacagaaattgatacaatgcttcatcacactacatatatctattcatggactgctggtggtgtgtgtggttcaaattcctttctttcttaggagagcagaagggcaatgcacatggtttctaaagccagggaagacatatatactccaggcgaacccatatatatatcttgtaacttgaacaatgtatttcttcagttgagcttacaaattgcacatgtttagtttcctttgtgtttggcattctgttgttgttatgctggctactatttaaacccagaaaacttcgatggccaaaagggtagctcctggccacgagcagcccagaagaaacaaacacatggggcaagcaaatgaagcaatgaagagagaagtctttagaaaaagaaaaggtaaaagatatatacgcaggaactgaaaacgtatagttttttg

SEQ ID NO: 3101 - DNA, 1053 bp, Zea Mays
tttgatttttaatttatttaagctggattcgtaaacaaacagccactgattgctgctcgacggtctcccgtgatctgataataacaaaacctgtaggctgtagcccaacgagaggaatcaaattggacaaccctgtcgccctctcggtctccctcgagcttttcttgtgcgcagccgcagccgctgcttttcgttcgtcttcatcctacgcgagggcgaaacccacaaaccctctccctcctgtactccggccgacacatccaggggcgatgacgctgggtagctccggcgccggatcgagcgtcgtcgttcctcgaaacttcaggctattagaggagctcgagcgtggagagaagggcattggtgatgggacagtgagctatggaatggatgatgctgatgacatctacatgcggtcatggactgactgtacatgagggtcgcatctaccagctgaagttgttttgtgacaaagactatccggagaagccaccatctgtcagattccactcaagaatcaacatgacatgcgttaatcacgagacaggaatggttgatccaaggaagtttggtttgctagcgaactggcagcgggactacacgatggagaacatcctaacccagctcaagaaagagatggctgcctcgcagaatcgaaagttagtgcagcctccagaagggacattcttctaacgaagtgttcacttggcccgtcatgggatccaacagtaattgaaacttttatgggctaaaaaacagcgtctacatctggtgcccctgcctgtctttgtgattttttatgacttttatgttcttgtatcgtgaaccgcagtgaacaacggttgttgcaagttccagggatatctttggaagtggtaaacaaatgcgtcttatttctatgtaatattagaccccgtgcgtgtgtggtttcaaggtacagctccctctcaactgttgccgtgcattccgtcgatttgcttgacgtctttcgtccacatgtgcccagcagtattctctatgctcttgctttcctgtcatacttccaactggcac

SEQ ID NO: 3102 - DNA, 2841 bp, Zea Mays
ggagcttccctcctccctttcccccaaacgctcccctcctcttctctcgcgctgaactcgacctggcgtccgactccctcgcggccccgtcgcagggtgtcgtcatgggtgatggtgtcgtcgtccctgccacagtccgtcggggtcggcttgtcctcagatctcgcatgatttaggagcagcgacatcagatgttacggacgcgaggccatcaacgtcgccgccaccagcaccgatgtcggccccggcccggcggacccctccccggtggccctggctgttcttggctgatggcgatgcgggatctactggcatggagcacagacgtacagtgcaggcatggtcgcggctgttcttagtttgtttttctaaatgagagtttcagttttaggattaaatacgaattcctatctgcaggacttaccggagatgtgctcatggagctgccatatgcgctttcatgcatggtttttatccattaaggggtaaacactaccatgagatgataaatccatttcgtgtacttacagatgtttcttatatccatgtgtttcaggtcaagaagcttatcaaggagaaaaagaatgatgctggaatttctgaatatatcgatataaataaagagcttcaagaggtgagttcatttcttattttgtcttgtaatgtgatccctcatgctcgtgtagctacatgttagatacgttagattaatgatactcacaaatggatgcttgatttctcctctcatttttggggatgcatcgattcctctcttttttgttacaaggagccatgcccagcacaaggtagcatgaaaaaggttgcttgcaacataagatttgtttgggggtgttagatttttttaacttgaaaggtaagaaggttaattatgacgatggtagggactgtccgaacaaccctattaataataatgaacaatatgtaaaaatttagtgtcttcaaagttgtcctttactgattgtttggacaagaaaacgccagtattatgctggagaattccaaactatgagctacgaaaacaaaataaaaaggtctccagttaatgttcataatttaacatttttctaatatatgaaatatgtcacataactaaatgtcatatgcagtaagttcctcctgacatcatgtattatttgagctataactactttgttcttgacgtatataaaaagagttaagttgcttgcaataaactcacaacctgtgttatttcaagttacaaaaaaaccatgttacaggtgaaacatgtatccaattcaaaagtatcataaatagcaaatccagcaaagatcctgtgtaaactggactgtccttgcaagctcttgatagccacataagtgtgaaccagataacaaactattattctacatgcagttcaataggaagcatggtcacctttcgtaaagaagtaaagactatagttcatcccggtgaggtctcagttttaggttcccttcgaagtatatcacctgctattgggttaacttagggtgcatgcagacaaccagttgcactgtgagatctaatcattcgtgtttatggtgccgattttagttcctcattgtcgcttggtttatctgggaggtttatggcacgatgattcatctcagagtttctgattcttatgttttgtcacaagggcaagacgacaagtcattttgctgctaaagtgttaatatgcaaactgtgtgtttgatcaagcgagaatttttccaccgtttttgtaagtaatgacttgttgtgaaaccgacatttgggctatatgatgcggtagtttgtgttgccctacagaagcacatagttgaatgtacatggcttacctcaaaaacttgtaatttacactataatgtatagataaggcgtcttcaataaatactgaaatgatttttgtttatacgatggattatataatgtgtttcctaattcgttacactattgagagacataaggattattaaatgtactatgtaacttgaaccatctgactctataagcttcggtacattgacaaccatacaatgccaaagcactgaaatatgttgtgttctgaaatatgacatataccaatggttcacagattgcttagtttctccagagcaacgccccacagatttctctctgtgtgtgtttttttctctgcaggtgatatcatatttcacaaaaatacagattttttctgatattgggcccctaactaatacatccactttggaaaacaactctttctctcaccatgcaatttctctatcctaaaatataagatatgctgggaattccagaacaaaatatggggtaaaagaaatgacacatgcatcctccttaatcatagggagatattgtgttacctatttttggctttgtgattgggttgactggaggcattagtggcaggtgcgcatgtgattggggcctaggggcattgataggtgaggagggggagttaataaacctacaatcctttataatttgtgacaagttggaatgcttcagttatttcaggatgaaggagtaccattgaaaagggaggagtttcttgtcgtgtataaatatgttagtttgttttgtgcgcagcaaaatatgttacttttaaaaattatgcaagtttatttcgaccatggtgttgaaacatgtaattcaactaatgttgttggctgaatagtttcataagtaaagcaaaaaaaaaacaatagtcatgtactaatttcaggacaagaatgattgtaggagtaggatctaggcatatttttcgtggtttggtggtgatcatccaatgaaaaggcgatgcttgttgtgtaaggtcttctacactggttcttgctc

SEQ ID NO: 3103 - DNA, 2138 bp, Zea Mays
aaaatataaacagcccccctcccgttccacccgcaacacttcgcactcttctccccctcttctcttctcgtagacggcagatctccaggggtgtcgccgtctccggccacggcggccggcgctcggagcatcggtggggttcggtgcggaggtgggcggccatgtacaagaaccagctgcaggagctggcgcagcggagctgcttcaacctgccgtcttacacgtgcctgcgggaggggcccgaccatgcgccgcggttcaaggcggcggtgaacttcaacggggagcagttcgagagccccggcttcttcagcacgctccgccaggctgagcacgccgccgcggaggtcgcgctcgccgcgctcgcgcggcgcggcccgtcctactcgctcgccgcccgcatcctggatgaaacaggggtttataagaaccttctacaggaggtagctcaaagagttggggcgccgttgccattgtatacaacagagcgatctggcgttggccacctgccggttttcacatgcactgttgagctagctggtatcacatttacagtggtacgcgaggaagtgaattcatccaatgagacagaaaacagtgatgagcaggagcagatcaggattgcccgagccctcctcaactatcgcttgaaggagaagatggcgatggccaattatcctcatgtttcaccattccctaagaaatttcccatgcagccagagaggaagccttcttttggtcaatcttctcagtccagctactcaaagattctccctctattccgccctaaatctaactcaagatccagaccagagtcaccagcatctactgatggcgcatcacaaatgcctggccgggccatggatatccacactccaagcccaagatcaagatttccagctgcagaggcagccccctacgtgccagttgggcacttccgtatgccttgccacagcatggctccttcagtcacaattaggactgctgttcctgtgttctctgctccacctctcccaccgccgtctgcacgcccgcagcagcttcctccactcatgagccacccaccaccgattcggatggcatccccagttcgcatgaggccagcctctccaatgtttgcctcctcagctccagctcaagggccgaaacttgtgaggcctgttcaattgaaggatgtgcaagatcaaccaaggaaggaaacagctccatccgtgatccctgttcaggtaaaggacgtgcaataccaatcaaggaagagctcaatgtctcctgtgattcctgtcgtggtaaaggatgcacaacgccagcctctcccagttcagacgaaggatgtgcaaacccaaacccaagccccaaaggaatcacttgcagatccaattccagcaatcaggcctgcagtcaagattgatttgcctgctcaaggcaagaaggaagcttcagctggtgctaccagcgaagcgccatcttctgccactggcaataatggtgctatggaacgcggtacatcatcagacgttctcttggcaaggcgatcaagggctgctgtggacggggatggcgacaaggtggaagcaaagcacgaggccgaggctcaagcggtggcagaggcagccatcaggcagctggagatcaattgacttcagaaaatgcgcgccaccatcttctcccagattttgtaattagctgccttgcctcctgtgcacattccgttctgcttagtccgtgtatgtcttgttccggttagggctgtctgggcaagctgcattgtggtaggaacacctaggttttctgttgaggagaaaaaaacatggagtggtggtaggcggtttgcccagtgtttagttggagacggttattacttcgctggatatgcaattggtctgcttttacccccgaatgatgaggtggactgcgaggtgcctctaagggaaggattctgaattcctagttattgtcgaaccgccgtaatcctatccagcttcttttttactagtagtactacaatgcaaatgatgatgcattggtggttggtgtatgatgaaaagtggagatgggtttttatgccgcttttcgtcctggctactacagtatgatgaaaagagaaatcgttggatgaacaaaagactggttggtagatt

SEQ ID NO: 3104 - DNA, 1077 bp, Zea Mays
gggcgaacctgtaagaaccactttcacctgaactcctgaagcaaaagcaatggccatgagagcgcttccgctgaccccttccaggagctcctcgtttggagctcaccaaaccaggccgagcggcggcggccccagatcagtgagagcttatgcgaagggagacgaggagggcgacaagcagtccctcttcggaagcatcaccgaggcgctggacttctcgcaggtccggtcggagaaggacgccgagctgctgtacgaggccagggagtccaccagaggtggagggaggatgacgagggagcagtacggagcacttaggcggaagattggtggcacctaccaggatttcttcaagtcatatgttgaaggtatcttatctacacctttcccgtgagaatatttaaacgccaagtgaacaggcccgtatattgcctactggtattcagattagcactgcatcactgaataatccgtgtagttttttttggaaacaagtgtagtatgatgaaagattgaaagtagtgtccactgaaaatatattatcgcacacatccttttttattcctaacaagagagaatatcaagttatcgacgattgacgaccaaccaaattggtttcgaatttcagtcgacgggcaatacgtggaggagggttgggtcgacaagacctgcaagatctgcaagaaggacacaaggggggagccgaggcaggttgacaagctaggaagatacgctcacgttgcgtgcctggagaaccccaaaccgacgaactttttcgccaaaatcttcgccagatgaactatgctgcgtccgtcgaaagcgttgtctcgctcgctcgtggttagagagtacaatatataggtagtgttgttgtggcttcaaaggggacaagattgtgcacaattttccaaatggattggtatgtactgatgagcatcagcgcgttccatagttccgactccctcttcagtgtattcaagtcgaccatgaacccacgacccacaaagatcaagaacaaactactgaaaatatttagatagttcgactccttcacgacaagcaaattagtagtactct

SEQ ID NO: 3105 - DNA, 2067 bp, Zea Mays
tagcatgactagataaggcgagcccagcattggccagccccacctgtcattggttcaaggggaggcgggggagccacggcggcggagggaattgtttaatcccccgtcaccgtctcctatcgccatcaccccacccgtcccccttggtccaggcgcaggcgcgagcgcgacgtccggcgtccggcttcggcggcggagtggagcgatcccgatccccacaaggaattccatcgctgtcgtggcgtttggtggcgctcctcccggccggcaagcaggatcaggaaatcgcacggaggtgaggatacacgggtgcggaacgagagctaggcgaacctgtctggtacctcgcggcggagatggacgagaaggcgacgatggagagcaagctgtcctcggcggcggccttcgtggaggggggcgtgcaggacgcctgcgacgacgcctgcagcatctgcctcgacgccttctgcgacagcaacccctccacgatgaccaagtgcaagcatgactaccatcttcagtgcattcttgaatggtgccagagaagctcccagtgccccatgtgttggcagcatatcagcatgaaagatcctatgagccaagagctactagaggctgttgaacaagagaggaacatccgagctaatccttcacgtaatactgctgttttccaccatcaaatgctgggtgattttgagatccctgtaggtgcagatgatgcagaacttgaagaacgcattattcagcacttggctgccgcagctgcagtgcgtaggtcacaccgtcatcataatagaagagatgggcaccagagcagatcagaagcaagtagccacccacagtttctggtgctctcagcagacgagcgcacaatctcaggtcaagaaggggactacgaacaagcatctgctgtagcttctggccgccctttacgtacacttgttgaacaagaacgcactcgagggttagcggatgcttccagtccatctctccgttgttctactcctgctgatagtactggtagatcaaacaataggatttctgggatcgaatctacacctgtggatcaagacggaactggaccatccgctttacaatcaatggtacagggatttcataatcaaagtgcaagtggatggagggagaggtggttttctcggagcaactctttactggatcttggttctgaggtgaggagggaggtcaacgcggggattgctgcggtgtctcgcatgatggaatggcacgatgcaagggacgggacgggagcggggccttctcctacctctgcatcaagatctggttctcagtgaaacactctgcacttgaaaggaccgatgcaaatgtaaagattaagctattgtttgaggagcactttaggaagacaatcaccttgcaacttctctagcatatatgaatttttgaaaaccaccttagtcacttttagtaggtctttccagcttgatgaccacttgttaacttgatgctcttcatcctaaaaggtacaatagtcttgattaaattcctaagggcttgttcggttagctctcaatccatgtggattgggtgagaataaatttctctctatatatcagttttttgtgtcacattatcaacatttcataccttacttttttttaggagcagctattgtttgaggagcactttaggaagacaatcaccttgcaacttctctagcatatatgaatttttgaaaaccaccttggtcacttttagtaggtctttcttgttaacttgatgctcttcatcctaaaaggtacaatagtcttgattaaattcctaagggcttgttcggttagctctcaatccatgtggattgagtgggatttggtgggtttaaatcccaagcaagtcaaagttgttctaaattttttccaatcccattcaatccatgtattgtaggaataaccgaaaaaggcctaacttggaaaaatttgctttccaccaccttgttataaggtccaccaactctagctttatccttctcactatacttcaaagtttgtattgtcttgtcagtcacctcgtccatattatccatcatca

SEQ ID NO: 3106 - DNA, 779 bp, Zea Mays
cccctgtgtgtgccagttcgtgggtcgcctctgctacgcatttttccagggggaccatctcttatatctgctgcatcctcatcttggtagctttcaatctcgtgatggttacttctagtgccccaccatcatggcatttccatgtgtattctttctttggtagccccatgttttgcatccatgcagcgattctgcaatgaaactgctaggttgaacatcaaaagggaacaaaaaggtggagaccggctttaaaagattaggacatgaaaatccccaggtgtcagcatcgcttatgcggtatgcccccatcatttctgatgaaccgcaggatagaacagtagaagcagggagatgctggagcgagggaacaaaatccccatggggatattgcattgtttcttcaggaggcaggggctttggtgcatgtagccgtacatcgccgttggtgtctccggctccggccccgggccgcagtcgaggtttacgccgaacagccggagccgccgcgacggtggcggcggtgccgaagctgcactgcagctcctgttgtctctgtcggactgagattctcctgcaattgttcaccccacagcagtgcataagaggacaacctgtgcctgcctccgtcgaggacgctatatggcggacaccaaccaactgcaaattaaaagagagaatacttctctaatctctctgtgttagagagcacctcctgttgttggaggatcgggatgcaggacgacgcaaggtatacgatctgttttccctgcgtttttaat

SEQ ID NO: 3107 - DNA, 1480 bp, Zea Mays
gccatagccacccacgacacgactcgattcccagatccaaatccatccatccatccgcagcgggcaggcacacacacacaggctttgcgttggcagggatggacgcgttctactcgaccaccgcctcctccacgtcgtcggcgccgtacggcggctacggcggcggcggcgaaggctggggctacgactcgatgaagaacttccgccagatcagccccgccgtccagacccacctcaagctcgtttacctcaccctatgcgtggcgctggcctcgtcggcggtgggcgcgtacctgcacgtcgtctggaacatcggcgggatgctgaccatgctcggctgcgtcggcagcatcgcctggctcttctcggtgcccgtctacgaggagaggaagaggtacgggctgctgatggcggctgccctcctggaaggggcgtcggttggacccctcatcaagctcgccgtggaatttgacccaaggtaacgacgaaacgaacctacctagcaccgtatacctgtctcttcggaaactgttttaatcaaatcaaacactgcgagctcgatcacgcataagctgtactagtaaagaaatgtgtgccgttattgaccgcgcgcgacatactgttcctatgggatgtcagatgtgtgcgtcgctgtccactactgttcctcctggccgcagtttttcttccgcatcctggtgacagcgttcgtggggactgccattgcgttcgcgtgcttctcttgcgcggccgtggtggccaagcgcagggagtacctctacctgggcggactgctatcttctggcctctccatcctgctctggctgcagttcgccgcctccatcttcggccaatccactagcagcttcatgtttgaggtctactttgggctgctcatcttcctgggctacatggtgtacgacacgcaggaggtcatcgagagggcgcaccacggcgacatggactacatcaagcacgccctcaccctcttcaccgacttcgtggctgtccttgtccgcatccttgtcatcatgctcaagaacgcggctgacaagtcggaggacaagaggaggaagaggaggaggtggtgaaaatctgtgtgcgaacacagcactcaagggaagggaaggccactggtgcgtctgaaatgaagctcccacataactaggtgtatacatacatatataggagcgaggagttactttggggtggaactgaactgtgcaagtgtcgttcctttgttttctcttgctctgtcatcagtgagcctgttgatagttttgtcctgtcctgtgaatgaatgtgacaaatctccaccagtttagcgtctggcattctgaccaaatgggaggcactgttccatcctactactagcaacacggcttcgtttcagtttctttagctgcaggacaactacgtagatcgaatctccactgtgagcgtttcagcgcgccgctacaatcttcatcatccatcctca

SEQ ID NO: 3108 - DNA, 556 bp, Zea Mays
tatggattaccttctaaagtagtacagagttgatttgaagtttgttataggctgccctctttatttttcttcagtttatagtagatttgatgtacataaactcatagagtaatactggagtggctacgatgatggaaatccatggtgagatcaggagtgtcactgaataattagattgctgggcttcgttcgtcatagtcgcgtcgtggcgagtcccctctgattttgcatatgctccacggaatcaccgttgtccggtttgctccccaggccctgtacagtgtaaacttctgaaagttgaaattgccctttgcagaatactggtgttgtaaattatcactggttgattggtgatattttgtaactgttttttttaacaagggctgttattttgttgaagccatttaggaagagaaaactattgcttttttagtgacatcgtggagttaatttgcttggatgaattttaagaaactagtgcaactggttaggtatctgtatattgctacggtttctataaatcacataggtagatcttatttagatgagatagttt

SEQ ID NO: 3109 - DNA, 3125 bp, Zea Mays
ctaatttcttaccttgcaagctattacttaatacttattattttgtttccagtgactaaccatctaattggtaggttcctaggagtcctgatgcatgcaactaggctttatgactttgtatacatggcgactatgattaaactaatacacattagcaataacatgcccacaaacggagctggatgtcatttactttacagaacagatccagatttctgccacaccccgaaccatacagaacagagccagatcttggtgatgaagagtgagcttttcagtcgacattgaagcatatattgatgttagttccaacactgaagttagtcatttctttcagtttaggatcatgtagggctggaatgccctttctaaattggcatgctaagaaacattaagtttgatggaaataaaagaaaccatcaaacttgttctgtgactaatattaggataccgtagcagaatgtgcacacatatgaaaattttgcagctcgtgaggacttgtgtggaggtctatcaatagcttatttctcagcatcagatccaggactgcttataacttggtattgaacaagtttgctcctgagctctatgagaaattcacagaaaacatgaaagcgcatcttgaagagatgcggacatgtatagaggctgctcaaggtggtttgttcctggaagagatgcaacgaaaatggaatgactataacaaggcattgaaaatgattagagacatcctgatgtatatggacaggacatatattcccactaataaaaaggcacctgtctttgatcatgggatagagctttggagggataccatagttcggtctcctacgattcaggggaggttgtctgacatgctcgtcgaactcatacatatagaaaggaccggtgatgtgataaacagaggcttgatgaggactacaactaaaatgttgatggatctagggctgtctgtttaccaggacgattttgaaaggccatttcttgaggtctctgctagtttctatagtggtgagtcacagcaactcattgagtgctgtgcttgtggtgagtatctgaagcaggctgagaggcgcctctctgaagaatcagagcgtgtgtcacagtacttggatgttaaaaccaatgagaaaattactgctgtcgtggtaaaagagatgctagcaaatcacatgcagaggttgattcttatggagaactcagggcttgtgaatatgcttgttgaagacaggtatgaagacctgacaaggatgtacgctttgtttaatcatgttcctgatgggctcacagcaattagatctgtgatgacgtctcatattaaggatactggcaaaagtttggtaacagatccagagagactaaaggacccggttgattttgttcagcggcttcttaacatgaaggataagtatgacaatatcatcaatgtgtcattcagcaacgacaagagtttcctgaatgctctcaatttctcatttgagcacgttataaacttaaacaacagatcccctgagttcatatcactgtttgttgatgacaaactgcggaaggtggtgaaagaggccaatgaggaggatcttgaaactgtccttgacaaggtgatgacgttgtttaggtatttgcaagaaaaagatctatttgagaaatattacaagcaacacttggcaaagcgtcttctttgtgggaaggctgctcctgaggattctgagcgaagcatgcttgtgaagctgaagacggaatgtggctaccagttcacttcaaagttggagggcatgatcactgatttgaatacctctcaggatactacacaagggttttatgcatctacttcttcgcggctgctggcagatgcccccacaatatctgtccagatactcaccactgggtcatggccaacacaaacctgcaatacctgtaaccttccccctgaaattgtctctgtctcagagaagtttcgggcttattaccttggcacacataatggcaggaggctaacatggcaaacaaacatggggaatgctgacatcaaagcaacatttggaaatggcaacaagcatgaactgaacgtctcaacataccagatgtgtgttctcatgctgtttaattcatcaaatgtcttgacttaccgtgaaattgagcagtctacagcaataccaactgctgacttgaagcgatgcctcctgtcgctagctcttgtgaagggtagacaagtcctgcgaaaagagcccatgagcaaggatattgccgatgatgacagcttctgcgtgaacgacaagttcaccagcaagcttttcaaggtgaagattaaccctgtggtgacgcagaaggagaccgaccctgagaagctagagacacggcagcgggtcgaggaggataggaagccacagatcgaggcggccatcgtgcggatcatgaagtcaaggagggttctagaccacaacagcataatgacggaggtgacaaagcagttgcagccccgtttcatgccaaaccccgtggtgatcaagaagcggatcgagtcgctcatcgagcgcgagttcctggagcgggacaaggtggacaggaagatgtaccgctatcttgcctaaaacaacctcccttgccttaggaattagatcattatacgttacccatgtcatataaacagaccttgatccatgtacttacgcatagaaggaaatgagtctgcatgccgtgatacttttaggtgaaactgtttttttgttgggtttgtccagttagttgataatttagcttctataacatcctgcgctgggttgcatgctaatgctgtagatagatcttgctggctgcgacgcagtgctctcttttggttgctgcttcagaaaggcgatctgattgcagccaaggttgactttttgtggcttgaatgatgattgatgtcactgaaatgatgcttggatcggatggtaatctactgaattgctctatccagtttgcaatgctatgatgtgcgtggcttcaagcatgtcacatgtggtagcatgtttgtcctgtattgcgatttgtgagcaaagttgatgacgctttagcgtaaaatctccttagttttgttgattgtatatctgatccatgttttatcaaaatttgagaagagactattc

SEQ ID NO: 3110 - DNA, 2061 bp, Zea Mays
aagtgccttatcacggagcaaaatggccatgtggtttgacctgtttatgattgctgcttacactggcgtttacaagttcatcatggtcacatgtggcttgagggtgtatgtggttcatgacatttgttggaactcccttttggatggcacctgaggttattcaaaattctgaagggtacaatgagaaggcagatatctggtctttaggtatcactgccattgaaatggctaaaggtgaaccccctctggcagatattcatcccatgagagttcttttcatcatacctcgtgaaaatcctccgcagcttgatgagcatttctcgaaaccaatgaaagagtttgtctcactatgtttaaagaagaatccagcagagaggcctagtgccaaggagcttcttaagcatcgtttcataaaaaatgcccgaaagactccaaagcttttggagcgaataagagagcggccaaaatttgcagcaaaaagcatggatgccacacaaaatgggcaaacacatgatgaagaggaggattttggtacaggcactatcaaggtcaataggacaaaagatacagctccatctttgagtcaaggaacagttaggaaatctgcagtcagagatttttctgatagatcagagggcacaggaactgtccgagttgtttcaaggcctcctcaaatcgcctccacgaaggatggtagatctgatatgcctcaaagtccaaaagcaccaatacgcacagctgatcgagaaaatcagtggaggtcatcagggactggatctgaagaatctctctctctcagagatactcagagcggacgagggagagtagaaagttctactgatgacaatgatcactctgtaagtgggtcaggaactgttgtgttacgctctccaagagcatctcagttgtactcaacagctagcaaccacagtgccaagcctcccagcagattctcctcttatgaagatatgtctaatagtgggacagttgttcggacccaaaatgaagacccagaaactccacgatcttcaaggtcaaggctggggatccaagaaaaaacatcaaatgctcctcttgaggatagtgccattaaccttgcagaggcaaaggctgctttgcaggctgggttaagaaagggaaatgctcgagaaagaccttttatcaacaggcatgaaaagggatcacatgagcatagatcttctggagtaaatagtcaagaggttcaaagcgaggatgtggacacgcagaaaggtcacaaattacggcaattacctgatgggcagtcagcctctcgtgctagttctgtagcttcacctgcagtctcatcattgctactcccttccctgaaagaggctactggtgacaagtttgatcggcctgctgttcatgccttccttgattccttgatggatttagaacgtgatatacctggatcatgcgaagtactggttggcagattgctacaccggctagggagctcaaaggattcctcattgcaaggtcttcaggagacggcgatgtcaattttcactaaggaacctgaacctccctctgaaaaagcaggcgacaagaagttagctaatatgccaccattggctgctcctaccgtgagcccactggcaaggttccttctcacaaggtggcaaaaccaagtttctcaagatcttaactctgtttgatccctgcgatgcagaaaagtgatttcatgttcgattcggtgtataattaatatttttcagtgtacataatgcaaactttagaactttatttcatccagtcggtctcaaccacctgttatttcatttgttttgttcatggcgaatactccctctgtccccaattaaaatttgttttacaattaatgtatgtgttgtatatatatgtttagtttcataatcatccatatgaatatggatgtaaaaatctagagctagtacgagtactatttttgggctagtttgagaacgtcattttccaaggattttcattttctcaagtaaaattagtttattttttcttaggtcatgtttttctctttattttgaggaattggaatctaac

SEQ ID NO: 3111 - DNA, 1888 bp, Zea Mays
atttccttcccctctctccgtccgcgtctctgcgcctatgcccatcttttttgtctccgactctcatggcgacgcggcggcgcctctctccgactttcttcggcgggctccgagcccgggagcacggtggcgctagtggctcctcccgcgccacagcggggctcccttacctcgccgacctctcctctaaccccggcggccgcggcggcggggtcatagctgttgagcactccggtgaccccgtgatccccttcgccatctccttcggcaagactgcacagacctgtaacctcctggcggtcgccgacgaagacgggtatgttggcctctacgacacccgccggcgccttccttccacctcctcgtcactagagaagtcagctgaaacaagggtgcccgactgggttgctcacaacaatgcaatatttgacgtgtgctggatcaaggagggatcccagatactgactgcatcgggcgatcaaactgtcaaaatttggagtgtaggaaacaggaaatgcattggtgtcttgtctgggcatactgggagcgtgaagtcgctgtcttgccattcttcaaatcctgagctcattgtttccggttcaagggatggttcatttgctctctgggatttaagatgtgaccctaaatctccaaacagccacggtgaaacgtgcctcacatcttctgctgttgtcagagaagcccacagtcccatacagagaaaccgaacccggtctcgagcaaaggcggcttcaactagcatcacatcagttctttatctgaaagatggtgtctccattgctacttctggagcagcagacaatgttgtgaagatatgggatacacggaacctggaagtgccggtctccaacaaaaactctcaagcaggggccctgcctttggagggggtgaaacatggcatctcttgtctgtctcaagattcgtacggtgcgtacattgctgcgtcttgtatggataacagaatctatttgtacagtgttctccatgtgaacaagggtcccataaatgtttacactggcagcaaaatagagttttttttcgtcaagtctgctatcagtcctgatggaactcacatccttggcggatcaagtgatggaaatgtatacctgtggcaggtggatcagcctgaaagtgtaactgcagttttgaaaggccatgaaggtgaagcaacttcggttgactggtgtgcatcagaggttggaaagatagcgacatcttctgatgattccacggtccgtgtgtggagcaccaagaaaatggactgcacaaatgtgagctcaccaacagtgattcgtaagcgggcaatcgcaccaaacaccgagcaccgaaggtccattacccatgagcctgctgctacaacatcaagaggcgcggttgcatgcgctcgcggtgacggcgaacagcagagcggctgccactctcccctccaacctagaggctagagcactggacttcggcactcccgaatcctcgaagaagagagagagggccttggcgttgttccaggaggaggccctcggtgccaggaaaagcccggacccggaagctcagatgaccagcccatcttctgttctgagcccaccgccgtcgttgaaacggagaacgattcgggactacttcgctgccagtaccgtgtcttgaatcctggcaaacagtggcctgacccatgaggagctgaggacttgtggtcaaacacctgcacattttggggaaattcttctgtaggtcttagtgctttagggtcttgaatcctgacattttggtcaagctcgttattaatcctatgaaaataccgttgtacataataatttagtattaaagatcaccctacttttcccccttgtttcttgtttcaattgagctcggt

SEQ ID NO: 3112 - DNA, 2426 bp, Zea Mays
ctcaaccttcccgagatcctggtgggcccggagcaccctccggcttccagttcctttgttcctcgcgaagtctcaccgcgctgcagagcgcatcgccgagcccccgcctcacctcgaattcttctcgcgtagttcgttgccctcctccttccccttctctcctcgacaagtacacggcggcttggatctatacgaattcggcatctgtattttacctcattggggatggaggtgcaggtgtttgatttgtcttccgactccgagggcgaggtgacggcgcactcgcccgatcacaagcgcccttctcgacagccgggtgcagaccctaatcgcgggggtggcgagacaggttccagcgccctggacagcctcttcgagcaagcgggcgcggcgaagccacagcgtcaccccagtgacgcgctgaagaaagggaaggagaaggccgtcgagggggagagcgcggggcctccgaagcacagtggagaattgctcggtgctgctggccgcgtcctgggatctgggagtggtccgtggagcgcactgatgagcaagtgcaaggctggagacggtgggaacaatggagctgggtgttggggtagttggggtgaccggggtgatcagcttactaactcaacccccatgccgcgtctagggtcagagaggaaggggtttgatgagacatatgaactgcgagggatgcctcagcttcacagtgattctgcagcatcgagtgaccactggaagggtattcttggtgcaagccctggtgatgtcagcccactgtggtgctccagggatactagcatgaaagataatgaggatgaaaccttctctcaaaggtctgtgtctgcacgtagctgtgattattttcttgtcgaagatactagcccgtcatggctgtcgaaggtcaaagggctgaacttcccacttcctgatgagcatcagtcgagaaccaggcagattgaaactgatgagatgtttgcccgcagacttcaggagcagctcaatcagcaacagctaggatctcagcattccgaagcggttgttacactggactactcaagccttatagcttatagggtgtttggtttgagaaataagctaatccgttattttctcactcaatttttttgtttaatttgtggaatggaataagttaatccatcaccacctcattcttcatcatagttagttagttcgtactaacatgaggaatgagtttatcccatcaaatttgtgtgatagacttataatgcagtaatgcaccacctcatcttgaatgtagtgattcatcaaaccaaacatctccttaatgtttctgtttcattttggtgtctttttcatcttaagtgatcttgccttttgtgtgcatgcttctgattagttgatgctgatgtaacaaatagcttttccattgctgacatcttgtagactgatacgacaatagcctggacattacatgagcaagacgctgagcatgccagatttgctgcaagagaaggccagtctagttctagccagagggacagatcaatggcacacctatattcttatggacgtcattcacccgttcaaaatttttctccttgggcatccaatcgtactccaattccaatgccaagaagaggaggtttgcaaagaaactccaactgtcctcaagtggagcaacgcaatatgcttatctctcagttaaccaggggatgtttcagagaagacatggatctcgaaacgaggttggctgtactggactcactttctgaagcatttaagaactgcgaggacacactttctccagattctgatgatgatgattatgaggacctcatagcacttgacgatgacaaccatcacagaggtgcttctgatgaccaaataaacagcctgccactatcactgatcgagggtgaaaattgttcagatgaaccctgtaatatatgcttggattgcccttctgctggcgattcactccggcatttgccttgcttgcacaagtttcacaaagagtgcattgacaggtggcttgggatgaagatatggtgtccgatttgcaaattaaatgtattctcccagtaggcactgggcatctcatacttttggggtagcatcgaaggtagattatagctcactaataggaatgatgactgtggagagtttttctggtagcagagaagggcagaaggcacggaaatcctcctgttcccgtctgttatataccttatcgtagtctgatatgcccaacagtatgtcagttttaggcggtgccataggacatgaggctggatccagtgccatttctcgatcatactttttatctattatactgttccagtgtatagtctctctttagcttacagtcactttagcgttatattagtttttatgttacatatatttatttaaatcagagtgttctattaaaataaaaa

SEQ ID NO: 3113 - DNA, 2754 bp, Zea Mays
gttcctcccctgctcctcaaccttcccgagatcctggtgggcccggagcaccctccggcttccagttcctttgttcctcgcgaagtctcaccgcgctgcagagcgcatcgccgagcccccgcctcacctcgaattcttctcgcgtagttcgttgccctcctccttccccttctctcctcgacaagtacacggcggcttggatctatacgaattcggcatctgtattttacctcattggggatggaggtgcaggtgtttgatttgtcttccgactccgagggcgaggtgacggcgcactcgcccgatcacaagcgcccttctcgacagccgggtgcagaccctaatcgcgggggtggcgagacaggttccagcgccctggacagcctcttcgagcaagcgggcgcggcgaagccacagcgtcaccccagtgacgcgctgaagaaagggaaggagaaggccgtcgagggggagagcgcggggcctccgaagcacagtggagaattgctcggtgctgctggccgcgtcctgggatctgggagtggtccgtggagcgcactgatgagcaagtgcaaggctggagacggtgggaacaatggagctgggtgttggggtagttggggtgaccggggtgatcagcttactaactcaacccccatgccgcgtctagggtcagagaggaaggggtttgatgagacatatgaactgcgagggatgcctcagcttcacagtgattctgcagcatcgagtgaccactggaagggtattcttggtgcaagccctggtgatgtcagcccactgtggtgctccagggatactagcatgaaagataatgaggatgaaaccttctctcaaaggtctgtgtctgcacgtagctgtgattattttcttgtcgaagatactagcccgtcatggctgtcgaaggtcaaagggctgaacttcccacttcctgatgagcatcagtcgagaaccaggcagattgaaactgatgagatgtttgcccgcagacttcaggagcagctcaatcagcaacagctaggatctcagcattccgaagcggttgttacactggactactcaagccttatagcttatagggtgtttggtttgagaaataagctaatccgttattttctcactcaatttttttgtttaatttgtggaatggaataagttaatccatcaccacctcattcttcatcatagttagttagttcgtactaacatgaggaatgagtttatcccatcaaatttgtgtgatagacttataatgcagtaatgcaccacctcatcttgaatgtagtgattcatcaaaccaaacatctccttaatgtttctgtttcattttggtgtctttttcatcttaagtgatcttgccttttgtgtgcatgcttctgattagttgatgctgatgtaacaaatagcttttccattgctgacatcttgtagactgatacgacaatagcctggacattacatgagcaagacgctgagcatgccagatttgctgcaagagaaggccagtctagttctagccagagggacagatcaatggcacacctatattcttatggacgtcattcacccgttcaaaatttttctccttgggcatccaatcgtactccaattccaatgccaagaagaggaggtttgcaaagaaactccaactgtcctcaagtggagcaacgcaatatgcttatctctcagttaaccaggggatgtttcagagaagacatggatctcgaaacgaggttggctgtactggactcactttctgaagcatttaagaactgcgaggacacactttctccagattctgatgagtaagcatttactgttgtgtagcatttattttccacacaatgtttgtttagatggacatttccgcaatcatatgttctcttatcttgtttggttggttctgtgtttaccttgtaacacattctgcaaagttcgtaggtagaagtgtgaatgctccaaacaatcgatgtgtgctctgtagtaactagtaggtgcctgaaattgcttgtctcatagccctattttgaatgggatcctgttgacgcgttctttccttgcttatacatacttcttggttacatccgttctggctattcaattttttatcacttatagtgatgattatgaggacctcatagcacttgacgatgacaaccatcacagaggtgcttctgatgaccaaataaacagcctgccactatcactgatcgagggtgaaaattgttcagatgaaccctgtaatatatgcttggattgcccttctgctggcgattcactccggcatttgccttgcttgcacaagtttcacaaagagtgcattgacaggtggcttgggatgaagatatggtgtccgatttgcaaattaaatgtattctcccagtaggcactgggcatctcatacttttggggtagcatcgaaggtagattatagctcactaataggaatgatgactgtggagagtttttctggtagcagagaagggcagaaggcacggaaatcctcctgttcccgtctgttatataccttatcgtagtctgatatgcccaacagtatgtcagttttaggcggtgccataggacatgaggctggatccagtgccatttctcgatcatactttttatctattatactgttccagtgtatagtctctctttagcttacagtcactttagcgttatattagtttttatgttacatatatttatttaaatcagagtgttctattaaaataaaaa

SEQ ID NO: 3114 - DNA, 2987 bp, Zea Mays
cccagcgcgccaccgacgcatagcagcaggcagcaccgcagcagcactgcaacactgtattcttctccgcagtcccagtcccagtcggccagtccccacctccaggccagcagcaataaactttgagtgagtgaagtgttgaattgctgttaaactttgagcagcaataaatttgcagcaggcccactgaagatgagtaatacttcatcttcgtctagcgttgagcgtgctatgcagcgatggagggctgtggagattttattcccttctgaagcagaagctgctgctgatttcgtggatgatggtgtttctataccaagggtgtctgcaactgcaagtgcaactgtagctccatctgctggttctggtaatatggaagattcacaaaccttaattgataaggctttagcagagctgccacaagagcttgctgacctcgctaaagatcctaagaatcatgctagatcaaaggatccgggctggaagtatggattttggcccaatgagacaaagaaggaaatggtacagtgcatattttgtaaaaaggttgtgcctgcagggataaggagattcaagcaacacctttgtggtggttttggagacactgaaaaatgtccaaaggcacctgccattgttaggaaagagatgcgtgattaccttgttcagaatacaaggtcaaaagccacgctgatggaagaagagaatgtacaaactgcagaagaggaatgtcaaggtgaagttgttgttgtgccaagttctggaacaaaggcaaaggaagcaaaaagaaaagttattgctcaagcttccattacttcttttgttggaaagaaatacgtaaaatcagtgagttcgatgttgtgtaagactcctgaagaggtagtcaatcagaggcatagttccacatcttctcaacctacacttgagcattgtacaaagaagtcaaaggaagcaaaacaaattgtagatgatcatgttgcagattttttttatgagaatggaattccattgaatgcaatcaattcaagaagctgggaaatcatggtggagtcaattgggcaatatggacctggttaccgatctccttcttacaatgccatgagggaacccgtacttgagagggcagttgtgaagacaaatgaattaaggaaaaggcatgaggaatcttggaaggagtatggttgcacactaatgtctgatggatggactgaccaacgacaccgccatctcatcaatttccttgccaacagtccagcaggcaccttttttctaggttatgtggatgcttctagtgaggttgttgatggcattatgttagcaaacttacttgagaaacaaattgagatgattgggaaggaatatgtggtacatgttgtaacagacaatggtgctaacttcaaggcagcaggtaggattttaatggagaggataccaactttgttttggaccccttgtgccgcccattgcttagatttgttgcttgaggaccttggtaaaataaaggatttcagttcttgcatcaatgatgcaaaaaaggtgtctaggtttatatataagcatgggagaattcttgatatgatgagagcaaaggtgggtggagatttggttaggccggctgttacacgttttgcaacctcctttcttacacttgctagcatgcataggcataagcaagcactgaaaaacttatttgtcagtgaagattggtaccgcaacaaattatctacatctatggaagggaaagctgcagagaacattgtgttgtctgtacccttttggaatcatgtagaagattgtttgaaagcttcacagcccattctaattgctttgaggatagcagatggtgatgagacacctgcagttcctgagatcgtgtcagccatgaatacagcaaggacgagcataaaggaatctttgaaaaaaaagccacagctgttgaatgaagttctagggtactttgagaagagatgggagaatcaaatggagcaaaaactatatggggcagcattgtttttgaatccagccaagttttttcctataagagagaatgatagaagggaagcaactagacttaggtcattgttcaatgatgttctatggaaaatggtgtcggacgatgatgagcaaagcataattagcaaacaggctgatgattacgagaggtctgaaggtgaagccttctcaaaggcaatagcaataaaggataggaaccgaaaaaatcctattctttggtggggtgcatatggtgggcttgcatatgagcttcaaacattagcaaaaaggattgttagcctttgttgctcggcatcaggatgtgagcgcagctggagcacattttctcagatacacaccaaaaggaggaatcgattagagcacaagaggttgaataaattggtttatgttagctacaacagaaaaatggcaaataggtttacaaagatacgtgagctcggttcgaagggaaagagaagcaacccattgcaccttgaagaatttcagtgggaaaatgagtgggttgtggctgataatgattcagttcatcaaggagctgcacatgatgaggcaattggtgcatctcaaggtttaagtggccacaatttgccaatggttactgctgcacatgccagaaacttatggactactagtgagtttccaacaaggaaaagaacctcaagaaagcgtcctagggtacctgaaccaactattaatgaagaggagatccttgaagatggcgaagaatctgaatctgaggaaatgcaaaagaatggggaagatggttctgggccttctacctcatttgggactgaaaatgcatttcaagtggatgaagatttgctttagatagtatatcaattaccagtggactttcatttgagaactttaaactttagacttatgtaataattgttgtactcttttgctggaagcctgcaatggcttgttatcctgttcctctgaccttgaaatagcttgagtgcttgacaacttgc

SEQ ID NO: 3115 - DNA, 3581 bp, Zea Mays
agctcccttcctctcgcgtccatcttccccagcgcccttggagcggacgtactctccctcatctccttccccgacgccgccctctccctggtcgagctcgacacgccagatcgacagtcgccatcccctgcgttcggcccaacgttttctgatcgtccgattaatcgcgattaatcggcgattaatcgactgatcagcatcacgcatccgataaggagtaccgacgctatcagggcgattagaaacctgatcgtccgattagtcgacgactaaacgcgattagtcgtccgactagagatcgcggacgatcagtttggcccgcttcgtttttcactgttcgttactttcatttcggcccactcactgccactacagcccagcccactacagcagtacagcccactcagtcactcattcagtacagcccactcacactcagtcactcacggccacgcacgcaggcagcacgttcgccaatcgccaacgccaactcccattgaaaccctagacggtgtccagttctccacacgggcgacggcggccggcggcgcgccaccggcgacctgcgccccctccgcggtccctccccacctccccagttccccaatcccagcgcgccaccgacgcatagcagcaggcagcaccgcagcagcactgcaacactgtattcttctccgcagtcccagtcccagtcggccagtccccacctccagcaggccagcagcaataaactttgagtgagtgaagtgttgaattgctgttaaactttgagcagcaataaatttgcagcaggcccactgaagatgagtaatacttcatcttcgtctagcgcgatggagggctgtggagattttattcccttctgaagcagaagctgctgctgatttcgtggatgatggtgtttctataccaagggtgtctgcaactgcaagtgcaactgtagctccatctgctggttctggtaatatggaagattcacaaaccttaattgataaggctttagcagagctgccacaagagcttgctgacctcgctaaagatcctaagaatcatgctagatcaaaggatccgggctggaagtatggattttggcccaatgagacaaagaaggaaatggtacagtgcatattttgtaaaaaggttgtgcctgcagggataaggagattcaagcaacacctttgtggtggttttggagacactgaaaaatgtccaaaggcacctgccattgttaggaaagagatgcgtgattaccttgttcagaatacaaggtcaaaagccacgctgatggaagaagagaatgtacaaactgcagaagaggaatgtcaaggtgaagttgttgttgtgccaagttctggaacaaaggcaaaggaagcaaaaagaaaagttattgctcaagcttccattacttcttttgttggaaagaaatacgtaaaatcagtgagttcgatgttgtgtaagactcctgaagaggtagtcaatcagaggcatagttccacatcttctcaacctacacttgagcattgtacaaagaagtcaaaggaagcaaaacaaattgtagatgatcatgttgcagattttttttatgagaatggaattccattgaatgcaatcaattcaagaagctgggaaatcatggtggagtcaattgggcaatatggacctggttaccgatctccttcttacaatgccatgagggaacccgtacttgagagggcagttgtgaagacaaatgaattaaggaaaaggcatgaggaatcttggaaggagtatggttgcacactaatgtctgatggatggactgaccaacgacaccgccatctcatcaatttccttgccaacagtccagcaggcaccttttttctaggttatgtggatgcttctagtgaggttgttgatggcattatgttagcaaacttacttgagaaacaaattgagatgattgggaaggaatatgtggtacatgttgtaacagacaatggtgctaacttcaaggcagcaggtaggattttaatggagaggataccaactttgttttggaccccttgtgccgcccattgcttagatttgttgcttgaggaccttggtaaaataaaggatttcagttcttgcatcaatgatgcaaaaaaggtgtctaggtttatatataagcatgggagaattcttgatatgatgagagcaaaggtgggtggagatttggttaggccggctgttacacgttttgcaacctcctttcttacacttgctagcatgcataggcataagcaagcactgaaaaacttatttgtcagtgaagattggtaccgcaacaaattatctacatctatggaagggaaagctgcagagaacattgtgttgtctgtacccttttggaatcatgtagaagattgtttgaaagcttcacagcccattctaattgctttgaggatagcagatggtgatgagacacctgcagttcctgagatcgtgtcagccatgaatacagcaaggacgagcataaaggaatctttgaaaaaaaagccacagctgttgaatgaagttctagggtactttgagaagagatgggagaatcaaatggagcaaaaactatatggggcagcattgtttttgaatccagccaagttttttcctataagagagaatgatagaagggaagcaactagacttaggtcattgttcaatgatgttctatggaaaatggtgtcggacgatgatgagcaaagcataattagcaaacaggctgatgattacgagaggtctgaaggtgaagccttctcaaaggcaatagcaataaaggataggaaccgaaaaaatcctattctttggtggggtgcatatggtgggcttgcatatgagcttcaaacattagcaaaaaggattgttagcctttgttgctcggcatcaggatgtgagcgcagctggagcacattttctcagatacacaccaaaaggaggaatcgattagagcacaagaggttgaataaattggtttatgttagctacaacagaaaaatggcaaataggtttacaaagatacgtgagctcggttcgaagggaaagagaagcaacccattgcaccttgaagaatttcagtgggaaaatgagtgggttgtggctgataatgattcagttcatcaaggagctgcacatgatgaggcaattggtgcatctcaaggtttaagtggccacaatttgccaatggttactgctgcacatgccagaaacttatggactactagtgagtttccaacaaggaaaagaacctcaagaaagcgtcctagggtacctgaaccaactattaatgaagaggagatccttgaagatggcgaagaatctgaatctgaggaaatgcaaaagaatggggaagatggttctgggccttctacctcatttgggactgaaaatgcatttcaagtggatgaagatttgctttagatagtatatcaattaccagtggactttcatttgagaactttaaactttagacttatgtaataattgttgtactcttttgctggaagcctgcaatggcttgttatcctgttcctctgaccttgaaatagcttgagtgcttgacaacttgc

SEQ ID NO: 3116 - DNA, 4053 bp, Zea Mays
aatgcatcaaacagaccctaaatatggattataagtgtgacccattcatacatcaacttcttgtcgactttcctcgtcttcaattgtcacccgtcatgcttggtgatgatcacctcgtaaagcataaaaagaaaaacagtcgtgttatcaaagaaagcaaacaagcatagaaggcaggacacgatgttatcatataagtgctagtttgacaactctattttcttaagagatttttatctttaagagaaaaattaactaatatttcttggagaaatagatttttttttagaaaaatagggttgtaaagctagcgctaagaagctttaaaaagctttaaaggcaacgggtatcaggaggatagccggagcaaaggtgactaggcgagaacagatgcaaaccgacggttgaatcaaatcaatcacacgtgagtgaccaagacgagcataaaaggaggccaaaaatagcctctgctagatgctatcccacccgagctgagcaacgggatcgcacagccccaactaaactccgcccgccggtggttgcggatcgagggcaccgcgttcgcatgctcgccggtcatggctccagtgcatgcccgccgttccccggtatataggactcccgcaaggcgccccagcactcccgtaaacgcgtgtcgcgcccgtcgccaagcaaacaccacgacgcgcgcgccgtgctctctggcgagccaagagccagtgcattttgctcgcaccccgatcgcggccgggacagcgcgctcgccgtaggtgcatgcgtgcgtgtgcgacctcgcttcctgcccctgaggcctcgcctgcagctagctccaaagcagcaggcgcaccgcgcacccccggtgcggcgcgagcgcatgcatgagcgtccgcgcaatgtctctctgccgccccgcgttccgagcagagtttccccgctaatatccagcgagacggcctgttcctgagcagctgattcgtcgtttgggttgcccactgccggggccatggatcagcagcggaggagcagcatcaggttgtacgggtccaacgcctcgtcccggtcggggtccttcgacttcgaacacgaccaggacaaggaacgcgctgaccagcccagcgacggcgaccgccgggaggtcgtcgtgaagatcgacgccgagccgcactcgccggtctccctccacgcggccggaggcatgtccgggcacagctccgcggtcagcacgccgcgggccggcggcgcggtgagcatgctcgcggcgtctgcgtccggctcgagcgcgtcgacctccagcgctgggggcgatgcgccccgctccggcgagtcgttcagtttcaagaaccgcacgccgcagtcttcggccggcggcggggagtccagcgaagatccgccgagccgcctcattggcagcttcctccggaagcaggcggccgctggcggcgagctgtccatcgaccccgacttcgaggtggacgagatgagaaggccgccacgcgcgccgacatctgtcaacgcctccagggagctgcgcgtctcgttccaggatccccggaaacggttctccccgtccacgtcgtcggcgtcctcctcctcctacgacgccagccacaaccggaaccagagcaccatcgacttggacactgccgaggtgctacgctgcacgtcgacgtccaccggttcctccctgctggcgcgcagcaagacgcgatctcggctaatggatcccccgccaccgtcgacgtcgagcgcccccgccagcgaggtggatccccgaaagtcatttgtctccaaggggctgccgcccaagtccggccagctccggtcgggtcttatcggcaagtcggggctcattggcaaatcagggcccatcggcaagtcaggtgccttcgaggatgaggacgacgacccgttcatggacgagggcatgacctcggacttcaagcgcgacaccatggactgccttctcatcatggagtgggtgagcctggtggtcatcgtgggcgcgctcatctgcagcgttaccatacccagcctgtccataaagaagctctcggggctccacctctggaagtgggagctcctcgtgttcgtgctcatctgcggccgcctcgtgtccggctgggtcatccgcatcgccgtcttcttcgtcgagcgcaacttccttctgcgaaagaaggtgctctacttcgtgtacggcgtgcggcgggccgtgcggaacgtgctctggctgggtgtcgcgctcgtgtcctggcacctcctgttcgacaaggccgccaagcgggagacgcacacgctggtgctgccctacgtcaccaaggtgctgtgctgcctcctcgtggccaccgtgatccgcctcatcaagacgttgctgctcaaggtgctcgcctcgtccttccacgtctccacctacttcgacaggatccaggaagcgctcttcaaccagtacgtcatcgagaccctctccggcccgccgctagtggacgagagccggatgatggctgaggtgcagaggctccagagcgcgggggcgtccatccccagtgagctcgaagcgacagcgatgccgggcaagtccgggcccactgcccaagagtgggcgcctcacgacggccacaaaacagagcgccatctggatgacggcatctcgattgaccagctccacaagctcagccagaagaacatctctgcgtggagcatgaagaggctgatgaagattgttcggtacggggcgctgacaacgatggacgagcagctcaagcatgcaacgggcgaggacgagctggccacggagatacacagcgagtacgaggccaaggttgctgccaagaggatcttccagaacgtcgccaagcctggatccaagcacatatacctgtcagacttgatgcgtttcatgagacaggaagaagctctgaaggcgatggatcttttcgaaggagcgcaggagcacaacagggtcagcaagaggtcactcaagaactgggtggtaaacgcgttcagagagcgcaaagctctcgccctgacgctcaacgacaccaagaccgcagtgaacaagctgcaccagatggccaacgtcgtggtcgcgctcatcgttctcgcgctctggctcctcatcctggggatcgcgacgtccaagttcttcgtcctgctcagctcgcagctgctcgtggcggtgttcatgttcgggaacactctcaggaccatcttcgaggcgatcgtgttcctgttcgtgatgcatcctttcgatgtcggcgaccgatgcgaagttgatggaatgcaggtggtcgtggaggagatgaacatcatgacgacgatcttcctccgatatgacaacctcaaggtgtactatccaaacagtaagctagcccagctaccgatcatgaattactacaggagtcctgacatgggagattcggtggacttcactgttcatgtcgcaacgccggtggagaaactgtccctcatgaaggagagactgatgcattaccttgacaacaagaaggagcactggtaccctggctccatggtggtcctgcgcgacgtggacgacacgaacaagctgaaggcctccatctggtgtcgccagacgatcaacttccacgacatggggatgaggttcgagcggagagagctgctgctccaggagatgatcaaggtcctgagagacctcgagatcgagtaccggatgctgccgctcgacatcaacgtccggaacgcgcctgccatccagtcctcaaggatgccgtcgacatggacgtttagttattgagatgagatgagatttgtgctgctagaggtagtagttcctgagtgagttgagctgtgacagcgttctgacgagaggcggcaacaggttttgctgtcgctgcagccatcacttgagctttttcctgtagttattgtgttgttggtccaagtactccatagttatctttagtccatctcagatatctttagttcatctcagttatattacctgatgcttgtcattctattacagatggtattgaataattgatttcatcacttggtaatgatttcttcagaatacat

SEQ ID NO: 3117 - DNA, 5417 bp, Zea Mays
cgcccccatcgaaacacagccaaaaagccaccccgtccaaaacacacacacatagctcccaatcccaacccccggccaccctccatctcctgctcctcgcatcgccggtgacctcgccgcctcgctctgtctcaaaaccctagccccggttctctccgccgcctcgccccgttcgctcggatcgcgccgcgggagccgctgcctctcctctctctccgccctccaccggaaaccctagctcactcccccgctcgctccttcggatcccgcgaggctccgatggcggagaggaagctggatcgaccctcggcactcggcaaaggtgggctgtcgcttgggatcgaggaggacagggccgccgccgccatggggttcgtcgaccactccaaagcaccacctggataacagcattcccctttctcctcagtggctctacgccaaacctgctgatggaaagatctcgctgcctcatgggtcctcccttgaacctgctgaaaaggaagcgaggatgttggaaggaactgctgataggaaagaacgaaggaggaatgtatttgatgctgacagtggtcttcgttggcttgaagaggagagggagacaagccttcttgggaggagggagcgcaagaaggatgtagaccgggatgtggataaccgcaagatcgatcgccgatctgacaatgtttctgcaagggacaacactgatccgcgcacagctccttcatctgaaaggtggaatgatggttccacccgtagcctggggaatgagggtcgacgtgatgcaaaatggtcatcaagatggggccccgatgacaaggagaaggactccaggtcagacaagaaggttgatgcagagaaggatgaaactcatgctgataaacaggccttcacaggaaggctgctgtctgagtccgattcccgtgataaatggaggcctcgtcaccggcaggaaagtcattctgttggaacagctacgtaccgtgctgctccaggctttggatccgagaaaggacgtgttaaggactcgtctaatgttggttttgccgctggaagaggcaggggaaacccaaactcagttgcatccttcaaccggccatcatctgcaggatcaatcggtgctccagctgtgcatgggaaatttgcaaaaactgcagttagtttccgctacccaagagggaagcttcttgatatatacaggcagaaaaatatgatgtcgtcgtttgatgatgcccacatgaaactggacgaaattccttctatcacactctctattgctgcaaaacctctagcatttgttgcaccagatactgttgaagaggctctcctggaagatattagaaagggtaaagtcattagcagtgaaggaatcaatgggactggaaacaaggagagggcaaaagagctcgaagaacctgcttctggtattgatgatgacaagggcaaagccagttttgcaattgctgggttgggtcaagaagggtcttcaggtttaatctcagtgaatgatgccttctatgttgaagggacacttcctagtggtgtcagtacatctctgccgaagaaaagtctggagggaaatgccttcagcaatcaacataggattactgacactcaggaaggtttgaaaactgctgagatcaaggaaaatgttgatcatgatcttggcactaagctacctgatgattcgaacactctgtttgatgtaccatcctttgagcatcttcaagaaccccctaagccataccaaagcaacaacatggatacaaaagtgggtggccatgctatttatccagaagagttgacattatattatctggatccccaaggaggtgtgcagggtccatttctgggtgctgacataatctcttggtatgaagatggatacttcggtttggagttacctgtacgtctgtctcagttttcagatgatgttccttttcgcccacttgttgaagtcatgccccaccttgtgcaaaagccgcaatcgcgtatacctgtaccttgtgatggaaattctgaatctcttgaatcatctcaaagtaaatttgaatccagtgtccgttctgcttcctctgtgaggggtgaccaattgtctaactgggatactgaaagcaatgctgttgatcctaaaagaggtgatcatgaagaatcaataccttctcgtagtggttggctatcttcaccggaaacaggaaaggatatatcaaatactagtaatcgccagcagcacattcctgaatcagtgaatcaggatgccgaagaagtgttgtacactgggaggcctaacagtagcatgggtcaatctttacgagaccttgagaacgaccatgcagatttccagttgacaccacatgatccccattctgtggttggagaagctaatttgccgcagcataatgtcccaagggacagcgatctgagtcctcttggcttactttggtctgagctggaagggcatccaaaacaacctctctcatcaaatgtacttggtgtaaatgaacgtagaaactccaagcctacaacacccaaggacattctacctgtaaacatgagacaagggccacttagcaggatgaatgaagtttctagtgtgcgtgatgagtggcctgcaaactttggacggctggacaatatgaatggccctaacatttctggcagaatccctcaggttgaagctgagcatcatttgaattttgatgggcacctcctgcttcagcagatcagacgggagcaacagcaacatcaacagcgacaggagcaattgatggcccgtagtaatttagagttttctggtgcatttcccgggcaggtgtttgattctttgcaccaacaccgacagcctatgaatcaacagcttcctgatgtagagcatcttttgagagtccagtttgaacttgagcaacagcagcaacaccaactccaacaagagcagcaccaacggcagctacagcagcaacgacaagcccagtttttgcaacgacagcaacagcagcagcagcaacagatgattcttgagcaattgttgcagcagcagctgcagggttctaattttggaccaacaaatatggttgatcaagtcttacttcgtgaacatgtatttaatgaactgcaccagcagcctcaccatttgcaaaggcagcatgatgcagctattgaacaacttattcaagccaaatttggtcacgggcttcatagggagcaccataatgatatgttggatgttctctcacgttcaaatcagagacaaatgcttcctttagagcagcaaattcttttaggccttcagcatgagcatgaacaacaacttcagtcccaacaattggcaaatgctctgcggcaacattcaggcagggaagaagaaatgcacttaagtggggtctggccaatggatgatgctgcccagtttatccgctcaggaaccagtccaaatcagagacacggttgtttcgatctcctggagaaccttcagagatcgtcatcgtttgatcatcatgaccatctagaccgcagcttatcgttacaggaacgattgcatatgggtggtctaggtattcactccctagaacgatctgattctttgcctggtggtggtcctggaccaaacacagatgtcataaatgccctatcacgccatcatggacttgggcagttggaaacacatggtgatgtataccctttgggtcaaatgcctatgcttccttcaggtgttcatcctcagcaacataggcatcaggaacagcttcctggttctcacataggaaggcgtgaaaggcactggtcagatgccaatggtcagttgcaaaatagtctaatgcaatcttcacacatcaaccagttgcagatggaagtggagaagcagaggaggaatgtggaaatgaacctttctgttgacaatccacatgcatgggcagccctaatgaataaagagaggaatgcagaacaagatttgagtgatatgattcacaagaaacttgcccttcaatcgcagcagtcccttggttttcctgatgtttctgttgcggcatcatttgggcataaagatcactttgtgcaacctgttgcggagaaccctctgaaatcagtggacatgttgtcgtttgaggagtctctttcagaaaggtcactttatgcaaagtcagggcagttggcacaagagggatcagctaatctgggtactttacccaacagtattgagaacactggaaattttaaccttagaccaggatctggatcaatgtttgagcagaagcatttccttggaattgacgatgttcaaagtgacttttcagagaccacaggtggtagaacatcagctaatcaactggttgggagtgtcaatgaattaacaaggggtaaaaggcagggttctagtgcaagtttggctggggatgatactaatttttctgaagaagctgttagtaaatggtctgattctggcatgtcaaaaggaagctcacactccttactaaagcgctctacaagccaacatagtactacatctcagtctgtttctgcagatctgtcagtgatcaggctgaagaaagcaggacttgcatcctctgatgagaataagatggaatcaggattggcctcagtagcccagggtatggaaggctgcgttattagcaacaaagagacgggggcgtatggcatgccatcagccaccaacaatccagatgcctctggtcagtccttcagcgaagcgttgaagagttcgaggaagcctcagttgcagtacgatgcctccgaatctgcagatggtggcccaggtggtaagggcgcaaagaagaaaacgaagaaagggaagcagattgacccttctcttcttggcttcaaggtccacagtaaccggatcatgatgggcgagattgttcgagatgattagcacgcatgagtgtacatacccggtaggagttggccttagaatcatgattggcttcaagctctacagtaaaccctaaactctgtacatgccagaaattttgtgccatggcttcacttctgcttagatcttctcttagcctctgttagttatagacttgcccgatttctcaggtttacagaagtgtcatttgtacagaacagccaagatcatcatgtatttagtggcaaagttttattgatctgtgttaaactgtgaagatgtcgtagtgacggaacttggaacgtttgtgctgttgtttctttctgtttaggccttgttcgctctcaatccatatagatttagtgggtttaaattctaagcatgtcaaacttcttaattttttcaatctcatctaatccatgtgtcatagaaataaccgaataaggtaggtatttcatagtgaggttaaatctatcatttaatctatttatttcgtaaagctgattattcttttgatctatgtatctctaaaagctagttattcttttgtttc

SEQ ID NO: 3118 - DNA, 2242 bp, Zea Mays
acactcgtggttgtttaccgtgcgccgggctcctcccccacatgggcaagcgcaggcgcggcacggggagcagggcacacgcggcgtagtagcgccaagcgaggccgcggccacgccttctccaccgccgccgcccgcgccacatcgccaccgtctcgcaccgtcgcggccacccattctctctcgtccatcgcatcgctccggctcccagcgcaatcgatccatccgtccctaggtgtgcttcagctatgcagttcagcagcgtgcttcccctagagggaaaagcgtgtatgagcccagtgaggagaggcagtggaggttatgggagtgagaggatgaggatcaactgctgcagcatcaggcgcaacaaggcactgaggaggatgtgtttcagtgcaaggggtgctgtgagcagcacgcagtgtgtgctcacatcagatgctggcccagacactcttgtcgtccgaacatcctttcggaggaattatgctgatcctaatgaagtcgctgccgtcattttgggtggtggtaccgggactcagcttttccctctcacaagcacaagggccacccctgctgttcctattggaggatgttacaggcttattgatatccccatgagcaactgtttcaacagtggcataaacaagatatttgttatgactcagttcaactcagcttctcttaaccgtcacattcatcgtacctatcttggtggggggatcaacttcactgatggatctgttgaggtgctggctgcaacacaaatgcctggggaggctgctggttggttccagggcacagcagacgccgttagaaaatttatctgggtacttgaggattattacaagcataaagctatagaacacattttgattttgtcaggagatcaactctatcgtatggattacatggagcttgtgcagaaacatgtcgatgacaatgcagacataactttatcatgcgctcctgttggagagagtcgagcatctgactatggattagttaagttcgatagttcaggccgtgtaattcagttctctgagaaaccaaagggtgctgccttggaagaaatgaaagtggataccagcttcctcaatttcgccattgattccccagctgaatatccctatatcgcttcaatgggagtttacgtttttaagagagatgttttgttagaccttctaaagtcacggtatgctgaactgcatgactttggttctgaaattctgcccaaggctttgcatgagcacaatgtacaggcatatgttttcactgactactgggaggacattggaacaatcagatctttctttgatgcaaacatggccctctgcgagcagcctccaaagttcgagttttacgatccgaaaacaccattcttcacttcccctcggtacttgccaccaacgaagtcggataagtgcaggattaaagacgcgatcatttcacacggctgcttcttgcgtgagtgtgccatcgagcactctattgttggtgttcgctcacgcctaaactctggatgcgagctcaagaataccatgatgatgggtgcggatttgtatgagaccgaagacgagatctcaaggctactggcagagggcaaggtgcccattggcgtaggggagaacacgaagataagcaactgcatcatcgacatgaatgccagggttggaaggaacgtctccataacaaacaaagagggcgtccaagaagccgaccggccggacgaaggatactacatccggtctgggatcgtggtagtcctgaagaacgcaaccatcaaggacggcaccgtcatatagagactaactttggccttacgcatggcgtgcaaggttacaggttagtcatcgtcttgagagttgagacttagtttgaggcgcgcgcccgaccttgacttgagccgtcggagggacaagaacatgaggaagaagggctggtggtgccggatgttgccatggacgacgagaaatggtttggtgcggtcgcatcggttccagtagctagctcttccgatgttattaatatatgtatctagtggagtagtgcgaacagtgcaataagctgggcgagcaaagccgcggcaactcttggcttggggattgttggtgcatcttgtaaataataaactcggacgcagcaaatgaaacatgcccctcatcttcttccatatcttcgcaccgtatgccttgccctgtctttatatgagacgatggtgtaggcatgatgacacgtctgg

SEQ ID NO: 3119 - DNA, 2618 bp, Zea Mays
cctaatggattttttttatatataatggaaaaaaccatgttccagccttttgcatcaaggatgcatatggcttcatagtacaatcaacataaacaatccaaaacatcacatactcaacccaactaaaataaaaacatcataacacagtttctcatgaacataaaaaaaacactaataagcctcaattctagcatcgctgcatctccagccatcaccaccacttccattgcacgacaaacatccatccttgatatctcggtgtaaatcatctttttgcagcaacctccaaaatggatgattggatgcttccctcacccagcccaagaacactgatgccaagcttcttcagtgaagagttcatctccactccgttctccaacatcttcgctgacgatagaggcagcaaaccccaggatgaaaacgaggacagtaacacctgcattggttccggtgctcacgaaacctctcaagatgtgaaatgccatcgtccacagatcgaatcgaacatttttggcgtgaatcagaaaccgacctctcctggaggtcttgcggagaggatagctgcaagagccggttttggtgtcctgaaaattgacatatcccgtgtcggttcatctggtgcggcgattcggtctcccgtgacaattccatctggtgtgagcccaagggaacttcttgagtcgccggttttccttccaaatgccatttcgcaaccttctcctaccactgccctttttgaggtctaaaccaccaacattatggactgcaaagaaggggccaagtgttgttcacgaaaccgggtccttatcaaaggatagccaggaggagctaaaccttcatgctaacccagcagctgcgaccgagcatgaaaccgaggaaagtctagttattagacctaaggcatgtgattccatgttcgacaatggtcatccttcttcccctgacgaaggaccagaacagagcgaggaaaaccaaaaccgggaagattgttcagctccggtcactgcccccggcgaggatggatacaactggagaaaatatggacaaaagcaggtgaagaacagtgagcatccaaggagctactacaaatgcactcacccaagttgccctgtcaagaaaaaggtggagcgttctgtagaaggtcatgtaacggagatagtttacagaggttcgcatactcacccactgccgctgcccagccgccggtcgagcgtccctcccacgcagctcgagtgtggttcacaatctgatggtctggagaacttgagctccaagcctgggcctgcctatcactcagcagcttcacaatcacagggaattgctccagatggccagttccaagatgtgcatagggaagctcttgaaacaaaactgtctggctctcttactacaactgagattgctgacaggcccgttatggatgtctcatcaacactctcctccaatgagaatggtgatagggcagttcctccaaccaatggcaggaacgaagatgagaccgaatctaaaagaaggaaaatggaggcatctgccgctactaacactaccaccaacactggcattgacatggcggctatggcatccagggcttcccgtgagccccggattgtcgtgcaaacgacgagtgaggtcgacatccttgacgatggctaccgctggcgcaagtatggccagaaagttgtgaaaggcaacccgaacccaaggagctactacaagtgcacctacgcgggctgctcggtgcgcaagcatgtcgagagggcctcgaacgatctcaagtccgtgatcacgacgtacgaggggaagcacaaccacgaggttccagctgccaggaacagcggcaacgggcatccgagctctggctccacaccagcaccaccacaggggagcggcggccttcaccggaggctggagccgccacaggtcagcatccctcggttgagcgctgctgctgccgccgccgccgccgccgctgcctacggctcgctctcgcttcgtttcccaccacagctcagcgcagctcccgggggtttctccttcggaatgctccgtcccactggcatggcaccgtctctgggcggcttcttgccagcgcagatgccaggccgtgggttgccgatgcagggctgcgcgggcctggtgctgccgagaggcgaggcgaaggtggtgagcccagagcagcagtccggattgccggtggcgaacgggaatgccgcggcaacctaccagcagcagcagcagcagctcatggccaggtgggctcagggtcatcagatgtgaatactcactccagcaggcacaagagatgaagagatagggtttgtttttttctttttcctttttttttgttgcttgtgtacataaacaatgtcattgtttgtggtttcttctaccgtagctcctttgtttgcttttgagtacagatgattctgataatagtgaggagggagaggggaagggatgaacttggctgctgtgtttcactgaactattcagactagtaataactaataagcttcaacatctgctctttcgcagtgctgtaaccattcaaagacagagactatcccatagatcggtcagtattatttttctggtcgttttttatttattaaaaaaat

SEQ ID NO: 3120 - DNA, 468 bp, Zea Mays
tgcaaattctgcagcctgctgagcacagccagttgactcaagcgccatacctctgctccatagtgggcacccgtgtgtcacgggcacgacgagattcggcggggatggcgcggtggcgggcgcggcgcctgctgcctctggccaccttcgtcacactcggcatgatccttggatctttgcttcagttagcacttcttcatcgactagatggctattcaggtgaagcctgaagttatcagctggacgccaaggataattgttttccataattttcttagttcagaggagtgtgattacctaatggcaattgctagaccaagactccaaatatccactgtagtggatgttgcaacaggaaagggtgtaaaaagtgatgttcggacgagttctggtatgtttgtgaattctgaagaaagaaaatctccagtcgttcagttatcattctatgccagtgacacaaaagagtgc

SEQ ID NO: 3121 - DNA, 2718 bp, Zea Mays
gtcagccacgttctgatttcgaagaggggcaaaaaagtccaagcagatgatcttttctctgttgatgtatcgaatagctcttcaatggcattttgtctgtaaacagcgtgtgagaatggcgaactagcgaagaccttgtacataatggcatttgggcgaaacccaagtttcataatggcatgattccaaatttctcctctccgcgacgggcgcccatggccatggcagacgaaacccttgcgccctcgtcgtcgtcggcaaagccctaaactttagtccacctccatttcggaaccttagccgggcgttcctgcgccgctgccatgggctgcagtcgccatgtccgttttgtctcctccggcgtcaagctaccgtccgcgtccgcgccatccccgttcccggcgcccgctcccgcgctcctctctgcggcgctcccgttcgcgcacatcggccgcgccatcgacgccgccgcgcgccgcctgggcgcatgcctgccccgcgtcccggttgcacgggccgacacggctccgcccccgccgcggaggcacgggaaggacggcggaggggccgaggagcgggtgctgatcagcgaggttgcggtgcggggaaaggacggggagccactggagcggcccgagctggaggccgaggccgcggcggcgctgcgcgcgtgccgccccaatgccgcgctcaccgtgcgggaggtgcaggaggacgtgcaccgcatcgtcgagagcggactcttccgatcgtgtatgcccgtcgctgtcgacacccgtgatggcattcgcctcgtcttcgaggtggagccgaaccaagacttccatgggctggtatgcgagggtgccaacttgctaccgtccaagttcctggaagatgcattttgtgttcgccatggaaaaattattaacattaggcatctggatcaagtgatcaagtccgtcaatggatggtatcaggagcgtggcctaactgggttggaaactaaggtgataaggacagaaagaagggaacaatgggaaagcagacatgcctagtgagcgcggatgttaacatacaaaataggaacgaaggtctcatatgctgagatactttctggagggattctgaggctggaggtttcagaagctgaggttaataacattagcattcgctttctagacaggaagactggtgaaccaacacttggaaaaacacagccggaaaccatccttcggcagcttaccaccaggaaagggcaggcttacaatagggcacaagtgaaaagggatgtagaaacaatacttactatgggaataatggaggatgttacgataattccacaaccagttggagattctagtaaagtggaccttgtcatgaatcttgttgaacgcccttcgggtggtttctctgctggtggcggaatttcaagtgggataacaaatggacccctttctggacttattggcagctttgcgtattcacatcggaatgtttttgggaggaacaagaaattaaatctctctttggaaagggggcaaatcgattcaatatttagattgaactttactgacccttggattgatggtgacaacaagagaacctccagaactgttatggttcagaactctaggactcctggaacacttgtccatggtggtgatcatcctgaccatgggcctataacaattggacgtgttactgctggcttggaatatagtcgaccattcagacccaagtggagtgggacacttggcttaatttttcagcatgctggcgctcgtgatgataaagggaatcccgccatcagggatttctataacagccaattaactgccagtggacatgattatgatgatacattgctagctaaatttgaaagtatctacacagattctggggaccatagctctgcaatgtttgttttcagcgttgagcaaggtctccctgttcttcctgagtggctaagcttcaacagagtgacaacacgtttgaggcagggctatgaaattggtcctgctaggcttcttctaagtgcctctggaggtcacgtggagggaaattttccacctcatgaagcatttgcaattggtgggacaaatagtgtaaggggatacgaagaaggtgctgttggctctgggcgttcttatgctgtaggtagtggtgaagtgtcatgccgcatgtttgggccactggaaggcgtggtctttggcgactatggtagcgatcttggttctggtcctaaagttcctggtgacccagccggagctcgtggaaagccaggtagtggctatggctacggtgttggcgtccgcgtggactcccctctgggacctctgcggcttgagtacgccttcaatgataggcaagcaaggagatttcactttggtgttggctacagaaattgacatgtatattgattacattcagattcagccttgttcttcttagcattttgggctggtagaagatagtgccatgccttccaatttttggcgtttatcaaagcaaattttgtttagatcagatttctttttttctgtaacatatagtttccttctccacttctgtcgagtgttctccagctagagaaattagatggccccctgtaacgccctgaatttggggtaagattttttcttcttttctctcaccaaattcgggtgttactctcttttctctttccccgtttgctccttctccccaatttcaaactagtatagcgacaggtgtccg

SEQ ID NO: 3122 - DNA, 1763 bp, Zea Mays
aaaagcccacatagcctctccctctctctgtcgcacgccaccacccagaggccagagcgcaaaacccacgaccccacctcgcatcctccccgtcgccgtcgccgtcgcaatcgcaacccacgccgtcgcacgccacctctccctcggctccgacgatgtcggcgccatccgacgccgcggcggcatccgcagctcccgcgcccgcgccgacgactgccgccgcctcctctagcggcgggttcaccttcaagctccacccgctggtcattgtgaacgtctccgaccaccacacccgcgtcaaggcccaggccgcctgctctgcggacagctcctccccctcgtccgggccgggggccgggcagccgccgagggtgttcgggtgcgtgatcggggtgcagcgcgggcggaccgtggagatcttcaacagcttcgagctcgtgctcgacccagtctccggcaccctcgaccgcgccttcctcgagaagaagcaggagctctataagaaggtgttccctgacttctacgtgctcggttggtactccactggaagcgatgtgcacgacaccgacatgcaaatccacaaagccttgatggatgttaacgaaagccctgtttatcttctattaaatcctactatcaacctctcccagaaggatctccctgtgactatttatgagagtgagttgcatgtcatcgatgggtgtcctcagcttatctttgtcagatcaaattatacaattgagactgtagaggctgagaggatatctgtggaccatgttgcccatctcaaaccatctgatggtggttcagcagcaactcagttggctgctcatcttacaggaatacacagtgccatcaagatgctcaatagcagggtccgtgttatccatcagtatcttgttgccatgcaaaaaggtgacattccaatggacaattcgctgcttaggcaagtctcaagccttgtaagaaggctaccggctacggaatcacagaaattccaagatgactttttaatggaatacaacgacactctcctcatgacttacctggcaatgttcactaactgttcaagcacaatgaatgagttggtcgagaaaatcaacacaagctatgagagaccgactaccaggagaggaggccgaggtgctttcatgtagctcacctgccatgatcctgctgctgctttcatctgcaaaactgatgatttgctggaattgtatcagatcccacctgtgctgaagttgatatgtaaagttcctcacccagttattctatttgactctaaggctagtttggaaacttcaatcctcttcgggattagggtgtattaaaggctagtttgggaatctccttttcttaagagaaattagtttattttctcttgagaaaataagaatcattcggaaaaatgtagttcccaaactagccttaaacgtggaaattagttcatttctctttaaatccccttcaatcctggaatggatttgagtttttaaactggtgtagtttggagactcaaatccccttcgggatcttcgggattgaaggggatttgaagagaaataaactaatttccccctcctctggctagtttagaaactctaatcccctccgggattagaggggattgagggagaaattagtttacttctcttcaaatcgctttcaatcccaaaaggaatttgagttttcaaactagccctaaaagggatattaatgctggtttcgtcacattcacggtcaacaaaacttaaatcatttgt

SEQ ID NO: 3123 - DNA, 1294 bp, Zea Mays
atatgtccttattgtaggcgtgcacacccgtgttctgcctctcgacgcctgtctgcccgcgccccccgcttgtgatgcccatctcgtctccccgctgtggcagccgccttcgcgtccgccgcgagatccctccgcgcacgggcgcgtcccccacaaaccgcgctccgtgaaatccgcactcccctcgccgcctccccagcccgcagcctctcctcaacctccctccccaaggagctggcggcggcgcgactgcgtcgggagaggacgcagaggacgccgcgcgggggctgcggcaggagctcgactccgagcaggcctccccggagatggcagccagatccggctattgagccccctaaccgagcggatccaagttgctctacacagcaagtctatgaggaaggagcaaaagaagttgctctttcagttgtcagcggaattaatttaactcaagcatacttgcctatggcaaacaagcagtggacttacacaatgatcgaaatgacagagtatactgttcgtgctatcggtttggaaagaacatgtggaaagctaatctcggatcttgcttccttcagacccaaaggaccttgaacagcaaaatctaaggtttcaacattgcagacacacaagagtccagcatgcgccaacgctcctgcagttgatgcttcttccagtagtttgtgacagattgctcaaagaaaagcaagacagctcgccaatcctagaagtggaaaaaaacaacatagaataattagccagctacagggagtaaaccattaagagaagaaacatcgtaatgccatgtttccaaatgggcacaaagaaacttcaagcacctctagacggaagctgtctgcactgaagatcaggacacgaatatcgcgagctttatcaaggctcgccttgtgcggaaggtgtatttctgtgagatctccaagatgaagcattagggggtcaatcgccccagattttacatgtagctaacttagtagggcacccataatccataatttattctctgtagttgtagcagcgacctagaggtgttattctgtagcacattgtgtaacatgtaggagagagataaacacatatccccattctttctactgaaacaccagaaatagttgctcttgctccataattcattaatgtgaacttctgaagccatgccaaggtcttatattgatcctctgttgtcatattgataaaaatagggtatgtaaaaccttttctcataacagtttaacacatattttatatataagttatcgtaatattacatgtttcc

SEQ ID NO: 3124 - DNA, 2006 bp, Zea Mays
atatgtccttattgtaggcgtgcacacccgtgttctgcctctcgacgcctgtctgcccgcgccccccgcttgtgatgcccatctcgtctccccgctgtggcagccgccttcgcgtccgccgcgagatccctccgcgcacgggcgcgtcccccacaaaccgcgctccgtgaaatccgcactcccctcgccgcctccccagcccgcagcctctcctcaacctccctccccaaggagctggcggcggcgcgactgcgtcgggagaggacgcagaggacgccgcgcgggggctgcggcaggagctcgactccgagcaggcctccccggagatggcagccagatccggctattgagccccctaaccgagcggatccaagatagttttttttgtctccagttgctctacacagcaagtctatgaggaaggagcaaaagaagttgctctttcagttgtcagcggaattaatttaactcaagcatacttgcctatggcaaacaagcagtggacttacacaatgatcgaaatgacagagtatactgttcgtgctatcggtttggaaagaacatgtggaaagctaatctcggatcttgcttccttcaggtacagacaacccttgtttttataggagttgtcagagaattgttttcgtgattaaacatgtgtgtttgtttagtggctggtattgttatcatatacccttgtttttagttctatacatattccttaagcatgagcaaattgggggcatttttagtgaagcaattactggtatgtacatgcaattactggtatgtacatggttaatcaaataatttgcatcatggatgttgttttagtgattaatcactcagaaccgatttcctgatgaactggatacactgtttagtgccagctattatttaagcacaagaagtagtcatatacccttgtttttatgtctgtacataccacctggaaatttacacatggggccattttttagtgaagcaattactaaacctgtatagttctggtggctgctataatttttcctgattaatcagagaattgttttagtgattaaccatgtgtgtttagtggctggtattgttgtcatataccttgtttttaggtctgtacatactacctgagcatgaccacatcagccttatgtttgaacaatttcacacatttacatttgtgaatgtgttgaccgtaagcatcatctttatttaaatcagaaacttggttttacaatgatgtctcattgaagttcttgcttttccttgtttgcaaatctgaaatacccttgtatgttctggcggaaagaagacccaaaggaccttgaacagcaaaatctaaggtttcaacattgcagacacacaagagtccagcatgcgccaacgctcctgcagtttgtgacagattgctcaaagaaaagcaagacagctcgccaatcctagaagtggaaaaaaacaacatagaataattagccagctacagggagtaaaccattaagagaagaaacatcgtaatgccatgtttccaaatgggcacaaagaaacttcaagcacctctagacggaagctgtctgcactgaagatcaggacacgaatatcgcgagctttatcaaggctcgccttgtgcggaaggtgtatttctgtgagatctccaagatgaagcattagggggtcaatcgccccagattttacatgtagctaacttagtagggcacccataatccataatttattctctgtagttgtagcagcgacctagaggtgttattctgtagcacattgtgtaacatgtaggagagagataaacacatatccccattctttctactgaaacaccagaaatagttgctcttgctccataattcattaatgtgaacttctgaagccatgccaaggtcttatattgatcctctgttgtcatattgataaaaatagggtatgtaaaaccttttctcataacagtttaacacatattttatatataagttatcgtaatattacatgtttcc

SEQ ID NO: 3125 - DNA, 2089 bp, Zea Mays
accctcataccacactcaaactcgcatcctgtggagtttttacatagaagtcgtcacttattgcgccgtggtggatgggcaggggctcgtgtcgaacactcgaacagaaccaccgccattctagaggcatccagtattccagcccaatcctatctttgtattcctctccctcgtctcggaagtctggttcgccgaacagtcccgaacccccgattcactgccgctgccccgtctcgtcctcttcgccagcgaaaaccctagtctaggggacgggagcgcaatccacgcacggcaacatggacgccatccgcaagcagctcgaccagctcatgggggccaaccgcaacggcgatgtacgggaggtcagccgcaagtactatgatcgcgacgtctgccgcctctacctcgccggcctctgcccccacgacctcttccagcttaccaagatggacatgggcccgtgcccgaagctgcactcgctgcaactgcgcaaagaatatgaagaagccaaagccaaaggtactgataactatgaccgtgaattggaagaaaccattgaaagactaattgttgagtgtgaaaggaagattcagagagcccttaagcggttggaggaagaggatgctaaggcagctattgctatttctgttactgaggttacacagactaaagaagtaatggagttatccaaacaaattaggcagaagatgaaggatattgatgcttttgatcttgagggtaacaccgaggggaaaattcgggccactgaagaacttgacaagctaaaagaacaaagggcagaagagcaggcaaagatgttacttgaagctttcaacaaagaccgtgcttctttaataaactctcttcaaaatgccactcaaacaactacacctgtcccccctgctgctccggatgcacggacacaagaaatgataaacgagaaactgaaaaaggcagaagaactaggtgagaatgggatggttgatgaagcccaaaaattgttggatgaggcggaagctctgaagaagctggccacccgaccacaggctgttccagactctacaaaaatgagcgctcatgtccagataactgaccaaaagctgcgcctgtgtgacatatgtggagcattcttgagcgtatatgacagtgaccgtcgcttggcagatcattttggagggaaacttcatatgggttatatgcttatacgtgagagattgtctgaactgcaggaagagaagaacaaaaaacggaagctagaccgagctgagtatgacagaaggtccagggaaaggagcggggaacgtgccagggattcgagcagggatcgctacatagaccgcagcagcagccgtgacagggagtatgaccgcagaagaagccatgatcgctaccatgacagggaaagagagagagattccaggcagtctcgtagttatgattccagaagccaccgcaggtcatattcaccaaggggaagttctagggattatgatcgatctgggtatgtttacttatacttcagttagcatgtattaatggaactccaaagagctgctttgttatctcttgctattgtggtaacactgattgttgtctttaaacaatgatagaatgttgcaaggcgtcatgaacgccgtgatcggtactaggagcaaggaagcctccttgaaatttagggtactagattgcgttgcctcagggctagtttggccacctcatttttccaaggattgacaaccttatttttttaagggatttctattttcctaagaaaaattagttcattttcccctgggagggaataccttggggaaatggaggtgccaaactagcctaagtgttgttcgggaattctaagagggggcttaggtccaactggagaaaggcatcagctctttgcattataactaagggataggatctgacgtaatctatgcgtatcatattgttgtgttagctggtgttcatcgtgtaaacacaatgtggtggcgacgtgtcatgctttaatacgcttatatgcatttgaattaagttaatctgcccttgccatgtgtcttttattctggtaataagtttgtactcgtacgaa

SEQ ID NO: 3126 - DNA, 1223 bp, Zea Mays
gccacggccagtcaaccaccgcgagctccatctccatggacgcctgctctctcgtccactgccatctgccacggccactgcagctcccgctccttgcgcctccaactcccagccggcaccggccccgcgtcgccagcgccttggtctgctgctgctgccccgccgccgcggcagaccaccaccaggaacggccctgggagtggtacgaccgcgccatccagtcccacgcggggtccgacctggcgcgctccctaggacttctcgccgacatgcaagcgtccggggggcgccctagcggcagcgcgtacgcgcgcctcatccgcgcgctgtcccgcgcagggcgcgcgctggaggccgaggcgctcctcctcgagatgcgccgcctcggcccgcgcccggaagccgcgcactacaacgcgctccttgagggcctgctcgccgccgcgcacctccgcctcgccgacctcctcctcctccagatggccgacgacggcgtcgcgaggaaccggcgcacctacacgctcttgctaggcgcgtacgcgcgcgccggccggctcgaggactcgtggtgggtgctcggtgagatgaggcgctggggcattcgcctcgacaccgccgggtatagcatgctcgtgcggctgtaccgggacaatggcatgtggaagaaggccaccgacctcgtcatggagatgcaggaggttggggtggaactggatgttaagatctacagcggcctgatcgatacgttcggcaagtatggacagctagcggacgcacgcaggatgtttgataaaatgcgcgccgaaggcgtcaggccagacatatcgacttggaatgctttgattcaatggcattgtcgggttgggaacatgaaacgcgctctgcggttcttcacatccatgcaggaggaagggatgtacccggacccaaagatatttgttatgatcatcagccggttgggggaacaagggaagtgggatgagattaagaagttgtttgatggcatgaacaatcgaggtttcaaggagagtggcgcagtgtacgcaatattggttgacatttacgggcagtatggccattttcgtgatgcacaggactgtatagctgctcttagagctgagaatacacagcttttgcctcgtgtattttgtgtcattgcaaacgcttatgctcaacagtactgtacttggaccaggatttttttacgatatagtgcatttgag

SEQ ID NO: 3127 - DNA, 2188 bp, Zea Mays
gccacacgcacggctccatccttctgtccacgctcgcgccgccagggcgctcgagctcgccgtcgtcatctcgtcgggccgccgcctcgcagcttcgcccgcggctctggtccgcgccccgccaaggcccagccccaagctgccagcggcctccggcgttgctcgccgctcactgcgcgccgtctcgcgctctcgcgccctcgcccagtcctgctctcccttcgtcgctccgcggctccgccggcgtctgggcatccggccttcgggctttggtggcgccccccaccggccaccggcccaccccagcgggcagcggccactgcaactctgcggctctgccaggaacaaggaggaacagtggcgattctgccagggacagggaggagcagtggcagacaacgtccttccttttgtttggcccggggcttcggaattatctggagccgctactgcccccagcgttcggactcccgggtcgcaggcagccacgtctcgtcctggctctgggctcgccgcgctatcgtctcggccattcgctccgacgtccgtattcaatagatttgccctactcgtgaccacgagaatccggcgaggagggagaccgctcgtgcggagtctataatggctgacgggcagcatattcaggcagcatcagaggaagtggattcaatccacttcagcttctatagtgatgatgaaattaagaggatcagcattaaaaagatcaccaagtcggagcgccttgatgccaaaaaccttcctgtgccaggtggattactggaccctgcaatgggacctatcaatgatattgatatctgcaagagttgtggtcagcattctgttcgttgccctggtcacttcggtcatattgagttggcaaaaccattgttcaatcctttgctgtttatgagtctgaaaaaccttctccatgtcacgtgtttccattgtcacaagttccgcctgaacaaggaacaggttgacagatatgtgaatgaacttgaacttttagtaaagggtgatattgtctgtgctaaaaatttggaagactcagtagaagaagcatatctttccaaggaagatgaaaacatgaacaagaccacttcagataatgaaaaagagacagaagaagtgtgcaaaatgtgacatgaagagcccaacaatctcaagtcctatatttggttggctggtcaaggacacaaaggcttctgctgtaagaacaaatgcaattgctgattttaaactcaagggagatggtgatattcacaactcaggggaaacaggggtttctggtcttgaggaagagtcatcttcacctggaatggtgtctaaagactcaatcaatgaagttagaggtctttctgatgatacaattaaagaattggtagcatcatcaggaaaaaaacatctattgcctacagaggttgaatctattctcaaggacttgtggaaaaatgaagctaggttctgcatgttactttgtgatttccagaagaatatgtcaagtgaaccagaaaagagaaggggctatgaaatgttcttcttgagtagtctccttgtggcaccaaatagattccgcccatcaactagctctagtcttggaattatggaacatcctcaaagtgttctgctaagtaaagtgcaagaatccaatcttgcgctacaacataacaatgcatcttctaaccatatggatgttcttcaaagatggatggatctacaacggagtgtaaatgtgctatatgatagtagcaaaggccttgcaagaagcgagaagaatgctcatggtatacgccagctattggaaaagaaagaaggaattcttcgacaaaagatgatggggaagagggttaattatgcatgccgatctgttatatctccagatccgtacttggctgttaatgaaattggcattcctcctgtttttgcgacacgattgacatatcctgaggtagtgctttatgcattgttcaacatcctgtatgattcaatttggcacaactttgtttacgtttgtgttctgacttgctttgccctctgcgatagggatgacaatgggatgggtaaggcgggggggtggggtagtaaaaatctgccctacacccaccctcaatgtgactcgcgggtgcaatgtcgcacccatgggtgtgttaacaagaagctaatctatatctatacttctatactataa

SEQ ID NO: 3128 - DNA, 2495 bp, Zea Mays
acctgatcgtttttttttctgtgtccagggctccagcgcgctctcctcgtccctgttcttccctagccgccgcaggctgcagagcccccggcgagctgccgcccctgccacatatactcagcctccgtccctcgccggtcccaataccctgtcgtccccagacgaagccgacgagcgtgaccctcgcttgcctgaatctgacgcctccgggctcgggctatagttcaatcggtgccggcggggcaagaggaatggcgtggcggatgatgcgaaggaaggattttcacacgggccttgtgactttggcgttccgaaaggatcttgggttcaaaaagtttttctccagtggaaaaatcggaaatctgtcccaggtctacggcagtgataagcccaaatactctgctaattgcatgccctctaaccatttcactatcaggtgtttatttgttagcatggagtcagaaaagggaggatgttgtaggtctgaaagctcccaaaaaggagaagcgagtgaagaaagaaaatagaacacaacctcctgtagaagcaccatatgttgcaccaaaaacgaagatatctatcaaacctgtaccagataaaactgttgagatttttgacgggatgactttgcttgacctttctaaacgaactggaacttggcgttaatagcagaagaatgcacactggtgaaggcaagaatgagccacgccctgctgttgtgacggtaatgggacatgttgaccatggtaaaacatcacttttggatgctctccgtcaaacatctgttgctgccaaggaagctggtggtatcactcagcatataggtgccttcgttgttgagatgtcgtcaggagcatctataacattccttgatactccaggacatgctgcatttagtgccatgcgggctaggggcgctgctgttacggatattgtagtccttgtggttgcagcagatgatggtattatgcctcagacactagaagctatgtctcatgcaaaagcagcaaatgttcctattgtagttgcaataaacaaatgtgacaaatctggagctgatcctgagagggtcagaattcaacttggttcagaaggtttacttttggaggatatgggtggggatgtgcaggttgttgaaatctctgcagttacaaaaactggtttggataaattggaagaggctttgctccttcaagctgagatgatggacctgaaagccagaatagatggccctgctcaggcttttgtggtggaggcaagggtggacaggggcaggggtccactcgcaacagctatagtcaagtatggcacattagttagtgggcaacacattgttgtgggagcagagtggggaagaattaggtctcttagagacacagcagggaatataacgcagtctgcaaaacctgcaatgcctattgaaattgaggggttaaagggccttccaatggctggggatgacgttgtagttgttgactcagaggagagggcaagaatgctaagtcatgggcggaagaagaagcaggagaaagacaggcttcgaaaaattgatgaggggatggcagaggagctagaaattaaagaagagactcctgaaagagttgaaatgaccattattgtcaaagccgatgtacaaggcagtgttcaagctgtcacagatgctttaagaagtcttaatagcgcacaggtgttcgtgaatgttgttcatgtaggtgttggcccaatcagtcagcatgacattgatctggcacaagcgtgtggagcatatatagttggtttcaacattcgcagtccacctagtcctatcactcaagcagcagcaagagccaacataaaggttttgcttcacaaggtcatctatcaccttcttgaggagatgggaaaggccattgtggagaaggcaccgggaactgctgaaacccaggtttcaggagaggctgaggttctgaacatatttgagctgaaagggcgcagcaagtcaaaaggaccggatgtcaaaattgctggctgccgtataactgatggccacttcagcaaatccggaaccatgagactgttgaggagcggagatgttgtctttgagggtccatgcgagtctctgaagcgggagaagaaggacgcagaaacagtcgaaaagggtaacgactgtgggctggtgattcaggattgcgatgatttccaggtaggggatatcatacagtgcgtggagcaggtgattaggaagcccaagttcatctcgacgcagagtggttcggttcggattgaatgctgaaatgtagtaatggttgtggctgacactactgttccatttccctattaattcagctagttgtgctttactgaccaaaggtttcgagtgtaacaagattttgttggctagcaacttgttgcaactgcaaccaaacccctttctgatatgagataattaggacaaaacaacagagttaagttgcttttttttggggtcatgttaaacaatgtatgcagtattgctc

SEQ ID NO: 3129 - DNA, 2513 bp, Zea Mays
ctgaacctgatcgtttttttttctgtgtccagggctccagcgcgctctcctcgtccctgttcttccctagccgccgcaggctgcagagcccccggcgagctgccgcccctgccacatatactcagcctccgtccctcgccggtcccaataccctgtcgtccccagacgaagccgacgagcgtgaccctcgcttgcctgaatctgacgcctccgggctcgggctatagttcaatcggtgccggcggggcaagaggaatggcgtggcggatgatgcgaaggaaggattttcacacgggccttgtgactttggcgttccgaaaggatcttgggttcaaaaagtttttctccagtggaaaaatcggaaatctgtcccaggtctacggcagtgataagcccaaatactctgctaattgcatgccctctaaccatttcactatcaggaattttaatgcaggtgtttatttgttagcatggagtcagaaaagggaggatgttgtaggtctgaaagctcccaaaaaggagaagcgagtgaagaaagaaaatagaacacaacctcctgtagaagcaccatatgttgcaccaaaaacgaagatatctatcaaacctgtaccagataaaactgttgagatttttgacgggatgactttgcttgacctttctaaacgaactggaacttggcgttaatagcagaagaatgcacactggtgaaggcaagaatgagccacgccctgctgttgtgacggtaatgggacatgttgaccatggtaaaacatcacttttggatgctctccgtcaaacatctgttgctgccaaggaagctggtggtatcactcagcatataggtgccttcgttgttgagatgtcgtcaggagcatctataacattccttgatactccaggacatgctgcatttagtgccatgcgggctaggggcgctgctgttacggatattgtagtccttgtggttgcagcagatgatggtattatgcctcagacactagaagctatgtctcatgcaaaagcagcaaatgttcctattgtagttgcaataaacaaatgtgacaaatctggagctgatcctgagagggtcagaattcaacttggttcagaaggtttacttttggaggatatgggtggggatgtgcaggttgttgaaatctctgcagttacaaaaactggtttggataaattggaagaggctttgctccttcaagctgagatgatggacctgaaagccagaatagatggccctgctcaggcttttgtggtggaggcaagggtggacaggggcaggggtccactcgcaacagctatagtcaagtatggcacattagttagtgggcaacacattgttgtgggagcagagtggggaagaattaggtctcttagagacacagcagggaatataacgcagtctgcaaaacctgcaatgcctattgaaattgaggggttaaagggccttccaatggctggggatgacgttgtagttgttgactcagaggagagggcaagaatgctaagtcatgggcggaagaagaagcaggagaaagacaggcttcgaaaaattgatgaggggatggcagaggagctagaaattaaagaagagactcctgaaagagttgaaatgaccattattgtcaaagccgatgtacaaggcagtgttcaagctgtcacagatgctttaagaagtcttaatagcgcacaggtgttcgtgaatgttgttcatgtaggtgttggcccaatcagtcagcatgacattgatctggcacaagcgtgtggagcatatatagttggtttcaacattcgcagtccacctagtcctatcactcaagcagcagcaagagccaacataaaggttttgcttcacaaggtcatctatcaccttcttgaggagatgggaaaggccattgtggagaaggcaccgggaactgctgaaacccaggtttcaggagaggctgaggttctgaacatatttgagctgaaagggcgcagcaagtcaaaaggaccggatgtcaaaattgctggctgccgtataactgatggccacttcagcaaatccggaaccatgagactgttgaggagcggagatgttgtctttgagggtccatgcgagtctctgaagcgggagaagaaggacgcagaaacagtcgaaaagggtaacgactgtgggctggtgattcaggattgcgatgatttccaggtaggggatatcatacagtgcgtggagcaggtgattaggaagcccaagttcatctcgacgcagagtggttcggttcggattgaatgctgaaatgtagtaatggttgtggctgacactactgttccatttccctattaattcagctagttgtgctttactgaccaaaggtttcgagtgtaacaagattttgttggctagcaacttgttgcaactgcaaccaaacccctttctgatatgagataattaggacaaaacaacagagttaagttgcttttttttggggtcatgttaaacaatgtatgcagtattgctc

SEQ ID NO: 3130 - DNA, 1965 bp, Zea Mays
ctgaaaccggcggcggcgtccctaacacttaacatcagtgacacatctacgaactacacgacctccatggcgctgccgctggacaggacctttaatgtcgtagccgactgcgaacggtttgaggagtacattggtgagctgcgagaggcagtgagggaccctaccgaaccgccgccattagcggcgactcatccgaacctctaccggctccggcagaccacgagacgggagcccaggcagtggctccaccttcggatggtggccaggaacgccgagatcattgtgtggatccgcacggacaacctctacgtcgtcggcttcgagcaggtgcgaggggcacggtacgagttcggtgttgaccccgccaatgacgccaaagagaagaacaagaagaagaaggataaagagaagaaagccaagaagaagaacaagaaagaggaccaggagcaacaggaacggcggccactgatatcgggcgcaacgttcctcgggtttaatggcggctacggcgatctccgtcagctgcagacgggtccggacccggaaaggcggacggtaccggacctcggacgggagccgctggtggaagccatccaaggcttggccgcgtacacgccggcggcgccagggttggtccgggactggcttcgaaccatcgtcgtcaccgtcagcgagtccctcaggctacacaacgtttgccggcatatcgcccggctcctcctcggtgagtacacgagagggtggctggaccaaagcctagtcgactgcatccgtgactggggcgacgtctcggcgtgtgtgcttgctagcgccgcccaccccgaaggcgacgctcatgggcggtacagtcagctgagtcacatctgcgagaacaccgatcaggcttgtgaggtggtggccatcctcaacgctggcgctgtccccgacgagccaggcccgagccgccgtcccaagcgtgaggccgcggtcggtgacggagacgacgacggctccgtcccgccgctggggctgaccttcgtcgaggtcttctcggcggtcgtcgagggcggcggcggcacggggaggaacaggagcctgctgtacgggcacatcgccatcgacgacgggctcagctcgggctcttcccagctgctcttcatgcgtggccgctccaacgcgctgccggcgagtcttgacggccaggtccagctcaccggcccggccagggcggtgtggggctacggcgaggtcgtcatgcacgtcgacctcatggacgccgccatcccacacgtcgccgacatgacgcccgacgacgacgatgccgaggaggtcggctcggggaagctggtgtggaacacgtacgacacgccgcggatggtgtacgacgaggccgaggagtacgtgttcgagggggtgtcgggcgccgtcaacgttcgctgcgccgtggtcaccaacgccgtcgtggccaccgtggcgctcaggcgcaccggctccggcggcgggcagagagtcgacgtctacggcaccgtctccgccgccacggccatgttcgccccacaggataaggtcacgctcttcagcagggagtggaaggacgccgtctccgtgggggccggcgaggacgtcccgctgctgaggaaggtcgccgtcgtgcagctcggttcgcctctcacgatatgcgccgatctgtggaccagggctcacgtcgccgacatgtcggttgatgatcggatctcatccggcgatgtggctgtgtttcaccccagcccctttggggtggtccggaagatgatcggcggcggcgacgtcgaggtgtccgtcacctggtcactcaactagctaggtccctactgcttttaaatgtctggataataaatcgggatgtcatgaccggtatttcctttttcatcttgttgcttgcttgtctgttcatctatgtaataataaattaataattgatccatccatattactcctaaattaagc

SEQ ID NO: 3131 - DNA, 2136 bp, Zea Mays
gcatttgataccgtctgctataatatcaggaaatcatttgaatcgatcacatgaagacatcaccattcaatttattgtggaaaagcgaatgtttggtgtgaggaagttatgggatgttaaagacaatcaagcttgggtgcatgacagatttgaggagatgaacttgcatgatgatttctatgaagaccagcggatgtcaagaggtcgtggtggtcgaggtaaagcaagaggtggtggccgtggtttttccagaggtggaaagcagcgtaattaccatgaagatagcaacaacacccaaaatcgcaccccaaaggtagtgagagggcgaggacctcgacgttatgaagctgctgcaaggaacaacagagaggttgttggatcccaacgaaaacaagcagctagatttcgagaatctgctccaaatgctgtagcagccagagattccgggcaagtttcacatgcacagccagaggctgcccctcccaaaaggaatgtcatgagttcaagcctaaattctgcgtccccacctttttatccctccagtgcatctactcaagattttccggtagcagctcaaacgagggacatacaagcaggaggttctaataagatccctccatcttccatgaagatggatgataactcaaagctacaatctggttcaatggttagagggagaatagccatggattatggtgggcgtgataagttacttgctgatggtcctattaggtcatcccaaggaagggcaccaacggcgtcactgaattcaggattcacatcatcatctgttaatcctggccaatcccctattgcgagggcttcagggggcaattcaaacatcggaatatcttcaaataatcagccacaaagtcatggatcagtgatgcaccaaaagttagggcaagtgcagaatcagtctgcaacaagaatcccaactcagcaattgagtcatcggactagtaatttgtcaccagtggctcagcatctacctggtaaatcaggagaaagtggcgagaatggttcataccctactctgaatgattcaaagacagcttctgcggtggtaaaagtcaatagccaggaaactgggatgagttcatttatgtatggtggcacccaggttattggggctgcgggcctttcccagggcgatcaaaattttcctggcactccagctctgctgccagtgatgcaatttgggagtcagcatcctggtggtcttggagttcctactgttggtatggccctccctggctatgtagctcaacagcagatgggaatgggaaacaacgaaatgacatggttgccattattggctggtgcagcaggtgcttttggaggatcatatccaccctatatagcccttgatccgagcttttactctagatcttcaggacagacatcatcatcagttccatccagggaacctagtactaatagagggtcaaaatatcctcaaaatgatattgggaatgaggagcttgatgagcgccagaacaagcctagaagatactcagagatgaacttcagccagtgaagcatcttgtaaggtgaactgcatctgaataagctggttatggtcttatgcctgttcgtggagtgttatctgatgggtcacttcacagcagagcagggggtggaattcgttacttgaattatagtattgctcggttgtgctgcgtctggaaatgtcaaatttgttgctgcgtctgaagacgtggacggttgctgaagagagcttgaaaataatggtttgcgttggttgataaagtttaagagttttttttttaaagtacatcctgttagtgactccagttggtggcagtgtactctgatgtatcgggtccgcatatagtggctgctaagaccaagcggcttcattgccgaagcttgtatattttggaatccgttgagtgcggtttgtgacaattttcagcttgcatgagcgtgtccaacatggattttttttttgaaaagccaacaagaggaatccgcccgtctttttatccccgggtgatagaaatttctatttcatggtgaaaagctacgattgtcatattctgtaattgtggaatgaaccgcatgccatcttactgaagctagaaatgagtagttttaactataaaaccttcg

SEQ ID NO: 3132 - DNA, 2156 bp, Zea Mays
atgacctcatcgggagtcgacacgcagccggaagcacagcaggcgcactacctagagtcacactccccagcaacacagtgccactccactccaaggaagtgcttgcctcccgctctctacctctcctaccaatttcagctcagctctgttctgctcccgcagcaccagtacagaacaccccagaggcagcgagtcctgttcggtgtccggctggaaggccatgggggctagggctacctcccctccgccatggaggcgtcactgcctctgccgcgccctccacttcctcgttctcttgctctggggtacttccgaggcaaacaaagaacaggccatgttgcctccaagagggtggaactcgtatgattctttttcatggattgtagacgaaaatgcatacctgcaaaatgcacagatcatgacagagaagttactcccacatggatatcagtatgcagttattgatttcctctggtaccggaaatatgttgacggtgcatacacagattcctatggatttgacaacattgatgaatggggtcgaccttttccggaccttcaaagatttccatcgtctagagttgatagagggttcagtcaaattgccagtaaggttcatggaatgggcttgaaatttggcatccatttgatgaaagggataagtgtgcaggctgttaatgctgacacgcctatcttggacataaagacgggaaaaccatatctagaggatggccgtcagtggacagcacgagacataggtctcagtcacagaacttgtgcgtggatgactcatggatttatgagtgttaatacaaatattggagctggaagggccttcttaagatctctttatcgacaatatgctgattggggtgttgattttgtaaaggtcgattgtatcttcggcacagattatagcccagaagaaatcatcactatttcagaggaactgcagttactccagcattagctgagaatattagtgatcatgttaacatgtataggataactggagatgattgggacaactggaaggatgtgagctcgcattttggtgtatcaaggtgtaaatcagggccctcacaggaaatgtaaccttactcttgatgaacagaaagcacagatggcactttggtcaatgactaaatcacctctcatgtatggaggagatttgaggaatcttgacgatagtacattaaacataattaccaattctggtttgttgaagataaaccactatagtagaaataacatggagttccattatgtgcacagtgaaaggacatcaaatggagaacattctggtcactttaggtctccttatcctgttcgtgttaccaagaatgatggcatatttgtcagtctcactgcttgcagcgacgatgcagctaaaggatggtatatgtttccacaagatgggaaaccagatcatatatgcaggaactatgaaatactgaatgataaaaatgtctcattttgcctcggaaaaacaaaacgttttcttgcatcggatgtccttaccatggacaccaaggaacaccaatcaaagtttcatatttcagttacaaacactgatgatacttgtttggatgcatctgctggtcgaaggcagactgcctcagagatcaggcttcctatgttctctgcatgcaggtggcatgcaaaacagatgtgggagttaaatgcgaatggaaatcttgtgagcagctattcaaggtaccagtggaggtcgggcatggattgcaactggaagtgaaggagaaatctatctcgcattcttcaatctcgactccatgagcaggaagatgaccgttcaaatatcagaccttggaaaggttctcggaagaaaccttttggagaaaaacccatgtagctacactgaagtttggagcgggaagaatttcggcccggtgaaggaagagatttcagcggtggttcattcgcatggctccatggtgttcgaaatcatatgttgagattgcagtactgggcaagttgttcgagaagtttgcagtgataatttagttgtaagctccattcctgttgatccttttttacccttagtccggagatggaagagatacgttgatgaaccattaactagatgtctgctggatttgacttcaatgaataacaaaacaaacaaacaaacaaac

SEQ ID NO: 3133 - DNA, 2231 bp, Zea Mays
atgacctcatcgggagtcgacacgcagccggaagcacagcaggcgcactacctagagtcacactccccagcaacacagtgccactccactccaaggaagtgcttgcctcccgctctctacctctcctaccaatttcagctcagctctgttctgctcccgcagcaccagtacagaacaccccagaggcagcgagtcctgttcggtgtccggctggaaggccatgggggctagggctacctcccctccgccatggaggcgtcactgcctctgccgcgccctccacttcctcgttctcttgctctggggtacttccgaggcaaacaaagaacaggccatgttgcctccaagagggtggaactcgtatgattctttttcatggattgtagacgaaaatgcatacctgcaaaatgcacagatcatgacagagaagttactcccacatggatatcagtatgcagttattgatttcctctggtaccggaaatatgttgacggtgcatacacagattcctatggatttgacaacattgatgaatggggtcgaccttttccggaccttcaaagatttccatcgtctagagttgatagagggttcagtcaaattgccagtaaggttcatggaatgggcttgaaatttggcatccatttgatgaaagggataagtgtgcaggctgttaatgctgacacgcctatcttggacataaagacgggaaaaccatatctagaggatggccgtcagtggacagcacgagacataggtctcagtcacagaacttgtgcgtggatgactcatggatttatgagtgttaatacaaatattggagctggaagggccttcttaagatctctttatcgacaatatgctgattggggtgttgattttgtaaaggtcgattgtatcttcggcacagattatagcccagaagaaatcatcactatttcagaggataactggagatgattgggacaactggaaggatgtgagctcgcattttggtgtatcaagttccttcgctactgctaagaagattggggccactgggttgcgaggaagatcttggccagacttagacatgcttccatttggatggcttactgatccaagtgtaaatcagggccctcacaggaaatgtaaccttactcttgatgaacagaaagcacagatggcactttggtcaatgactaaatcacctctcatgtatggaggagatttgaggaatcttgacgatagtacattaaacataattaccaattctggtttgttgaagataaaccactatagtagaaataacatggagttccattatgtgcacagtgaaaggacatcaaatggagaacattctggtcactttaggtctccttatcctgttcgtgttaccaagaatgatggcatatttgtcagtctcactgcttgcagcgacgatgcagctaaaggatggtatatgtttccacaagatgggaaaccagatcatatatgcaggaactatgaaatactgaatgataaaaatgtctcattttgcctcggaaaaacaaaacgttttcttgcatcggatgtccttaccatggacaccaaggaacaccaatcaaagtttcatatttcagttacaaacactgatgatacttgtttggatgcatctgctggtcgaaggcagactgcctcagagatcaggcttcctatgttctctgcatgcaggtggcatgcaaaacagatgtgggagttaaatgcgaatggaaatcttgtgagcagctattcaaggttatgtgccacagtggaatcaagggacgaaggaggtaccagtggaggtcgggcatggattgcaactggaagtgaaggagaaatctatctcgcattcttcaatctcgactccatgagcaggaagatgaccgttcaaatatcagaccttggaaaggttctcggaagaaaccttttggagaaaaacccatgtagctacactgaagtttggagcgggaagaatttcggcccggtgaaggaagagatttcagcggtggttcattcgcatggctccatggtgttcgaaatcatatgttgagattgcagtactgggcaagttgttcgagaagtttgcagtgataatttagttgtaagctccattcctgttgatccttttttacccttagtccggagatggaagagatacgttgatgaaccattaactagatgtctgctggatttgacttcaatgaataacaaaacaaacaaacaaacaaac

SEQ ID NO: 3134 - DNA, 2295 bp, Zea Mays
gttcctaatctggcatgagtatatgatccctactccctagtctgtatgaacaggaaatgtttgttggagagggcagggaaaacatctaggtcataggtttccgaacgggttggctttgatggagcaatagaacaagtgggctgaaagcttgaagtaatgaacggctcgagttgtgcagctttgccccgcatttttttttgaaaagtgcagcgttcctccgtttcgcttctcccgctcccttccgcaacggcgtactccctccgccgcccgccgaccgccgactcccgccgcaaaatcctgcgtcagaagcgccgattctcggacgtcctccggatctgagacaccgagcgcactacgagctgtagctgtagtgacctaaaaatgagtgagggggatgctactcagcttgcccttgagaaaggattaccgcaagtgtctaatgatgatggttcgagtagtcctgcaactatgcacaagttgaaagttgacacagaagatgctggaagcaaaattgaatcacccactccagagaagcttgaatctagaagcaaaggggttgttgtgagttcgttggcaaggaatttacttgcagagaggtacaaagatagatttgcaaatcagttcctggaagatgagggtgacatagatgatgaagactataatgacagtatttcgccaggcacaaggatttactgaatctttttaatagaatggagagttctataaggttgctacgcttacggaagaggatggctacatttaataatattgccacccaggtggaaatactcgcaaaaaggaagttatcgtactgtcatttggcccaaatgaagtatttgtttccagaagcaatccagattaagagggtacttctacatgacgagaaaagcctatgcatgtatgctgatatggaaatcatacttgtaatggatgttgtggaatacacaagtactgatcactctccatccatgacaatttgcgatgctttttactcgaagcttttgacatttttggatgctcatcataagggtacagacattccagaggcaatcttaccagaaccctttaacttgaggtcaaggggccagttaaatcttgaggcatcacataatggacatgctgctgagccacatctgcaaggcaccactaaggatggattctcaaatgcttcccacttcccacaatcttttcgaaagctaatgtcccagaaagtcattactgatggagctgaaaggactcaattgctacttgatccaacaaaactgagctctgtgagtgcttatgatacagaaggaacaaacagaagccctaaaaagcaagacaaacatgcttcagttacagtgaactctgaaatttctgctactccaagccgtcatttgatctctcgttgtcaagagggtacgccaaaacaagagaccttagaatcaccactgttggctcaaacaccagcaactcagacacccaaaaggcaattgcccactccacttgagaaacttgaggccacatgtggacacatttctgaaccacgttcagctagttctgcccgcagatcactaaatacatctttaaaatttgaagggggaagcccttcttatcatgatagaatggaacatgtggctacatctaaaattggaattctctcggaagattcatctagtttcaacaagtcattagaggagaatggtcctgtcttctttactgatagagacaaaatcaatctggcagacccagtgggtgtccaggaaaagatggcttcgttacgttccacatttggcatcgtctgcgatatttctcattctatcaagaattcgctaattacaaaacaggagcttttccataatattcttgccaacaacttggagatagaacagatgggagagatagaagagcagctacatattttagaggatctggctcccaattggatatctaagaaggtgataaatggagaagaaatactttacagctttgaaactatagcagatcagaattcagtgtgggaaaggcttgtagaagctgtgtgaggtgtggaatagctgggattggtttaaagctaaagaatcagccgcatagtactatgtatgtaacgctaacggaacccatcaaacagccacattttctcatcatggaatcctcaggattgctcgtcttattcaattttaattttttcttctgttgcattgctaatgtgctaattacatgcttaatactgaaatttctacaagacataaatttgcctgggtctaattctgcttaatatttcacagcactgacatgctctgtgagctttccttg

SEQ ID NO: 3135 - DNA, 1053 bp, Zea Mays
tcatggggctcccgtagcgtcgactgcttcgagaagctcgagcagatcggcgagggcacttacgggcaagtgtacatggcgaaggagacgggcaccaacgagatcgtcgcgctcaagaagatccgcatggacaacgagcgggaagggttcctaatcaccgccatacgcgagatcaagatcctgaagaagcttcaccaccagaacgttatcaagctcaaggagatcgtcacttccccaggcccagagcgggacgagcaagggaggtcaattgacgacaacaagtacaaggggagcatttacatggttttcgagtatatggatcatgacctcactgggcttgctgatagaccaggaatgcggttcattgtgccacagattaagtgttacatgaagcagctgcttacaggcctacactattgtcacgtcaaccaagtcctgcatcgagacatcaagggatctaacctcttgatagataacgagggtaacttaaagcttgctgattttggccttgcaagatcattctccagcgatcacaatggaaaccttaccaaccgtgtgatcactttgtgttgttatcgcaaggttcttattgtcttcctggattgtagttgcagacctccagagttgctacttggaagcacaaagtataatctagccgttgacatgtggtcagtgggctgtatttttgcagaactgctcaatgggaagccaatattgcctggaaagaatgagccagagcagctgactaagatcttcgagctttgtggtacccctgacgacacaatctggcctggtgtcacaaaaatgccatggtacaacaacttcaagcctcaccggccattaaagatacgagttaaagacttctttaaacattttgatcggcatgcactggatctgttagagaagatgttgactttagatccatcacaaaggatatcagcaaaagatgcacttgatgcagaatatttctggacttcacgagcgatgagcgcggccgtgaacaccatgaggatacgggcccccagatggcgtcggctgtgcaggcggccatga

SEQ ID NO: 3136 - DNA, 1931 bp, Zea Mays
caacgcccaacaggacagggagaaaagctcgcaggagtgacctccctctgtgtctctccgctcggcgctcggaccaccgcggaacggcggaaccctccgatagaatcatagaaccaaaccctcctcctcgcaccgcgccgctgcagctgaccaccctacttgaccggccggggagagagatagagataaagacatagacaaacagacggcgggcaggcatgggcggcgtcacgtccaccatcgccgcgcgcttcgccttcttcccgcccacgccgccgtcctacaccgtcgtggtcgccgacgctgcgacaggccgcctcgccatcccggagatctcacgggccctctcgcgccgccggaggcgggacggcgccggcgctgggggctcctcctcggcctcctccgtcgcggccgccgagaacgaggagggcgcggaggtggtgcgcctccggacccgccgcgggaacgagatcgtgggggtgtacgtgcgccacgcgcgggcctccgccacgctgctctactcccacggcaacgccgccgacctcggccagatgtacggcctcttcgtcgagctcagccgccgcctccgcgtcaacctcttcgggtatgattattctggttatgggagatctacagggaagcccactgagtgtaatacatatgcagacattgaagcagcatataactgcctcaaggaaaaatatagtgtcgcagatgaggatataatcttatacggccagtctgttggaagtggtccaaccattgatcttgcttcacgattgccagacttgcgagctgtggttttgcatagtcctattttatctggagtaagagtactatatccagtcaaacggacgttttggttcgacatttacaagaacatcgataaaattggtttggtaaattgtccggtgcttgtcatccatggtacatcagatgatgtcgttgactgctcccacggtaaacagctatgggaacattgcaaagtaaaatattctccactgtggttaaatggtggtgggcactgcaacctcgagctatatccagattacattaagcacttgaagcagtttgtgtcaagcgttagcaaaaaaacatcaaagccggaccagaaagagataatggcaaaggatggcactaccagtaaagaaagagaggaagcatactcggagaaacctcagccggcagctaagtgctcacagtcacagatctcacgtaagagcatagatagccgagttgggaaatccaaaacagtggatgttcctgataaatcacggatgagctcagatgacatcgacaagttccggaggagaaggtgcttggtttggtgatgcctatgttgtgcacagattgtcgaacagtacctgagtgaggatactatagcatggaaatcaagcaactttattacatacatcatgctgcgaggaatggcatcagccgttcctgcagtggagaggaaagaactgttaaataagaaaaggaaccagaaagctaccatcatcatccatcagagacaaagccacttgactgaaagctggtagtttcccagttaatttaacactgacactgacaccgtcgacatgttttgcagcaccggttagggtttccccatcatctaaaagtgtacaattattgtatgtaatcacgagggacctatacaaacatttacagccgctctgtgcaaagtctgaaagcctaggagcaccatagtttatcctcggtgcatcagcatcgggcccacatgcgttgtggaaccatttggctatgtgagctctgcatactgatctactccagccttattatacggatcgtgctccacttatcaactgtgacacggcagcaagcggatcatgctccacatatcaattggaaactgttgggtgaaaggaaccggaccgcgaagcctgaaaacaaatgacaggcaatctggc

SEQ ID NO: 3137 - DNA, 2123 bp, Zea Mays
gtttaaatcacatccccatcactccacaccccgtcaatggcgttctccgccgcctcgtcggcggcggccgcggcagcgtaccccagaactacgcttccactgcggcggcggccgggcctcttggccctcctcctccttctcctttgcttcctctccttccaggtcgtgatccatgtgccctccgccagatcagcggtgtcgctgtggctcttctcgggtcaccgagccgaacgcgggactcgcgagaactgccctggctgcagcaagttacaggatgtggataaagctgaaaagactatcgcgtacactgaccagcatggtcggatcaagctattcaaagttaccgccagagaattcggttcgtcctctatctgggagaacccgtggttgcccagagatagccagccggtagccagaacacaagaggttgccggggatcatctactcgccagtggatcagaaaccaccaatctttcaagtgctgaaactctggcaactacaattgtcgatccgattaaattacggcgacaggtatttcgccgtagaagaaaggagcggagggttcaggagctgcttcagatggataagaagattgaacttcagatgcggaatgcagcaataaatagctcaaggaactttaacaataaagttagaggaagctacaacatatggaggcaggagttccgccttgttaatacagactcaacactaaggctcatgaaagatcagataataatggccaagttgtatgccactattgcactctcccagaaagaaccagacatgtacgcgttgctcatgaagcgcataaaagaaagccaaacatctatcggagatgcacttatcgacagtgaactcgattctagtgccttagagagagcaaaagcaatggggcatgtgttatcttcggctagagatgttctgtacagctcggccatgaagatgtggttcattactcatcctcctcaactggcaactgttcatgtggagaacatagacaatttcaaatggcttaattcctcatactgttctgttcttcggcaactggagtcagctcgcctcaaagaatattacttcaaagcacacgatccgtcgtcactctctgatggaaatgagaatctgaaatacaggaaccccaaatatttgtccatgctcaaccatttgaggttctacatgccagagattcacccaaagcttgagaagatactgtttcttgatgatgatgttgttgtacagaaggatttaacacccctttgggatgttgatcttaaagggatggtaaatggcgctgtggaaacctgtaaagagagtttccatcgctttgacacttatctcaacttctcacacccaaagatctcagagaacttcgatccacacgcttgtgggtgggctttcgggatgaacatgtttgacctgaaggagtggaagaagcgaaatatcactggaatataccattattggcaagatttgaatgaggaccgtaagctgtggaagctgggtacgctgcctccaggtttaattactttctacaacctgacatacccgttgaatcgtacttggcatgtcttgggcctgggctatgatccagctgttgacattgctgagatcgacaacgctgcggtagttcattacaacgggaattataagccctggcttgaccttgccatttccaagtacaagccattctggtccaagtatgtagatgttgacaactcgcacgttcggcgttgctatgagggcaaacaatgacatgtaaatcttcatcaagttttcttttttcatttcagagcataagttattccctatgaggatgttaggcagagtagtggtgtgtttagcatagtttaagtcttcttgatcttgtcattattgctccgtagttatctagctattcttaaatgaactggtgcataaggtggtttatacctgacaacaaagtagatattcttttgtttactttagaatttgctgtaccttgaatgaattggcaaaaagatagagaagttcatctgcttacgacctgtggtatgaacactgtgtagttataatggagtattgaatattgatgcttaagatgttgaaagaaatggaagcaaaacaaaggtctcaatcatagaactgtg

SEQ ID NO: 3138 - DNA, 2402 bp, Zea Mays
ccccgtcaatggcgttctccgccgcctcgtcggcggcggccgcggcagcgtaccccagaactacgcttccactgcggcggcggccgggcctcttggccctcctcctccttctcctttgcttcctctccttccaggtcgtgatccatgtgccctccgccagatcagcggtgtcgctgtggctcttctcgggtcaccgagccgaacgcgggactcgcgagaactgccctggctgcagcaagttacaggatgtggataaagctgaaaagactatcgcgtacactgaccagcatggtcggatcaagctattcaaagttaccgccagagaattcgcaagaggttgccggggatcatctactcgccagtggatcagaaaccaccaatctttcaagtgctgaaactctggcaactacaattgtcgatccgattaaattacggcgacaggtatttcgccgtagaagaaaggagcggagggttcaggagctgcttcagatggataagaagattgaacttcagatgcggaatgcagcaataaatagctcaaggaactttaacaataaagttagaggaagctacaacatatggaggcaggagttccgccttgttaatacagactcaacactaaggctcatgaaagatcagataataatggccaagttgtatgccactattgcactctcccagaaagaaccagacatgtacgcgttgctcatgaagcgcataaaagaaagccaaacatctatcggagatgcacttatcgacagtgaactcgattctagtgccttagagagagcaaaagcaatggggcatgtgttatcttcggctagagatgttctgtacagctcgggtgaggtgtcaagaaaattgcgtgttatgttgcagtcgacagaactaaatatcgacgcagtgaagaaacaaaactcatttctggttcagcatgctgcaaagacagtacccatgcccttgcactgcctacatatgcagctgacaactgattattattttcgtgattatgtgaccaaggaacattttgacgatgatgctttgaaggcgggacaatataaagaaaagcttgaggatttgtcactctaccactatgctatattttctgataatgtgcttgcggcctcggtagttgtcaaatcaactgtggcaaatgccaatgaaccagagaagcacgtgttccacattgtcactgatagacttaattttgcagccatgaagatgtggttcattactcatcctcctcaactggcaactgttcatgtggagaacatagacaatttcaaatggcttaattcctcatactgttctgttcttcggcaactggagtcagctcgcctcaaagaatattacttcaaagcacacgatccgtcgtcactctctgatggaaatgagaatctgaaatacaggaaccccaaatatttgtccatgctcaaccatttgaggttctacatgccagagattcacccaaagcttgagaagatactgtttcttgatgatgatgttgttgtacagaaggatttaacacccctttgggatgttgatcttaaagggatggtaaatggcgctgtggaaacctgtaaagagagtttccatcgctttgacacttatctcaacttctcacacccaaagatctcagagaacttcgatccacacgcttgtgggtgggctttcgggatgaacatgtttgacctgaaggagtggaagaagcgaaatatcactggaatataccattattggcaagatttgaatgaggaccgtaagctgtggaagctgggtacgctgcctccaggtttaattactttctacaacctgacatacccgttgaatcgtacttggcatgtcttgggcctgggctatgatccagctgttgacattgctgagatcgacaacgctgcggtagttcattacaacgggaattataagccctggcttgaccttgccatttccaagtacaagccattctggtccaagtatgtagatgttgacaactcgcacgttcggcgttgctatgagggcaaacaatgacatgtaaatcttcatcaagttttcttttttcatttcagagcataagttattccctatgaggatgttaggcagagtagtggtgtgtttagcatagtttaagtcttcttgatcttgtcattattgctccgtagttatctagctattcttaaatgaactggtgcataaggtggtttatacctgacaacaaagtagatattcttttgtttactttagaatttgctgtaccttgaatgaattggcaaaaagatagagaagttcatctgcttacgacctgtggtatgaacactgtgtagttataatggagtattgaatattgatgcttaagatgttgaaagaaatggaagcaaaacaaaggtctcaatcatagaactgtg

SEQ ID NO: 3139 - DNA, 2427 bp, Zea Mays
cggagacacctgttctcggcaccggtgcacgccggatcttctatcgtcggacctcgagttattaagttgggcgaggagaggtggttcattccagcagggatccttctcgtgagcccagtcgatctgaccgtccttggtatctggggggggttgttctgtactctctctttaatttggacctccaaagtagtgctgggatgtatcgcctttgggattttctgggtgatggccgtcttccccaccgtcccgttcatgcctgttgggcggacggctgggtccctccttggtgctatgctaatggtcctgttccgcgtcatctccccggaggacgcgtacgccgcgattgacctcccgatcatcggcctgctcttcgggacaatggtcgtcagcatcttccttgagagggctgacatgtttaagtacctcgggaacctgctctcgtggaagagcagaggcagcaaggacctgctcttccgagtctgcatcgtgtccgcgtttgccagcgcgcttttcaccaatgacacatgctgtgttgtcctcaccgagttcatcctcaaggttgctaggcaaaacaacctgccaccacagcctttccttctggcccttgccactagttcgaacatcggctctgctgccacgccgatcggcaaccctcagaaccttgtcatagctgtcgagagtgggatctcatttggccagttcttgctgggagttttcccagctatgatcgttggggttctcacaaacgctgctatcctccttttgtacttctggaaatacttgtcggtggagaaggatcaggagggtgggcagcccacaggaccagaggtggttgccgacgatgaggttacttcccatcggttcacaccggctagaatgtcacatgtttcttctctgaatccagatgacatggattgcgtaagcgaaccgatcatcaggagcaacagtgtcagtactactgggaatgagaacctgagaagcagaagcatcaattctgaggctgacattcagcttgcgatcaagtctctgcgggcatcaagcatgtcgcatgagatggtagaggtctcgacggttcctgatcggagagatgaaggtgcatcctcaaggaagttcacaaggactgctagccagcaaaggagcgtgataatagaggatttagcaccctccccagagattaatggggaaaaggagaaagaaactgaagttgcagagaagagatggaaagtacttgtgtggaagactgctgtttatcttatcactctcggtatgctcattgcacttctaatgggactgaacatgtcctggactgcaatcactgcagctcttgttcttctggcactcgattttacggacgcacaagcttgtcttgagaaggtgtcatattcactgctgatctttttctgcgggatgtttatcactgttgatggcttcaacaaaacgggcataccgaacacactatgggagttagtggaaccatattcacgaatcgatagtgcgaaaggtgttgcacttcttgccgtggtgattcttatcctttcaaacgtggcctctaatgttcctacagtcctattgctcggtacaagagtggctgcatcagcggcttcgatttctcatggttcagagaggaaagcctggctcatccttgcatgggtcagcaccgtggctgggaacctcaccctcctaggctctgcggcgaatctgattgtctgcgagcaggccaggcgggcccagttcttcggctacaacctcaccttctggagccacctccgattcggggtcccgtcgaccatcatcgtcacggcgattggtttgctcatcgtcatcagttactgaaacagctgaaggcagaagagcgtagtgtaagagaagcagaatggataaaaatccttccaataagaagtacatgtaaattaggcttgccctataactcaagtgtgtatcggtacgttatgtctccgtctgtgctcttgctcgtgagcaagcagcacatggctgaccgtgtagcttgcatttccattgcataataggcttatgaagaatgctttggtaatatgattttacagtctgacaaggattgtgaagcagaggcagtgtaccatcaagataatacttctggaagcatataaaaaaatttcgtatatttggatttcaaatccagtctgcttcagactggaaattcatattatcttctggaatcgtgctttattgtcagaaacatgggctaaaattggaaagtccgtcatttattgggcttgcaatgggacaaccttttgggtctgttatatatcactataaccagtgacaactttggttcgcaaactcaaaccagtttctaatctttattttatgatttttatataaagttcttaataggtcctcttgctattttcaatctaaattctaaatactaaaaaaagtttctgtgaa

SEQ ID NO: 3140 - DNA, 2478 bp, Zea Mays
  misc_feature (639)..(639): n is a, c, g, or t
ccggcaaggaatcacgcaattagacctgagtaaggtgggattctagtggcccattcaaacctttgcatgtgatgaatccaacccgactgtcttttatccgctccactctctgtagacatttcaggagggatccaaattcatctaagccacttgaaggtctcaaagttattgatgttggatgtggaggtggcattctgtcagagcctcttgctcgaatgggtgctaccggtactgcaattgatgctgttgacaagaatataaagattgcaagtattcatgcggcatctgatccaacaactgcttctattgagtattgttgtgcaacagctgagggactggtaaaagagaaaaggctgtttgatgctgtaatttctcttgaggtgattgagcatgtcgccaatcctttggagttctgtgaatccctctcggctttgacaattcctaatggtgccactgtgatttccacaatcaaccgatcaatgcgagcatatgccactgcaatagttgctgctgaatatatcctcagatggcttcctagaggcacacatgagtggtccaaactggttaccccggaggagcttgtcctaatgctgcaaaaggcttccgtctccgtcgaagagatggcagggttcgtttacnatccgttgagcggagaatggtccctgtcagaaagatatcagtgtgaactacattgcttttggcgtcaagaagggcgaggcatcattgacaaatgacagagaagcaagtttatcatagcgaagaaaaacacgtgaccttgaattgtcgggcatcattttcagaggaccaattcatgtcactgaaatctattgctaagtatgcaaccaagtagcagaagagaattctcttgccctttgttagtcttggaaactggagcttgtggagtgatgcttcctggaagcgccattgagaagtcaagttgacaacaagtgactgctaacaagtagagctatctgccttttttggtgacacaagtgagctcagtaaagccagccaaagttcagacttcagaagaagcgagcgagcaggaggaggacaggaagtatggcgcactaccagcaggggaggcggcagcaagtggacgagtacggcaacccggtccctgggggccacggtgtccagggccagcagctgggtgaagccgccggcgggtacggcgtcgcaggcaccggcagctacggcggccagcagcaggccgggtatggccccacgggcaccggcacgcatgacgccgggggctacgacggctcggaccatccgggttacggggctaccggaacgggcgtcgacgacgccggtggcccaggtgcgtatggagcagccacgggcacgagagcccacggcacgcacggcggcgtgaccgggatccaggacggcgccgccggcctcaccggtggtggtctgcatggcgcaacaggcatggggacgactaccggtactggcgcgcacggtgccaccggaatgctcgacacgggggtcttgggcggcggagggcacgcggccaccggcatgcccgccggccacggcacgcgtcccggcgccacaggcgtagctggaaccggcggcgcgttcccccatgcagctgagcacaagacgggcggcggcatccttcgccgctccggcagcagctccagctccagcagctcgtcatctgaagacgacggcatgggtgggcgccggaagaagggcctgaaggagaagatcaaggagaaaatgccaggaggccacagggaaggccagggccaggcgacggccaccggtgcgtacggcgggacagggtacgtggctgggccgacgaccggaggcccccacgagaagaagggtgtggtggagaagatcaaggagaagatcccaggcggccacaaggactacgaccagcatcagcacaccaccgcggcaaccggtggcggcggtggctatggcggaaccaccgacaccacgtatgggacgacgaccactgaaggcactcacgagaagaagggcttcatggacaaaatcaaggagaaactccccggtcagcactaagcactaagcagctgcctctttcctcttccggctagctgcctctttcctcttccggttggcgactgcctgtaagtacatgtatacagaataaataaagcaataaagaataagcggcagctacgtatgtgtgtgtttttgtgtgtttgcattgtaaggcagctacgtatgtgtgtgtgtttgcattgtaaccacctcagtaatcctgtgcgttcatgatccttctatgtgacttcatgtgacgaagtagaaggaataagaaagtcaaatcttactattatcatggatatgaccagaggttctacatttttggggtgccctgagatcttccgggctatagcagcaacaaagatgaaatacatgggaaaagaatatgaatcatccctgcaaattcgtgtgtaaatgacctgagcaagagctaatatatctcccgctcac

SEQ ID NO: 3141 - DNA, 701 bp, Zea Mays
tgcccatataaccctaactagggttacttaacaagttgctcaggggagatgacgagcccaatggtggccaccccggtccagctccgcagcaccggccgcctcagcttctgctgcttccccagcagcgcatcggggacagcccccagtcggcggcgattcgggcggtgacggtgagggcgtccgcggagacgatggcgacggagaagctgggtatcaaggtggagcgcaacccgccagagtcccgcctctccgagctcggcgtccgccagtggcccacgtgggggtgcgagaagagcaagttcccgtggacctactccgccaaggagacctgctacctgctgcagggaaaggtgaaggtgtaccccgacggtcacggcgaggagttcgtggagatcgccgcgggggaccttgtcgtcttccccaagggcatgagctgcacctgggacgtcgccgaggccgtcgacaagcactacaacttcgaagttaaacagcgtaaaataaagctccggattagcggactacacaattcacaccaacgttctgtcaggcgtttttcctgttatgacaagtggaacctgtacatgttagtatgtgattcatgccctcaaggcctcaaactacctcgctgattcttggctcgatcgctgtccacactgtacctttcatcatgtccttgttaagaccattacctgaattttgac

SEQ ID NO: 3142 - DNA, 1807 bp, Zea Mays
cccggacagacttgtttctcatgctggcggcacgctagtagctggacctcccctcccgggacccgggctcggcatgtccggcgagggaccgttcgaggagagctttgggccaagctggttgagggctgtattgtaccagcaaacggacgggtatcataccaagttgggccggagtcggctcatcgccgatgaaggtgacaactgacaagaggaagaagccaacaagcacttgctgcagtccagctcagtacagtccagtgcgcctgctacaaatcaaagctcctgcactgcagcaccatgctctgatccccatttagagctgatcgtcgcgtcgagcacccggcggcgtctgttcgtccacagctagccaatctctctctccgggggacgagacgatggacatcatcaacggggccgtgctccctcgctgccacgccgcccccgtcacgggcgccgcggcggcctccgtcgccgacgcgagagtgagcggacacctccagcttctccggcgcgtgcgctgcagaggaagcggaagcgccagtgccgggctgctgcatgcgacgacgccccgagccggcgtggcagcgcgcaggttcttctccccaccgctggggaacgggaacgggaatgggaggaccatcggctggcggccggctcgctgcacccacggcggctcctcctccgacggcgacggcgccgccgccgcggacttcgacgcccgtgaggaggagttcgttgactccagcgtcatggaggccgttgagctcaggagcgtgtcagacggcggtttcgtcatcaagatgcgcgacggcaggaacctgagatgcgtccagaacaacccccgggtgctgaggctccgggactccgcgccgcaccacgcgatcgtgctcaagatggaagacggcagcgaccttctgctccccatcatcgtcatggagacgccaagcatcatgcttctggctgcgcttcggaacatccgaattccaaggccaaccatctacaatgtggtgctggagatgactacaaggatgggatatgaggtgcgtttggtgcggatcacagaaatggtccatgacgcatactattctcgactatatctcgcaaaggttgggaatgaccaagacactatcagtttcgacctcaagccatcggatgctatcaacattgctttccgctgcaaggtccctatacaagtgaacaggcgtatcgcgtataacaacggattgaaagtcctacagccaaaggcggccgggagttatttaggctccgacgacattcaaatcacaaggcttgacaggcctgacgaccagcattgcagcgaggcccaagagttcgatctggtccggaacatgctcattgctgccgtagaagaacgctacaaggatgctgctcaatacagagaccaactttccatgttgcggtcaaagaaaaagaacgcgatatagccagatgggtgcaaagcttcaacttgttagagcttgatgggggtgtacagaggaggccttttttgctgaagcacgtgaagcttcggcaaacatctaaggaacaccatgtaaatacgtacgtattacagaatttatgtatagacacacacatacacggagagcctaattctggattctttagctcatagttgcactgttgcagtgattgtactctaaaatgcaaatgactgttgtgtacgccatgtgcagctccaaccaagttgcatcaccgctgtttgtcttcaaatcggcaatcggttttgaagaaaaatagcatcgctgtgcgcgtttattggtccagccagttaaagtttagtccctat

SEQ ID NO: 3143 - DNA, 2240 bp, Zea Mays
ctccgccgtcgcattggcaccccaccggaccaaacccgaatctcatacgctctcttgctcgcttcaatcaatggcgggctagtgccgaagcgaagacgcgagaacctgcgatatttctggctactgccattgacattgtggaaaggctgctggcagaagatgagacagaaacctctcagaagataagtgccgaaccaatgagtgggacaaagtcagcttctataataggcacaaaagtagcccagtgcctggccaaaagaggtgactgcagtagctcactccaaaaggcaggcatttttgactgggttgatgcttcgagtgatgatgaatgcacagccattatgacttccaggaaaaaacaaaggatccaagctaatactcaagcgaagaatttgacctcccagagatatggtggtcgtggatcaattgccactgttggttccatatcagattgtactggcggtaagtcaggcttgaattcttctaaaaagccagaacctgttggttctaccgatgatttatatgatattggtccatatactcagatggcagctgaagccatggaagcactgtccaatgcatcaactgtcaattatgtagtcagggagaatgcacatcctgaaagctcagttcttagaacaaacatgggaaaagaaagcaaagccaataagatatgttttgagttgtcacttcaaaagcgaattggtggaagttcaagctctgtgaaaaagcatcccagcaagttaaaagacaagaagagtcgaaaacagatgacaaggaaagcaaaaggaagcatagacagtaccactatagaaggagatacaaatcatgaggtgtctgaaggagttaagggatctggtgcaagtgattcaaatgttgtaggttctaatgctgtaatgtgccctaaaaggaagaggacctatatgtttatctcaagaagttcaaaagttcaattcaataaagctgggagctcaactacaccaagatccaaaagtaaagaagtagttgatgtatcaacaacaaaaccagttagtgtatctggccctgatttaaaccagcttgccagagtagaaaaacaattcacatctgcacaggaagatcataactccagcttgacaaacagaggaccactgggagagctaaacagtaaatgctcccattttaggacacaagtatcaaagaagccactgaagagaggacttgtgaaatcaccaggttccagagaacttgtcagtctgttaagaaatgaagcatctctagttttgcagacaagcaggcaaagaagaaacatgtccaaagtccatgtcctgttgagccatagcatggataaggaaaccatcaaaatgcaaacaaagatattgatatattttggactacaagtggcggcaactatttcagaagctacacactttgttgccgaaaagtttgcccgtacaaggaacatgcttcaagcaatagctatgggaatacctatagtcacgccatcatggcttgaatgctgtagagaagcaaggtgcttcgttgatgagaaggcatacattatgagagatatgaagaaggaaaaggagctaggttttagcatgcctgtctcacttagcagagcccgcaaaaaaccattgcttcagggtagaagagtattaatcacaccaaacgccaagcctagcaaggagcttctgaagagtttagtagttgcagctcacggtcagccattggagagaatcacagcctctacaatgaagaagaaaatttttgagggggcctttgtactctcttgtgaacaagatcacagtgtttgcatgccattaattgagagtggtctggaagtgtttgactcggagcttctactgaacggtattgtcactcagaagctagagttcgccaggtatcgtctttttccatgaataagccatatgcccatatgagtgcgatctgggtaggtttggttccggcaccatgcatgccagacaaagcactcttgtacatatgcatccttatccttctctagttactctgaccccttgcacactagtgtgtatttattgttcgagcctctggcccttattaccataattatttgcttttgtattggctcttggtacgtaggccatgtgagatttttgtacccttttgttgtatggcagtgaccatgttagcctatattaaagctaagtacctgcatggattggatatatcatataccattctgccaatgagcttattcagagggcttgttcgtttca

SEQ ID NO: 3144 - DNA, 2281 bp, Zea Mays
gtccattctccatggccatcgtcgtcgtcgtcttccacaatccaatcggtgctcaccccgccggccggccggccggagcacctctataaatactagcctagggtaccccggaccggccggccggccggctgcacgcacgcatcctccgcctgccgcacccgccaccgcaagaagagggttcaaaatactcaagatggctccgccggcacggccgccacgtgctggggaggacttggaggagggcacaggcgagagctccccacctcctcggtcgccacgtgcgtccaaccccgactgccacgaggtgcagaggaagatctgcgagcgcctccgccagacggggcggcacgaccgtacgctcgccgaccccaccttcaacgcccgcttcgcccgccacctcgagaggttgccgcggaggtacctactcgacctcgacctggacgacaagctcgaggatgtcttgctgcactgggggattctcgacgagtgcgccgaccccaataagcgacccgtctttcgcgcgcggttcataaagtataagacagttcctagggaggatgacggcattggtcatgatcaagatcacgaggagccgtgtcaaaagttgttggaggacctcagtttggaaagaagaaagatcgcggacagaaatgattccctgtctatctcctctaggggcgatttgaaaactgtcctccttcatgagatcattttctcctccatcgacaagcccaagctcctaagtcgggaagctcatgtgtactccacgaaggatggtttttgtttggatgtttttgttgttgatggctggaagacagaggagactgatgagctgatcgcggcgattaaggagacattaacacaaaaaaatgcatcaccatctaattcaacaaattcttcgacgccggagaaaatagttgacctacaacaacaggttggagattatgaaattgacttaagcatgctaactaggggggacaagatcgcatctggatcatccgcagacttatatcgaggaacttataaaggccatgatgttgctatcaagtgtctcagatctctatatctcaacaatccttcagaagttgagtttctgcaggaagtacttattctaagtggtgttaatcatgaaaatattctgcaattttatggggcatgcacaaaacatccaaactattgcattgtaacagaatacatgcctggagggaatatatatgactttcttcacaagcaaaataacttcttggacctccataaaattctaagatttgctatcgatatctcaaaaggaatggattatctgcaccagaataacattatacacagagatttgaagtctgcaaatcttctgctaggccatgaccaagttgttaagatcgcagactttggtgtggcgcgacatggaagtcagcaggggcagatgactgctgaaactggaacctaccgatggatggcaccagagataattaatcataagccgtatgaccacaaagcggatgtattcagctttgccattgttctttgggagctggcaacttcaatggtcccatatgacaacatgacacccttgcaagctgcattaggagtaagacagggattgcgcttggacattccgggcagcgtgcacccaagattgaccaagctgattcgacagtgctggaacgaagatcctgatgcgcgtctgacttttgcagagattactaaagaactccaagatagtctacaccatatcgaggcacccaagggagccagccgtcgatctagagcaaagatgcagaagaaataagagggcaaggtttcctacttttttttgggtgtgttacactagttgcagtatgagtgtttaaggtgtatgtcgcggttataaatattttaaggccaaggaagtgttaaaaaccgaccttagctcagttggtagagcggaggactgtagtggattgcagatgaaatccttaggtcgctggttcgaatccggcaggtcggagttgtttttaaaataacatttttttgctcaacaatgttaggctactcgcctactcacctgtcgctactctgtactcactacggttaaagtcgtgctctttttcttaacatttttacaaatgtcattttgcacaaaaaaaggaaaaaggggatgcatatgtggtcacattattatttgcataaaagccatgcagatcaatattcaggaacagaaaggccaaacgcctgcgaaagttgttgtgagagaccgttgcttaataaaaggcaaaacagaatgtaactatcccgtgaacaaaaa

SEQ ID NO: 3145 - DNA, 2281 bp, Zea Mays
atggccatcgtcgtcgtcgtcttccacaatccaatcggccggccggctgcacgcacgcatcctccgcctgccgcacccgccaccgcaagaagagggttcaaaatactcaagatggctccgccggcacggccgccacgtgctggggaggacttggaggagggcacaggcgagagctccccacctcctcggtcgccacgtgcgtccaaccccgactgccacgaggtgcagaggaagatctgcgagcgcctccgccagacggggcggcacgaccgtacgctcgccgaccccaccttcaacgcccgcttcgcccgccacctcgagaggttgccgcggaggtacctactcgacctcgacctggacgacaagctcgaggatgtcttgctgcactgggggattctcgacgagtgcgccgaccccaataagcgacccgtctttcgcgcgcggttcataaagtataagacagttcctagggaggatgacggcattggtcatgatcaagatcacgaggagccgtgtcaaaagttgttggaggacctcagtttggaaagaagaaagatcgcggacagaaatgattccctgtctatctcctctaggggcgatttgaaaactgtcctccttcatgagatcattttctcctccatcgacaagcccaagctcctaagtcggctaactgcgttgctctctgaggttggactgaatatccaggaagctcatgtgtactccacgaaggatggtttttgtttggatgtttttgttgttgatggctggaagacagaggagactgatgagctgatcgcggcgattaaggagacattaacacaaaaaaatgcatcaccatctaattcaacaaattcttcgacgccggagaaaatagttgacctacaacaacaggttggagattatgaaattgacttaagcatgctaactaggggggacaagatcgcatctggatcatccgcagacttatatcgaggaacttataaaggccatgatgttgctatcaagtgtctcagatctctatatctcaacaatccttcagaagttgagtttctgcaggaagtacttattctaagtggtgttaatcatgaaaatattctgcaattttatggggcatgcacaaaacatccaaactattgcattgtaacagaatacatgcctggagggaatatatatgactttcttcacaagcaaaataacttcttggacctccataaaattctaagatttgctatcgatatctcaaaaggaatggattatctgcaccagaataacattatacacagagatttgaagtctgcaaatcttctgctaggccatgaccaagttgttaagatcgcagactttggtgtggcgcgacatggaagtcagcaggggcagatgactgctgaaactggaacctaccgatggatggcaccagagataattaatcataagccgtatgaccacaaagcggatgtattcagctttgccattgttctttgggagctggcaacttcaatggtcccatatgacaacatgacacccttgcaagctgcattaggagtaagacaggtacggatttctgtcccagatacttgccaggccaattttctagggattgcgcttggacattccgggcagcgtgcacccaagattgaccaagctgattcgacagtgctggaacgaagatcctgatgcgcgtctgacttttgcagagattactaaagaactccaagatagtctacaccatatcgaggcacccaagggagccagccgtcgatctagagcaaagatgcagaagaaataagagggcaaggtttcctacttttttttgggtgtgttacactagttgcagtatgagtgtttaaggtgtatgtcgcggttataaatattttaaggccaaggaagtgttaaaaaccgaccttagctcagttggtagagcggaggactgtagtggattgcagatgaaatccttaggtcgctggttcgaatccggcaggtcggagttgtttttaaaataacatttttttgctcaacaatgttaggctactcgcctactcacctgtcgctactctgtactcactacggttaaagtcgtgctctttttcttaacatttttacaaatgtcattttgcacaaaaaaaggaaaaaggggatgcatatgtggtcacattattatttgcataaaagccatgcagatcaatattcaggaacagaaaggccaaacgcctgcgaaagttgttgtgagagaccgttgcttaataaaaggcaaaacagaatgtaactatcccgtgaacaaaaa

SEQ ID NO: 3146 - DNA, 2444 bp, Zea Mays
atggccatcgtcgtcgtcgtcttccacaatccaatcggtgctcaccccgccggccggccggccggagcacctctataaatactagcctagggtaccccggaccggccggccggccggctgcacgcacgcatcctccgcctgccgcacccgccaccgcaagaagagggttcaaaatactcaagatggctccgccggcacggccgccacgtgctggggaggacttggaggagggcacaggcgagagctccccacctcctcggtcgccacgtgcgtccaaccccgactgccacgaggtgcagaggaagatctgcgagcgcctccgccagacggggcggcacgaccgtacgctcgccgaccccaccttcaacgcccgcttcgcccgccacctcgagaggttgccgcggaggtacctactcgacctcgacctggacgacaagctcgaggatgtcttgctgcactgggggattctcgacgagtgcgccgaccccaataagcgacccgtctttcgcgcgcggttcataaagtataagacagttcctagggaggatgacggcattggtcatgatcaagatcacgaggagccgtgtcaaaagttgttggaggacctcagtttggaaagaagaaagatcgcggacagaaatgattccctgtctatctcctctaggggcgatttgaaaactgtcctccttcatgagatcattttctcctccatcgacaagcccaagctcctaagtcggctaactgcgttgctctctgaggttggactgaatatccaggaagctcatgtgtactccacgaaggatggtttttgtttggatgtttttgttgttgatggctggaagacagaggagactgatgagctgatcgcggcgattaaggagacattaacacaaaaaaatgcatcaccatctaattcaacaaattcttcgacgccggagaaaatagttgacctacaacaacaggttggagattatgaaattgacttaagcatgctaactaggggggacaagatcgcatctggatcatccgcagacttatatcgaggaacttataaaggccatgatgttgctatcaagtgtctcagatctctatatctcaacaatccttcagaagttgagtttctgcaggaagtacttattctaagtggtgttaatcatgaaaatattctgcaattttatggggcatgcacaaaacatccaaactattgcattgtaacagaatacatgcctggagggaatatatatgactttcttcacaagcaaaataacttcttggacctccataaaattctaagatttgctatcgatatctcaaaaggaatggattatctgcaccagaataacattatacacagagatttgaagtctgcaaatcttctgctaggccatgaccaagttgttaagatcgcagactttggtgtggcgcgacatggaagtcagcaggggcagatgactgctgaaactggaacctaccgatggatggcaccagagcaagtattgattcaagtgttgcatgtgaacttgagtttcctccggacttgtttggtgacaaggaaacccctccaatccccctcaattcccttgtcaccaaaggagctgttcaagagaattcttttcatctccaagataattaatcataagccgtatgaccacaaagcggatgtattcagctttgccattgttctttgggagctggcaacttcaatggtcccatatgacaacatgacacccttgcaagctgcattaggagtaagacagggattgcgcttggacattccgggcagcgtgcacccaagattgaccaagctgattcgacagtgctggaacgaagatcctgatgcgcgtctgacttttgcagagattactaaagaactccaagatagtctacaccatatcgaggcacccaagggagccagccgtcgatctagagcaaagatgcagaagaaataagagggcaaggtttcctacttttttttgggtgtgttacactagttgcagtatgagtgtttaaggtgtatgtcgcggttataaatattttaaggccaaggaagtgttaaaaaccgaccttagctcagttggtagagcggaggactgtagtggattgcagatgaaatccttaggtcgctggttcgaatccggcaggtcggagttgtttttaaaataacatttttttgctcaacaatgttaggctactcgcctactcacctgtcgctactctgtactcactacggttaaagtcgtgctctttttcttaacatttttacaaatgtcattttgcacaaaaaaaggaaaaaggggatgcatatgtggtcacattattatttgcataaaagccatgcagatcaatattcaggaacagaaaggccaaacgcctgcgaaagttgttgtgagagaccgttgcttaataaaaggcaaaacagaatgtaactatcccgtgaacaaaaa

SEQ ID NO: 3147 - DNA, 2732 bp, Zea Mays
atggaaattttggagcattggtttgtattttcttggatacatcaaaaacacaattgggcatggaagcttagaggaaagcgaatgagtggacacatccacaagagcttcaggttaactggtcaaaattgtaagttgggcatcgtagcaaacctgttagcatgtaatgcatggatcgatagattgggcaaggatggaagatatagggaggcagaaaagctcttcagagggatggcagacagaggtctagatccaaatgaggtgacctatgctatactgatacattccttgtgcaagaggggtatgatggaagatgcactttgcatgtttgataggatgagggagaagggaatcagaatgactgtttatccatacaactctttaattaatggttactgcaaacacaacaattttcatcaggcaagaggtcttttgaatgagatggttgcgaagggattgacaccaagtccagcatcatattcccctcttatagctggtttatgtaggaaaggggatctggccagtgcaatggagctccacagggagatgaccaggaatgctgtttcagggaatgtatatacatttacagctcttatcagtggtttctgcaaggatggaaatatggatgaagcaactaggttgtttcataaaatgatggagagttccctagtgccaaatgaagtgacttttaatgttatgatagaagggtattgccgtgtaggcaatattaggaaggcattccagttatatgatcagatgctagatagaggcctaacacctgacaattacacttacaggtcactgataagtgtagtttgtttgacgctaggtgccatgaaagctaaggaatttgttgctgatctagaaaacaactgtgctgtgctaaatagttttagccttacagcacttatgcatggattctgcaaagaaggaagcgcagagatcctctgtaaagaaatgttagctggacacttccttcctaatagctatacttataattgctttcttgattatctggcaaatgaaggagagctcgaaaaggctaaagttctacacgcagccatgcttgaaggctgtttagctaacacagtgacatttaacacattgatcaaagggttctgtatggctgggcagatccaaggggcaattgaccttatgcagaagaatactgagagtggtttctttcctgattgcatcagctattctacaataataaatgagctctgtaaggttggtgacaccaataaagcatttgagctttggaatgaaatgttatacaaaggactgaaacctgatattgtggcatacactattttgattcgctggtgcaacattcatggtgaatttgataagggcttaggaatttacagtgatatggttaaaaatggtgtgcgaccaaactgggacacatatagagctcttttcttaggagcttctttgatgaccacaaatggaagaactttactattgaccacctgatgttagggcaatatctgttctcatctactggaataggctgaatcaagacggatgcaagatgcaaaaatcaatctgaccctgaactgttgcttcatatgcaagtggctataagcctaaaacatacgcatgcatatctgcatattggcttttttctatgcttgagaagatggattccagtctgaggtcaatttaaagtatgaatattatacaatcacaaagggtcaggaagaaaagtgatcgaaaacttcatcaaatttatgctgctgaacttgcaaatatagattttgcatatggtggtggctggtgacagtgttgccagagtacccagaggtttacaacatagtaaacaagctgagggtggagtcagtggttgctgttgaaggtgtgatccagccacgcccggtggatgccatcaatgcagatatgaggaccgggactatagaggttgtggcacatcatgttctagtgctgaactcagtaacccggtcactgccgtttccagttacaatttctgatactgtaaaagagaagtttccagaagaaattagattgagttgaatactgtaggtttagaatgttgggacttgtgtcgtccacaaatgcagtcaaatttgcggttgcgccataatgttgttaaactcatacgccgctacttggaggatgaacatgaatttgttgaggttacatgttccaaggtagattgagactcctgttttgtccaagtctacacctgaaggtgctcgggagtcgggactatcttgtaccatcgagagttcaggaggcattgcctatggattggatcggttggtgatgcttttggcgggtgagagctcgatccgagatgtgattgctttccccaagaccacgactgctcagtgtgcactcaccgaagcaccatcagctgtagaaccacagcaactgaaggatctcgccttccccaaacctacttcgtgagacgctgttcatgtgttcatgacaaaaattccgtgctctcaaggacagctatagtttgcttcttctagtttttgagtgtattggcctattctatttttgcatagtatagaatgcacagtttttggaccgtgaatccgtgataaatttgtagaagatgcttaacatgccaaagttctggaagagtattgttttaatagcggtgcttatgtgtttgtgcttgtgcacaaacttacctggcatattattcaacagaatccattttccaaggctagctagctgagtcgctagctactccttttccg

SEQ ID NO: 3148 - DNA, 2052 bp, Zea Mays
cgtacagccaggccagagcgagtcgtcgttgccacgttcttggagctcccccaacagcaagacaggctgcgagtaaaaagaaccccatcgctggggtggtccatgtcaacacattcttgaaaagagaccaatgcaagcagactcgatctgctattcttcgtcttctcgtgtcctcggctccatgctgttctagcctggtcgattggctctcgcactggttagttctgatgcggcgcgtgtgatttttggtgctacctgtttcctgattgtgatccaaggagttgtacgaacgacagaacagaatggcaactctggtccagcctcctgccggcgccgtcgttggcagcgtagcaaacacgttgacgaccccgggctctgcctctggccctcctccctcttcctcgtcgccgaccagcgcctccacaccgccgccaactgacgtgccgtcttcttccactcctactccgccaccaccttccccggcttctcccactccgccgctgccttccccctcgacaccaccggctgcttctgcaccacctcctccttcaccagatgacagtgcccctccgccgcctgaggcatcgtctccacccccaccggccgcattgcctcccccaccggcaccagccgcattaccgcccccgccaccggcgccggtgcccacggccacaccgccgcctccgcccccaccggacattgccacgcagccgccttcctcttcacaggcgtcgccgcctccctccgctcccccaccgcggcagtcccacgccacgccgcccccgtctcctccgccaaccgcgtctcccgtgtctgccacgccgccgccgcctccagttcactcccccccgtggggcggcgcgtcggccaactacagcgcgacgtcggcggcgtcggcgtccggcgacctgagcgtgggcaacaccaaggcgttcgcgttcgacgagctgtacggcatcaccggcgggttcgcgcgcgagaacgtgctcggcgagggcgggttcgggtgcgtgttcaaaggcacgctcggcgacgggaaggtggtggccgtgaagcagctcaagggcggcggcgggcagggcgagcgcgagttccaggcagaggtggagatcatcagccgcgtccaccaccgccacctcgtgtcgctcgtcggctactgcatcgccgaggaccaccgcctcctcgtctacgactacgtatccaacaacacgctgcaccaccacctccatgggaggggaaggccggtgatggactggccgacgagggtcaagatcgcggcgggctcggcgcgaggactggcctacctccatgaggattgtcatccaaggatcattcacagggatatcaagtcgtcaaacatcttgcttgatgaccagtttgaggctcaggtagctgatttcgggctcgccaggttagcggagaacgatgtcacacatatttcaactcgtgtgatgggcacattcgggtacctggctccagagtatgcgtccacggggaagctgaccgagaaatcagacgtcttctccttcggcgtcgtgctcctggagctcatcaccgggcggaagcctgtggattcgtcgcgcccgctaggcgatgagagccttgtggagtggtcaagaccactactgaaccgggcaatcgagactcaggagttcgacgaactagtcgacgtccggctcgaagggaacttcgacgacgtcgagatgttccgggtgatcgaggcgactgcggcgtgcatacggcactcggctgccaggaggcccaagatgggacagatcgtcagggtcctcgacgacagcctgacggacgttgatctcagcaacggcgtgcagccagggaagagccagatgttcaacgtagccaacacagcggacatccgccagttccaaaggatggcgtttggcagccaggacttcagctcggattacagccagtccagaccaagcataggcagcagcaggagggatttctagccttcaaatctgtaaagcttctcctcgactcgatctccaccccagcagtttccgggggtttttgtttttttggtcactg

SEQ ID NO: 3149 - DNA, 1504 bp, Zea Mays
tcagctcgtctgctatcgcgagggtcacagtgctggtctttacaatcttgggaatacatgctatatgaattccacattgcaatgtttgcattcagttccagagctgaagtcagcgctgctaagctattcagatactgtaaaaggtaatggcattgaccaagcttctcataatttgactcttgctactcgtaacacctttggtgatcttgatcaaagcgttcgccctgttacacctttacaattcttacagacactgcgtaaaaaatacccgcaatttgcgcagcaacataataatgtctacatgcaacaggatgcagaagaatgctggacacagttggtgtatacactttctcaaactcttacctcagattcaagtgaatctgcagttcttccaatgaagcaactatttgggatagatctcgtgagcagggttcactgtgcagaaagtggtgaggagagcatggagacagaattagtttattcccttaagtgtcatatatctcaagatgtgaaccatcttcatgagggaattaagcatggcttgaagacagaacttgagaaagcttcacctacactgggtcgaactgcagtttatactagagaatcaagaataaatgagctgcctaggtacttgactgtgcagttcgttcgtttcttttggaaaagggaatcaaaccaaaaggcgaagattttacgaaaagttgattacccactggaactggatgtttacgaattttgctctgatgaactgaaaaagaaactcaaagctcctcggcagatgctgagagatgcagaaaatgcaaagcttggattgtacatgggaaagctagcagctcaaaagaaaatgaggagtcatcaagtagcgctggggaatcgtctagtatggacattgacaaagctgagtcttctctaccaaagaaacaattaactggcgtctatgatttggttgctgtcttgacacacaagggaagaagtgcagactctggccactatgttggctgggttaagcaagatgatggaaaatggatcgagtttgatgatgacaatccgaacattcgcaaggatgaagacattttgaaactttctggtggaggtgattggcacatggcttatatctgcttgtacaaagcccgcatggcagaatcaaagagttaggtcgaattggttctacatttctgtattgcgaatgcaacactagtttttgtgcccatgagcgagcgtggtaattatttttccagttcgtaaagtggttactggtgaatttgcttcaattatgttcgccattattcacccggatatgtatctttaggatttctagtacattttgtgttgtcaaaatataggacaaaaaattcaggggaaagcttttgccttcagtggatctgatttatttggtttcatccgtgtcttcctaataagaatgttttcaaaaaaaaaaagtagcctaaattgagtggaaagcttttgccttcagtggatctgatttatttggtttcatccgtgt

SEQ ID NO: 3150 - DNA, 1829 bp, Zea Mays
cgagccgtttcgagttctgctgagcattttttttccagccctgtgctgcccccttcctccccccaagtaaacctcgtttccacacgtcttgcacccccgccatgccgaccgtaaacgtgaaatggcagaaggaggtctttccaggcatagagattgacactagccagcctccgattgttttgaagagtcagctatacacactaactggtgtgccacctgaacgccaaaaaattatggtgaagggtggattattgaaggatgatgcagattggtctactttgggagtgaaagatggccaaaagttaatgatgataggcacagctgatgagattgttaaagctccagagaaaggtccgctgtttgttgaggatctaccagaagaagagcaagtggttgcactgggtcacagtgctggtctttacaatcttgggaatacatgctatatgaattccacattgcaatgtttgcattcagttccagagctgaagtcagcgctgctaagctattcagatactgtaaaaggtaatggcattgaccaagcttctcataatttgactcttgctactcgtaacacctttggtgatcttgatcaaagcgttcgccctgttacacctttacaattcttacagacactgcgtaaaaaatacccgcaatttgcgcagcaacataataatgtctacatgcaacaggatgcagaagaatgctggacacagttggtgtatacactttctcaaactcttacctcagattcaagggttcactgtgcagaaagtggtgaggagagcatggagacagaattagtttattcccttaagtgtcatatatctcaagatgtgaaccatcttcatgagggaattaagcatggcttgaagacagaacttgagaaagcttcacctacactgggtcgaactgcagtttatactagagaatcaagaataaatgagctgcctaggtacttgactgtgcagttcgttcgtttcttttggaaaagggaatcaaaccaaaaggcgaagattttacgaaaagttgattacccactggaactggatgtttacgaattttgctctgatgaactgaaaaagaaactcaaagctcctcggcagatgctgagagatgcagaaaatgcaaagcttggattgtacatgggaaagctagcagctcaaaagaaaatgaggagtcatcaagtagcgctggggaatcgtctagtatggacattgacaaagctgagtcttctctaccaaagaaacaattaactggcgtctatgatttggttgctgtcttgacacacaagggaagaagtgcagactctggccactatgttggctgggttaagcaagatgatggaaaatggatcgagtttgatgatgacaatccgaacattcgcaaggatgaagacattttgaaactttctggtggaggtgattggcacatggcttatatctgcttgtacaaagcccgcatggcagaatcaaagagttaggtcgaattggttctacatttctgtattgcgaatgcaacactagtttttgtgcccatgagcgagcgtggtaattatttttccagttcgtaaagtggttactggtgaatttgcttcaattatgttcgccattattcacccggatatgtatctttaggatttctagtacattttgtgttgtcaaaatataggacaaaaaattcaggggaaagcttttgccttcagtggatctgatttatttggtttcatccgtgtcttcctaataagaatgttttcaaaaaaaaaaagtagcctaaattgagtggaaagcttttgccttcagtggatctgatttatttggtttcatccgtgt

SEQ ID NO: 3151 - DNA, 783 bp, Zea Mays
aaaacgtggcgggcttcaccgggcccgggccgggctgccggtttggccatctctacccacatctgctgcagactcgaggcgatcgaagcgtcattggcggcggctgcggcaatggcggggctgtcgctactgtgcggtgactgcggcgcgcagctgcgtagtgtggaggaggcgcaggcgcacgccgaggccaccaaccacgccaacttcgtcgagtccaccgaggccgtcctcaacttcgtctgctccgactgcggcaagccatgccgctcccagaccgaggtggacctgcacaccaagcgcacgggccatacggagttcgcggacaagaccgcggaggcagccaaacccatcgatctcgaggcgccgcttaagccggcctccgaggatgtcatggacgtagacacgtcggcttcggcgagtggggagccacaagagatggttgtcccggaggtgaacaaggagatgctcacggaccttgagggcatgggtttctcgacagcgcgcgccaccagggtgcttcacttctccggtaatagcaccattgaaggtgctattaactggctttctgagcaccaagaggacatagatattgatgagatgcctctggtaccagccaactcaaaaacggaggataacaagcccagcctgactcctgaggaaatgaagattaaagcacaggagctaagggatcgtgctcgtaaaaagaaagaggaagaagagagaagaatggaaagagaaagggagaaggcgcgcgcttgatgtgcgcaggggagcagagcg

SEQ ID NO: 3152 - DNA, 1009 bp, Zea Mays
aaaacgtggcgggcttcaccgggcccgggccgggctgccggtttggccatctctacccacatctgctgcagactcgaggcgatcgaagcgtcattggcggcggctgcggcaatggcggggctgtcgctactgtgcggtgactgcggcgcgcagctgcgtagtgtggaggaggcgcaggcgcacgccgaggccaccaaccacgccaacttcgtcgagtccaccgaggccgtcctcaacttcgtctgctccgactgcggcaagccatgccgctcccagaccgaggtggacctgcacaccaagcgcacgggccatacggagttcgcggacaagaccgcggaggcagccaaacccatcgatctcgaggcgccgcttaagccggcctccgaggatgtcatggacgtagacacgtcggcttcggcgagtggggagccacaagagatggttgtcccggaggtgaacaaggagatgctcacggaccttgagggcatgggtttctcgacagcgcgcgccaccagggtgcttcacttctccggtaccagccaactcaaaaacggaggataacaagcccagcctgactcctgaggaaatgaagattaaagcacaggagctaagggatcgtgctcgtaaaaagaaagaggaagaagagagaagaatggaaagagaaagggagaaggaaagaatacgaattggaaaagaacttctggaagccaaaagaattgaggagcaaaatgaaaggaaacgcatgatagaactgcgaaaacttgagaaagaggaggagaaaagagctagagaaaaaatccgccagaagttagaagaagataaggctgaaaggagaaggaaactaggactgccaccagaagacccagcagctgccaaaccaagtgcaccgcttcctgttgaagagaagaagagtgcattgcctgtccggccagctacaaaggctgagaggatgagggattgcctaagaaatcttaagcaacagaacaaggtagcggagaactcatgcttg

SEQ ID NO: 3153 - DNA, 3694 bp, Zea Mays
acagaaaaactacacagagtgaaatttcggaagcacgcagacccggtcggatccaccggcccgcggaacggatcgaggccaccggcatcctccgcttgcgtcgcattgcggcgccgagctcgaaacccctggatcggttgcagctttcccactgcccccgcccgataacgcggcggtagggtggtggcctgtcgatctcgcggcgggagccggctaactacctgccgttttgtggatttgtgtgcgtgcttgattttggtgcgtgtggtggcgtggagtcgccggcgggggggggggggagctagggttttggtttgggctttcgggatgacgcgccgggtgcggcggcggacgtgcagggaacgggagggtagggtggtgcggggcgcgtggtgtgttgtttcggcgaggccggaaggcgaggacgatgcggcagcggtggaggtggactggagggcgctgccggacgacacggtgctgcagcttttcgcgcggctgaactaccgcgaccgcgccagcatggcctcagcgtgccgggcttggcgagcgctgggctcgtcatcctgcctgtggagcacgctcgacctccgtgcacaccgctacgaccgggaggtggcgtcatcgcttgcctcgcggtgcgggagccttcgtcggttacgcctgcgcggccacgaggcagcagaggccgtcccggccctctgcgcgcatggtctccgcgaggtggtggccgatggctgccgcggcctcacggatgccacgctcgctgtcctcgccgcgcggcatgaggacctccagagcctccagatcgggcccgatcctctcgagcgcatatccagtgacgccctccgccacgtcgctctttgttgctcccaactccgccgcctgcgcctctcgggtctccgtgaagctgacgcggatgccgtcggagcgctcgcccgctgctgccccctcctcgaggacgtggctttcctcgattgcggcaccgtggatgagaccgctcttgctggtatccactctctccgcttcctctctgtagcaggatgccggaacctgaaatgggctactgcatccacctcctggactcagctttcctcccttattgcccttgacgtctcccgcacggatgtttcaccaagtgctgtttcacggctcatttcccatgccaaaaccctcaagcttatatgcacgctgaactgtatttctgttgaggaggaacagcttcataatcctgctgtttttagtaactctaagggcaaggtcgtgctaacgattaacagtgacatctttagatcttttgagaccatgtttccaattgtggatgctaaagagcacggggttttccatcagtgtaactggagtcacaaagacaagatagctggtgatataacaacatggctcgagtggatcctgtcacagtcacttctccgaattgcagagtccaacccacaaggcatggatggtttttggctgcagaagggcaccacactgctgcttagactattgaagagtttgcaggaggatgtgcaggagcgggcagccactgcacttgctacgtttgtagttatggatgacgagactgcaaatgtggatcctgcaaggtcggaggcggtgatgcagaatgggggcatccgaatgttgctggaccttgcaaggtgctcaagggagagcgcacagtctgaagcagcaaaagctattgccaacttgtcagtgaataccaaggttgccaaggcagttgcagatgaaggcggcattacaatactcactgatttagccaagtcgatgaataggcttgttgctgaagaggctgctggtggcctttggaatctctctgtaggcgaggaccacaaggcgtctattgcagtatctggtggtatcaaggccctggtagatctaatatttcgttggcctgctggaaccgatggagttcttgaacgtgctgctggtgcgcttgcaaacctggctgccgacgacaagtgtagcttggaagttgcaaaggctggtggtgtccatgctttggttacacttgctcgatcatgtaaacttgatggcgccctagaacaggctgcaagaggtctagctaacttagctgcacatggggacaacaatgacaacaatgctgctgtaggtcaggaagctggggctctggaggcactagtgcaactaacaggttctcaaaacgagggtgtaagacaagaagctgctggtgctttgtggaacctgtcatttgatgacagaaaccgtgaagccattgctgcagtgggtggcgttgaagctttggttgccctagtgcaacaatgtttgaatgcttcagaaggccttcaggagagagctgctggtgcattatggggattatctgtttcagaagctaataggttgcattgttgatgaagtacactcgagtttgttactctgttgtgtttcatgacaagcttacaatatgttgagtggatgccataaccagttcaatccaaaagcttaagctatcaggagaagcattgcaattgggcagggtggtggggttgcacctttgctcacattggcacgctcagaggttgaagatgttcatgagacagctgcaggggcactatggaatcttgctttttattctggtaatgctctccgcatagtcgaagaaggtggggtgcctgttcttgtaaaaatttgctcatcatcagggtccaagatggcacgcttcatgtctgcactagcactagcatatatgtttgatggaagaatggatgaagttgctttggttggagcatcctcagctagcagttccaagagtgttaatattgaaggagctagaagaatagcatttaagcatatagagacctttgtgctcactttctcagatccacaaatgttctctacggctgctgcctcctcagccccggcagcgctgtctcatgttgctgaagcagtgtttatacaggaagctggacacctgagatgcagtcgctctgagattggtagatttgttgtcatgcttcggaatccttcaccaattcttcgtgcttgtgctgcctttgcccttcttcagttcacaatcccaggaggtcggcatgcggtgcaccacgcaggtctcttgcaggaagcaggagcaggtcgagtgttacgcccagcggcggcagcgacaacagcttctattgaagccaaaatctttgccaggattgtcctcaggaacttggaacaccatcagtcagggacgtcaacatgaacacccagcagaggtgcatcctccaacaaacaaaggcttctgcaacgatgggctgcttggccgatgcagaatggactactttggctttcggagcctttttacatcacaacaacagtttttctgtgcagacagtgactgaagggacttcaccgaaggtataacccacaactctgaagtgactgaatgaaacataagtgacggcccttcccgtatcgggcgtttaaggtgaacctgcagttttctagagattattttgtgtataagtaaaaaacttttagcgtcgatgagaattataaactggcatagctaaacttatggatatttattccttgttcgttattgttgaggtgtgtagcggcgtcatgtagaaattgggctattcctcctagtatacatgtaactttataaatgtactgttatgtattttcccccatgattgattctgtgcatttatagatcgaggtgttgttaagcact

SEQ ID NO: 3154 - DNA, 1355 bp, Zea Mays
gcgcacgcagaggagcacagcggcgtcactgctgcggcagtaatggccgcctggttctcccacggcgtctactagcgatacaccgagaccacttttctcttgcttccttcgaccccgccccctccggcctccggatcgcgcaccgcgcctgccctccacccaaaaccgctccggagcctttgcgaagcggcgccgcttactggccggcaaggcgaccccgtctctcggcggcctgcgttgatctggttgctgctgttgaggtgggcagagcggcggccgcgatgggcatctcggcgaggtggctcaagtcattagttgggctgaggaaggtggagcagcagccgcgtaaggagagtgcagatgttggacgaatgaaaagtgatgtcgccgatcagtttcattttcagaatcagcgctctcaagatgacagcagcattgctgcacaagaagaaattccagaggttccttatggaaatgatccacctgaagatgattctaatgcaccttcatgcttggaacccacttatagttcagctgatgtgccactgtttcaaactgaagaggaactgaaagagatctgggctgctacaattattcagacaacattcagagctttcctgggttcaggcccgtgttagagcaaggcgagttcgcatggctttggaaaaccagactgatcagcaaaatacttcaccagagcacacgaccgtggcacgtgtcagagaaattgaggatggctggtgtgatagtattggttctgtggaagatatccaagcaaaacttttaaagaggcaggaagcagcagctaaacgtgagcgagccatggcctatgctctagctcatcaggttcagaagctggtagacacctgacaaagaaaggcacagttaaccgatccctgaaggccacaaaagattcccacatgctggggtcaagacatcatcttgccagttgcattgatccagttcccactagagttgagctggagacttagaaggcatgtgatgcttgaacatcgccatggattgcacttagcatagcaagtagcaacttggatgccattcatgtctgcatggctgcatcgtttgtactggcggcagcggcttctttcaacaccgaatatgcacgtcagcatgtccatacatgctgaggttaccccattgggcctttgagatgtaaattatgtcgttcagtcgagtggtatgcttatcatgtgtttatcggtgtatgatgttggtatagttgtaacttggaaggctaagcgaagttgtactgttgtatttggtattgccgtattgatatatagattgcacatgcgtcttgcagttgaatttctaccattttagacaaaatttgc

SEQ ID NO: 3155 - DNA, 1923 bp, Zea Mays
ctcgtccgtgccgttgccactgttgccacgccacgcaggcggcagcgagcgcaataatgcgcacgcagaggagcacagcggcgtcactgctgcggcagtaatggccgcctggttctcccacggcgtctactagcgatacaccgagaccacttttctcttgcttccttcgaccccgccccctccggcctccggatcgcgcaccgcgcctgccctccacccaaaaccgctccggagcctttgcgaagcggcgccgcttactggccggcaaggcgaccccgtctctcggcggcctgcgttgatctggttgctgctgttgaggtgggcagagcggcggccgcgatgggcatctcggcgaggtggctcaagtcattagttgggctgaggaaggtggagcagcagccgcgtaaggagagtgcagatgttggacgaatgtttcattttcagaatcagcgctctcaagatgacagcagcattgctgcacaagaagaaattccagaggttccttatggaaatgatccacctgaagatgattctaatgcaccttcatgcttggaacccacttatagttcagctgatgtgccactgtttcaaactgaagaggaactgaaagagatctgggctgctacaattattcagacaacattcagagctttcctggctaggagagcccatcgagctttaaaagggttggttaggcttcaagcccttgtaagaggtcacatagtaagaaagcaagctgatacgacactccgttgtatgcaagctttggtcagggttcaggcccgtgttagagcaaggcgagttcgcatggctttggaaaaccagactgatcagcaaaatacttcaccagagcacacgaccgtggcacgtgtcagagaaattgaggatggctggtgtgatagtattggttctgtggaagatatccaagcaaaacttttaaagaggcaggaagcagcagctaaacgtgagcgagccatggcctatgctctagctcatcagtggcaagcaagttcaagacaaattacagcatttgagcctgacaagaacagctggggctggaattggctggagagatggatggctgttcggccatgggagagtcggttccttggcacttacactgcagatgggattttcgtagtcaatgaaaccaagcaacctgacagaagtgcaaccaagaccccctacagaaaacctgttaaaaagcatgattcaacccttcaatcaaacatgttgaaccagaagggcttcccatcaaactcagagggtgttggctcctcggcaaaccgacccagtggtttggtatctactaaatctagactcaaggttttacccagagaaggtcctgaggaagccccatctcgtccttcgccacttgtgcggtccgctagtaatccgaaggagaggacttccggttcagaagctggtagacacctgacaaagaaaggcacagttaaccgatccctgaaggccacaaaagattcccacatgctggggtcaagacatcatcttgccagttgcattgatccagttcccactagagttgagctggagacttagaaggcatgtgatgcttgaacatcgccatggattgcacttagcatagcaagtagcaacttggatgccattcatgtctgcatggctgcatcgtttgtactggcggcagcggcttctttcaacaccgaatatgcacgtcagcatgtccatacatgctgaggttaccccattgggcctttgagatgtaaattatgtcgttcagtcgagtggtatgcttatcatgtgtttatcggtgtatgatgttggtatagttgtaacttggaaggctaagcgaagttgtactgttgtatttggtattgccgtattgatatatagattgcacatgcgtcttgcagttgaatttctaccattttagacaaaatttgc

SEQ ID NO: 3156 - DNA, 2464 bp, Zea Mays
ctcaaatccggctgttctccaaccccacggcggccccggaccgcacccaatgtacgaacacctccccgcgttcccgatcgcgccggccgccgtcggcgactgccgcggcatccccttcgacccttcctttctcccgcgcctcctcctctccgccacctcctgcacctcccccttcctcgccgagcgcgcagtctccgccctccacgcgaccggtctcaagctcggcgcgctcccctcctccctcccggcctcgaacgccctcatctccgcctactcccaagcggacctcctcccctccgccctccgcgtcttctccctcctcagccacccctccaccgcctcctacaccaccgtcctctccgcgctctcccgccacggccgtccccacgaggcgatctccctcttcgccacctccgcgtccgcggtcgcccccgacgccgagctcctctcctgcctcgtctcatgctgccgccgcgcgtccgccttactccccgcgcgcgcggcgcacgcctacgggatcaagaacgtggcggcgctggccttctacgcctcggcaggtccggcgctggtcgccttgtacgcgagccgcgggaaggtcggtgcggctaggagggtgtttggctacatggacggcttggacgtggtgtcctggaacgccatgatcggcgggttcgctagtgccgggatggacgaggagtcgtgggcctgcttccgggagatgcactcgagaggtgttcgagggaatgcccgcacagctgtggtggtgctgggatcttgtgacatggagtccggcaggcaggtccatgggactatagtgagtagtcatggtggttcttcaaacgccattttgtggaacgcgttgatgagcatgtattcgcgtgccggctgtgtcactgatgcagagagggtgttcctggagattgtaaagaaggatgttgtgtcatggaatgtgatgatcggagcgtttgcgaagaatggatatggagaaagggcccttgaatttgtggacatggtgttgcagtgtggtatgaagccagactctgtgacattcacggccgttctcatggcatgctgccattgtggcttggttgatgaagggcttgtactattccagcgctttgtgtcagttgttgggctcgttccaactatggagcagtgtgcttgcattgtggacttgcttgcacgtgctgggaggtttctggaggccttggaatttatcggccagatgtcagtgagaccaaatacagttgtctggggtgctttgctgtctgcaagtaagatgcatcacaacgtggaatttgcaaagattgcatttgaacaactggttcaggtggagcctgagaatgctgggaattttgtgacaatgtcaaacatatatgcaaaggctgggatggtagaagatgcaaagagaaaaggattgcaacagggcaaaccaaatcatgcgattagtgatatgaagagacttgaagtgcctgcatgttttgatgcaaccaggaagctgactgaagataaatatcagcaaatgttaccacaagagatataataaaacttatccagtaacatatactgatctccttattatttcacatgaaatggtggcaaaataaaacgtatccaggatgaggatggagtcaattcaaaactgctgctgttccctgcatgcataactcatctcccagcacccatccggtagaagtactggcggtataaacacatcatgacaaagctttcatgagaagatctttgaccttccgactaaagttgtctatttgaatctgctcacattgagatagttctatttgcagacaacaaaagattgatatggagaaagggctccttgaacttgtagccaatggtttgtgacttataaagacaattatgcatcatggacaaaattttatctagttcttagttttgatcattcctgaatgttcttgtttctaatgagagctatctcactgagtcaccaggtcgtgacttcaaagcaatctctccatatttgcgagggaagacttttttgcctcattctctagacctcactcatgttggagcctccgacattgggtctgtcctgcctcgaatgttcttgtcttagagccttcatagatgaagggtatttattcagtgatacagtagtggggttcattatctacaccactttgatcaataaattaatgttttatattcacatacaagcttcttgttgtgcatgtatctattgtttcttttggtaaaatcaattgcgacacaagtctaggctttgactgttttgttgcccatccttattcttatcttcagcgaaaggacctctagccgagttggttagatggttcgagtaacactccttagctattgagttcgaatcctagtaagagcgaatttcaggttgagattaaaaaagatcactcgttagttctctggtcgtgtgcacacgagatggactaacttatggggacggatcctc

SEQ ID NO: 3157 - DNA, 1875 bp, Zea Mays
gagagaggctaagcaccacctgactcggctgaaaatctagcgcgaccggcttttaacacggcccggcccatcaaaatgaatgcactgtactagccggcgaggaccacgtgtacccgccaccgcgccgcgcggctccaccgttcggcggcgctcgggcacggcacgccgtaaaaccctagctcttgcgccccctcctctccaccgcgccggcgagccgtggagacgcggagctaaggatgccgcggaccactgagctggagagccccggctgcccgccgctccgcgccctcaccaccgacatcctcggccttgtcaaagtcgtcgaggcccacgcgaggccggcgggtgccgccaaggtcgtggagacgtggggcgcacccgacgcctcctgcgccatcgtcgctgcctccctcgccgatcgtgccaccgaccccgttttggctgtggcgaggatgaacggcgtggttgagttgctgaatcccctgaacggagatactttggctgctgtcaaggcagtgggaccagcaccaaatgatggtggcgctgaagcttaggaacgtttcttgcttgcactgagcaggggaaagcttctataaggtccatcacgaaagaaaatgcagcttcaggctcacatattgagccatctgctacatgggatgtgtgcggtggggccaatgtgcaattttgctcagttgatcatggtgaaaactatgtgatgtttggagggaaaggtatagaagtgagtttgtgggatattacatcttgtagtaagacatggtctgctaaatctccccgaacaaatagtcttggtatattcactcggccttggttcactgctgggaccttcttgtgcaaggatgatcatcgtaaaattgtagcctgcacaaatagtcatcaggtccgcttatatgatactgcattgcaaagaaggcctgccatctctgttgagtttaaggagtcaccaatcaaggcagttgctgctgatccgaatgggcatgatgtctatattggcacagggacaggggaccttgcttcctttgacatgagaactgggaaattgcttggatgctattttggcaaatgcagtggaagtattagatccattgttaggcatccagatctacctttgatagcatcttgcggactggatagctacttgcgtatttgggacacaaacacaagacagttgctatctgctgtctttctgaagcaacatcttacaactgtggtccttgattcacatttttctgttgaagagcctggagagatgaaatccaagcaactggagtcttcagtggagactgagactgaagtccgaaaagaaaagaagaaaaagagtaaggcaattacagaggatgagactgaggcacaaatccgaaaagaaaagaagagtagaacaattgaagaggaagaacaagctggattggtcgaccatagcgatattaatgatgaagtatatgccagaaaagaaaagaagaaaaagaagagtagaggtattgaagggggcaaggagcgagacagcgacggggaaatttgcagtcccaagagaagaaaatctggagaaagaagcaaatgcctgaagaagaggagcaagaaacagctggttgcctagtacaagtatcatttctcattacccgccttcttgattttgcagaattacacaattttgtgtggtagtttgttcggaattgtatcccttttgaaaccctgcaagggaagtgcatcattttcgtgtgcgcatttttctactctggtgtagctaaattttgagacatacacgctggagtagttacagccaaaacttgaaactaatttttgagatagacatgtgggactaaatttcgagatatacgcgtaggagtttctactataaaa

SEQ ID NO: 3158 - DNA, 1017 bp, Zea Mays
cccatttgaagcagcttactagccggctgatgtacaggcagtgagatgagcccgcgtcaagcaagcactaccagcagcagagatgccacagcactgggcagtaccacggccagtaccacgaccagaaagaaggcaggtgaggtgaggtgatgcagatgacccggctggaagacctgacccctgctccatccatggagcattcctcgaggccgaccctggggtttcccctgggaactgctctcctgctcctcgtcatctttgccctgagcggcatgttctcgtgttgctaccactgggacaagctccgcgccctcctccggtctcggcatcccgacatgttcctggaggccgaggagcatacggccgtctccgtggcgtcgtcatcgccgccgagaaaggcggtttctggtcacaagctggagagatcgggggaagagcgcggtgtgcccgttattattatgcctggagacaaggtccccaagttcttggcgatggcgaggcccagccctcgcggccccgaagcagcagcagagaagaccaccgaatgtcgggatcatcaggaaccctccgtcagtatctgtatacatgatgaaagcacagttagctgttagcatgatttgatcgagtgtatatatgtgcaatttgcttgcttgctaacacatctctctctctctctctctctctctctctctctctctctcgtgtgttaaactagatagagtttgaaaggacaaaaacagtcctagctagctaggtaactggctgttgttgaatgctactgtacccagcctgtaatccaaagagcaaagggggctagtgaagaagaatgttcttttatttatgctctttaattggagcatggatcagtcctatggaagaagaagctatttattgttaggtatttgttggtgccgtgcacgtatgttgtgtgcacgcattttgtcgggggactaaaagcaaagcaaagcaaagggcactatcaccaagtgaatgctctgaaagaaaagaaaaagaaaa

SEQ ID NO: 3159 - DNA, 1616 bp, Zea Mays
gccagtgtgccacgcaacgaatcccactatttcgcatcagttcgtcctgactcctgcgtccggctccggccgtcccactcccactcgaaagcacgacgacaaaacctcgaacgccaccgtcacgctcacgccttcgcccgaacttctccagttcttccggggagacgagaaaggaaccgaggatctcgttcctttggcgcagcgggcagcagaggcctcgccgagggagatggccggccggcgcgagtcgcccctgatgcgcggcggcggggcggggcctccgctgtctcgggggtcccgcatcgccgcggcggtagtggtcggcgtcgcactcggctgcctgtgcgcgtttctctaccccgccggcctcttcccccgtgcccccgactccgccagccattggccccgccaggctgaaccagttgcctgtgatacatctcgggaagttgccaaactaaagtcacggctggtattgttggaaaggaaaaatgctgcatttaaaatgcagatgaaggaattgtcaatgaagcttcaattggctggacaagggaaaaatgaggccctatataaggctggtccatttggtacggtgaaagctctgagaacaaatccaacagttactcctgatctatccatcaatcccagattggccagcttattggaacaggttgctgtgaagaaagaactgatagttgcactggcaaactctaacgtgaaagagatgcttgaggtgtggttcactaacataaaacgagccgggattccaaattatctagtagttgcattggatgacaacatagagagcttctgcaagtccaaggacgtccccgtttaccggcgcgatccagatgatggcatcgacaacattgagattctgacgtggaatccatgagcgacggccacaacaacatgacagcttatggattcaacgatgtgttcgacgagccttcaatgggctgggcaagatacgcgcacaccatgcgtatatgggtttacaattccgggttctttttcataaggccgacgattccttcgattgagcttcttgatagggttgcttaccgcctttctcacgagcccaaatcatgggaccaagcggttttcaacgaggagctgtttttcccgtcgcatcctggttatgaaggccttcatgcgtccaagagaaccatggatatgtacctcttcatgaacagcaaggtcctcttcaagacggtgaggaaagatgctaatctgcggacgttgaagccggtgatcgtgcatttgaactaccatcctgataagtcggatcgcatgaaagccgtgattgaattctatgttgacgggaaacaaaatgcccttgaacgcttccctgatggatcagaatgatagacaccagcttttgtaggacaggaaaaaaaatgccaacttctagtttctagtcgtctcgaaagtaagcacgggttgacttcttacataatgcattgtcgttataaaatcccgtgtgcttgctgagatgtcaactttcactgagcatcaaaattcgtataattctctacttgctacaagccttggaaagctgctagtgtcagcccatggtatattcccgtggcattggtgctgtttcagcttttctttcc

SEQ ID NO: 3160 - DNA, 2550 bp, Zea Mays
gcccgtcactctcgtcctctcccctcttgctgtgtcgccgcgcgtggaagacgttatcgccttcgccttcctcttcctttccctctccctgaatcctgatttctattcaccttcttcccctcctccgggcggaaggcaaagacctacacgcctatccctctccctcccgggtcccggcttccccttccctgctccccagatcgattcacccagcgggaaaagcggcgcgcagtggggtgcagcaggcgcagcgggctcggcgggcggcgagcggctagcggctagccgcgacgggcggccaatctacagcggaaggcggtgggcggctaccggtggcacatcgacctacggaaagtagaaaggtcatgtgatgctttacttgcaaatcctgctacctcacttgtggtccctgcaatcgggattattgtgtttgctctgtggggttttttgcctctaatgcgggatattagaaaccgttttgatcatggaggcaactggaagaagagtcctacatatttgatttcttcgtcgtaccttcaacctctacttctctggacaggagcaacactaatctgcaggggtttggatccagttgtcttgccttcagcagcaagtcaagctgtgaaaacacgtctgataacttttgtgagatcattatcaactgtcctggctgttgcatatattctcacaagcttgattcagcaggtacaaaagtttcttatggacatgcgcaatcccaatgatacaagaaatatggggtttgattttaccatgaaagctctttatactggtgtttggattgcttctgtttctctctttatggagttgctgggtttcaatacccagaagtggataactgctggagggtttgggacagtgttgcttacacttgctggtcgagagatttttactaacttcctctcaagtgtcatgatcaatgcaacacgcccatttgtagtcaatgaatggatcgatgcaaagatagatggtgttgatgtctctggcattgttgagcatgttggtttgtggtctccaacactcattagaggtgttgatcgagaagcgatatacattcctaaccataagtttacagtttctatattaaggaataacactcagaggacccattggcgtattaagacctatcttgctattagccacatggatgctggaaaaattgggactatagttgctgacatgaggaaagttttggcaaaaaatccgcatatagaacaacaaaagctgcacaggagagtattctttgagaaaattgatccaaaaaatcaagcacttatgattttcatatcctgctttgtaaagacatcacattttgaggagtatctcaatgtccaggaagctgttatgttggaccttcttagaatagttgggcatcacaaagcaaggcttgctacccaaattcgaacagttcagaaatcatatggcaatgcagacttcgataacattccttttggagaggacatgtatagtcgagtccgtggccggccacttctgattgatacatctgcaaggatcagtgatgacaaacccaggcctcgacctgtatcatcacgtgaggagcagaaagtcaagacaaatggctcggtagatattaagtccagttcccctgaaaatgctagttcaagcaactctgaaaagcaggaaccgaaaaaaatggtgcctgaagatactcgggtgaagaacattaagggtgataatgtgatgccagtaacaccatctttagatcctgctacgtcaacttccaaggctggtaaagggaagacacgggaaccagagcccactgagcggcaaggagatgggtcagtctcggtggctaatccaaagaaagaatctagaccagtttttgaagataacattgttctgggcgtagcccttgagggttccaggaggacactgcctattgaagaaggaaatcctcatctatcactatctgagactgaggtggacaccgaagaggcggcttcatcaccgaaggataagataggccaaagcccaaaactttgaggtccagaaaaaaagccgttcagaggaatctcgataggtcatccgagttcaaactgtatccttgtgaagatttgtcaccaagcctaccttttttgtgcgcttgtgcaaatacaatgccaccacacatcagtgttgtatgcttaaggggtaaattcacactgacgattattcagggaacattacctgtcagtcgtattgctacaggcttgtaaagaagcaagtgcttcaataggcattttgtaaagattatattattgctcatttaagtggcttcttgcatatgcatcggcaattcagcatgcgccgttgcaactgtcatctcggtttccaggtttggcttacgttagttttgtttccaatgccatctgctgcgagctgaaatatcatcgtctcttttcctttttttttttttacaaaagacacgctaagtcgtggagacggtgaattcttccggatggcgtctcatcttgcagacgactaaaacggaataccgcgattatcgaaaaggaaacggaataccgcgcggcg

SEQ ID NO: 3161 - DNA, 2900 bp, Zea Mays
gcccgtcactctcgtcctctcccctcttgctgtgtcgccgcgcgtggaagacgttatcgccttcgccttcctcttcctttccctctccctgaatcctgatttctattcaccttcttcccctcctccgggcggaaggcaaagacctacacgcctatccctctccctcccgggtcccggcttccccttccctgctccccagatcgattcacccagcgggaaaagcggcgcgcagtggggtgcagcaggcgcagcgggctcggcgggcggcgagcggctagcggctagccgcgacgggcggccaatctacagcggaaggcggtgggcggctaccggtggcacatcgacctacggaaagtagaaaggtggggaggactgccctgttcgcatttggagcatcaaaacagggttgcaatctagcacatattacacatcagtggctgataagaaactgcatccagtggatgtaaatttcattggatttgagttttggttgagatggcagttggattgacatctcagctgttccaaagagtaactgctactgacatcttttgccaaaggaacaaatttaggagttctgagatgaggagttctcttcccttgccatccacctcgtttccttcagttgctgataggcgagactgttggggtcgcaatgtgttagagagtagctgcatgcccatgctttatacacctcgcagatatagatctttgggctttagatcttttgccttgccaattcctttgaaggaaattcctcttgtcaagaacacatcattagcactaactaggtcatgtgatgctttacttgcaaatcctgctacctcacttgtggtccctgcaatcgggattattgtgtttgctctgtggggttttttgcctctaatgcgggatattagaaaccgttttgatcatggaggcaactggaagaagagtcctacatatttgatttcttcgtcgtaccttcaacctctacttctctggacaggagcaacactaatctgcaggggtttggatccagttgtcttgccttcagcagcaagtcaagctgtgaaaacacgtctgataacttttgtgagatcattatcaactgtcctggctgttgcatatattctcacaagcttgattcagcaggtacaaaagtttcttatggacatgcgcaatcccaatgatacaagaaatatggggtttgattttaccatgaaagctctttatactggtgtttggattgcttctgtttctctctttatggagttgctgggtttcaatacccagaagtggataactgctggagggtttgggacagtgttgcttacacttgctggtcgagagatttttactaacttcctctcaagtgtcatgatcaatgcaacacgcccatttgtagtcaatgaatggatcgatgcaaagatagatggtgttgatgtctctggcattgttgagtttctatattaaggaataacactcagaggacccattggcgtattaagacctatcttgctattagccacatggatgctggaaaaattgggactatagttgctgacatgaggaaagttttggcaaaaaatccgcatatagaacaacaaaagctgcacaggagagtattctttgagaaaattgatccaaaaaatcaagcacttatgattttcatatcctgctttgtaaagacatcacattttgaggagtatctcaatgtccaggaagctgttatgttggaccttcttagaatagttgggcatcacaaagcaaggcttgctacccaaattcgaacagttcagaaatcatatggcaatgcagacttcgataacattccttttggagaggacatgtatagtcgagtccgtggccggccacttctgattgatacatctgcaaggatcagtgatgacaaacccaggcctcgacctgtatcatcacgtgaggagcagaaagtcaagacaaatggctcggtagatattaagtccagttcccctgaaaatgctagttcaagcaactctgaaaagcaggaaccgaaaaaaatggtgcctgaagatactcgggtgaagaacattaagggtgataatgtgatgccagtaacaccatctttagatcctgctacgtcaacttccaaggctggtaaagggaagacacgggaaccagagcccactgagcggcaaggagatgggtcagtctcggtggctaatccaaagaaagaatctagaccagtttttgaagataacattgttctgggcgtagcccttgagggttccaggaggacactgcctattgaagaaggaaatcctcatctatcactatctgagactgaggtggacaccgaagaggcggcttcatcaccgaaggataagataggccaaagcccaaaactttgaggtccagaaaaaaagccgttcagaggaatctcgataggtcatccgagttcaaactgtatccttgtgaagatttgtcaccaagcctaccttttttgtgcgcttgtgcaaatacaatgccaccacacatcagtgttgtatgcttaaggggtaaattcacactgacgattattcagggaacattacctgtcagtcgtattgctacaggcttgtaaagaagcaagtgcttcaataggcattttgtaaagattatattattgctcatttaagtggcttcttgcatatgcatcggcaattcagcatgcgccgttgcaactgtcatctcggtttccaggtttggcttacgttagttttgtttccaatgccatctgctgcgagctgaaatatcatcgtctcttttcctttttttttttttacaaaagacacgctaagtcgtggagacggtgaattcttccggatggcgtctcatcttgcagacgactaaaacggaataccgcgattatcgaaaaggaaacggaataccgcgcggcg

SEQ ID NO: 3162 - DNA, 3056 bp, Zea Mays
gcccgtcactctcgtcctctcccctcttgctgtgtcgccgcgcgtggaagacgttatcgccttcgccttcctcttcctttccctctccctgaatcctgatttctattcaccttcttcccctcctccgggcggaaggcaaagacctacacgcctatccctctccctcccgggtcccggcttccccttccctgctccccagatcgattcacccagcgggaaaagcggcgcgcagtggggtgcagcaggcgcagcgggctcggcgggcggcgagcggctagcggctagccgcgacgggcggccaatctacagcggaaggcggtgggcggctaccggtggcacatcgacctacggaaagtagaaaggtggggaggactgccctgttcgcatttggagcatcaaaacagggttgcaatctagcacatattacacatcagtggctgataagaaactgcatccagtggatgtaaatttcattggatttgagttttggttgagatggcagttggattgacatctcagctgttccaaagagtaactgctactgacatcttttgccaaaggaacaaatttaggagttctgagatgaggagttctcttcccttgccatccacctcgtttccttcagttgctgatgtcatgtgatgctttacttgcaaatcctgctacctcacttgtggtccctgcaatcgggattattgtgtttgctctgtggggttttttgcctctaatgcgggatattagaaaccgttttgatcatggaggcaactggaagaagagtcctacatatttgatttcttcgtcgtaccttcaacctctacttctctggacaggagcaacactaatctgcaggggtttggatccagttgtcttgccttcagcagcaagtcaagctgtgaaaacacgtctgataacttttgtgagatcattatcaactgtcctggctgttgcatatattctcacaaggtgcacatgctacatcctcagaaaaactgcagttgttttttgtaagttgtagctttaattcgatcatgcccatctaagttatgtacaggtaatgacaacatttatgcagtcaagtagtactcaagataactgtaactgcaaaagcacatgttggagattacaaattacaattttggccatggacggttcttttctccccaactttagttttgtctatcatcttgaaatacaaatgcttgattcagcaggtacaaaagtttcttatggacatgcgcaatcccaatgatacaagaaatatggggtttgattttaccatgaaagctctttatactggtgtttggattgcttctgtttctctctttatggagttgctgggtttcaatacccagaagtggataactgctggagggtttgggacagtgttgcttacacttgctggtcgagagatttttactaacttcctctcaagtgtcatgatcaatgcaacacgcccatttgtagtcaatgaatggatcgatgcaaagatagatggtgttgatgtctctggcattgttgagcatgttggtttgtggtctccaacactcattagaggtgttgatcgagaagcgatatacattcctaaccataagtttacagtttctatattaaggaataacactcagaggacccattggcgtattaagacctatcttgctattagccacatggatgctggaaaaattgggactatagttgctgacatgaggaaagttttggcaaaaaatccgcatatagaacaacaaaagctgcacaggagagtattctttgagaaaattgatccaaaaaatcaagcacttatgattttcatatcctgctttgtaaagacatcacattttgaggagtatctcaatgtccaggaagctgttatgttggaccttcttagaatagttgggcatcacaaagcaaggcttgctacccaaattcgaacagttcagaaatcatatggcaatgcagacttcgataacattccttttggagaggacatgtatagtcgagtccgtggccggccacttctgattgatacatctgcaaggatcagtgatgacaaacccaggcctcgacctgtatcatcacgtgaggagcagaaagtcaagacaaatggctcggtagatattaagtccagttcccctgaaaatgctagttcaagcaactctgaaaagcaggaaccgaaaaaaatggtgcctgaagatactcgggtgaagaacattaagggtgataatgtgatgccagtaacaccatctttagatcctgctacgtcaacttccaaggctggtaaagggaagacacgggaaccagagcccactgagcggcaaggagatgggtcagtctcggtggctaatccaaagaaagaatctagaccagtttttgaagataacattgttctgggcgtagcccttgagggttccaggaggacactgcctattgaagaaggaaatcctcatctatcactatctgagactgaggtggacaccgaagaggcggcttcatcaccgaaggataagataggccaaagcccaaaactttgaggtccagaaaaaaagccgttcagaggaatctcgataggtcatccgagttcaaactgtatccttgtgaagatttgtcaccaagcctaccttttttgtgcgcttgtgcaaatacaatgccaccacacatcagtgttgtatgcttaaggggtaaattcacactgacgattattcagggaacattacctgtcagtcgtattgctacaggcttgtaaagaagcaagtgcttcaataggcattttgtaaagattatattattgctcatttaagtggcttcttgcatatgcatcggcaattcagcatgcgccgttgcaactgtcatctcggtttccaggtttggcttacgttagttttgtttccaatgccatctgctgcgagctgaaatatcatcgtctcttttcctttttttttttttacaaaagacacgctaagtcgtggagacggtgaattcttccggatggcgtctcatcttgcagacgactaaaacggaataccgcgattatcgaaaaggaaacggaataccgcgcggcg

SEQ ID NO: 3163 - DNA, 1027 bp, Zea Mays
aaccattttgtatgaccgtataccaccccgcacccacccgaggtgattgggattgtgaagaagagaggagagaaggtgaagtggactgcacagcacacacaactcgtcctcggtcctccgtacccttccgcgctccgccccagcacgaaacgccgaaaccctaccctttggcttctccgtcctcgtcctcgcccccgcccatccgcgcaccagccgaatgtcgtcgggaggcggtggggggcagcagttccgctacacgcagacgccgtccaaggtgctgcacctgcggaaccttccgtgggagtgcgcggaagaggagctcgtcgagctctgcaagcctttcggccgcatcgtcaacaccaagagcggcgtcggcgccaaccacaaccaggcctttgtcgagttcactgacgttaatcaggcaagaaataattaacaacaagagtcctggagagactgctggaaatgtcttgcttgttaccatagagggtgttcaatctagtgatgtcaccattgatgtgatccatatggcccatgataactggagaaaatatcattatcagcacctgcaattggagagataccatgtttgttttgctgccttctaactagtacattccaagttcttatgaactctcatgtttcatctggaggatgcaactttctaagtatcctccatcaacgcgcttatctccggtgtaggacacctcctgtttatccaagttactgatgaaaggttttctcggcttttgggtatgttcataaaatagccacctttgaaaaggctgcaggttttcaggcattgatccagtacactgatgcggctactgcttcagctgctaaagaatccttagatggaaggagcatcccaagttacttgcttccggagcatgtaacatcctgctgcctgcgaatttctttttctgcacataaggatttgaacatcaagtttcagtcgaaaccgcagcagttttcagatcgtctgatcgatcccactgggcgatcaggtgtcgatcagggcgattag

SEQ ID NO: 3164 - DNA, 2486 bp, Zea Mays
gtacaggccaccaatctggctcttccgtcaaagccctaccagaaccctacctcccgccgccggccgccccctcccgcggctaggaatgaccggcgccgccgcgctccggcaatcttctcgccggattttccggcacctcgccgctgcccccgcgttctctcgcagtgggctccaacatcccgagcgcctcctatcgtcgcagtcgtcgccggagcacggcgcgcgcggcgcggtgtccgggtcggagctggcgctgtacccgccggagcgggttcggaacttctcgatcatcgcgcacgtagaccacggcaagtcgacgctggctgaccggctgctggagctcaccggcaccatccagaagggccatgggcagccccagtacctcgacaaactgcaagttgagagagaaagggggattactgtcaaagcacaaacagcaaccatgttctacaggcacattactgcatctcaggactcagatatgccaagatatttgcttaatctgattgatacaccaggccatgtggatttcagctatgaggtatccaggtcccttgcggcttgccagggtgctcttttagtagttgacgcagcacaaggagtacaagctcaaacaatagcgaacttttaccttgcatttgaatcaaatttgagcatcattcctgtgattaacaagattgatcaaccgactgctgatccagataatgtaaaggatcaattgaagaggttatttgatattgatccaagtgaagctctgcttacttctgccaagactggtagaggccttgaacaggtattgcctgctgttattgaacgcataccttccccgcccgggaaatgtgatgcacctgtacggatgttgcttttggattcctactatgatgaatacagaggagtgatttgccatgttgctgttgttgatggtgctctgcgtaaaggtgataagattgcttcggctgcaactagccgtgcatatgaagttcttgacgttggcattatgcaccctgagcttacacctactggagttctctacactggacaagttggatatgttattagtggaatgcgttcaactaaagaagcacgcatcggtgatacccttcaccaggcaaagagtactgttgagccacttcctggaatatggagctcaagtcatatcgaccataccaaccgtaccttatatttttgaatacggtgatggaagcaaggtgcaagttgagaaccctgctgctttggcttcgaatcctggaaagcgtgtagcagcctgttgggagcccacagttattgcaacaatcattattcctagtatgttgggcctgtcattatgctttgttcagaaagaaggggcgaacagctagaatatacatttatcgatgcccaaagggctctgttgaagtaccgattaccattgaaggagataattgtggacttctacaatgagttgaagggcattacgtctggctatgctacttttgactacgaagattcagaataccaacaagctgatctagttaagatggatatccttctcaatggtcaacctgttgatgctatggcaactatagtgcataaccagaaggctcagcgggttggaaaggatttagtggagaagctcaagaaatttatagaaaggcaaatgtttgagatcaccatacaagcagcaattggttcaaaagttattgcaagggaaaccctgtccgcaatgaggaagaatgtcctggccaagtgctatggcggtgatattactcggaagaagaagttgctagagaagcaaaaggaaggcaagaagcgcatgaaacgtgtgggatctgtcgacattcctcaggaagccttccatgagctactgaaggtctccaattcaaaatagatggtgatccactgcaaatttagtttctgtagctgtccaaattttataagtagctgtgtggtgatgagtagcagcaaccttttctagtcatcttctgacagatcttgacagaatgatcgattccattgagtacataatggcctctcctgcgccttgtcagacgagccaacttgtgctggaagttgctcctcctgtagtcctgtcatccatcctgtggtgattgatatacacacaagtcttctcagctggccgcagacggatttcagtagagccaccatctttgtatttgttgattgattgatggaaaaccatcctttgagcacttgctgaacccagttttctctgctgacctgacttgtcacgttacactctattttttgtgttagataacggttttgagcaaaaataataggtcatatacacattaattggtcactgaaacaatgtggtacatgtaataagaggagctgcattgaataaagacatagtagtatcacgtttttggagtttgcgggctatctccttttcatcctgaaatgaacccctcttctaagccgagagtatcgtttggcttcgaacacagaagttgataaataaacacaaaaaataaaaaaaaaga

SEQ ID NO: 3165 - DNA, 2727 bp, Zea Mays
gtacaggccaccaatctggctcttccgtcaaagccctaccagaaccctacctcccgccgccggccgccccctcccgcggctaggaatgaccggcgccgccgcgctccggcaatcttctcgccggattttccggcacctcgccgctgcccccgcgttctctcgcagtgggctccaacatcccgagcgcctcctatcgtcgcagtcgtcgccggagcacggcgcgcgcggcgcggtgtccgggtcggagctggcgctgtacccgccggagcgggttcggaacttctcgatcatcgcgcacgtagaccacggcaagtcgacgctggctgaccggctgctggagctcaccggcaccatccagaagggccatgggcagccccagtacctcgacaaactgcaagttgagagagaaagggggattactgtcaaagcacaaacagcaaccatgttctacaggcacattactgcatctcaggactcagatatgccaagatatttgcttaatctgattgatacaccaggccatgtggatttcagctatgaggtatccaggtcccttgcggcttgccagggtgctcttttagtagttgacgcagcacaaggagtacaagctcaaacaatagcgaacttttaccttgcatttgaatcaaatttgagcatcattcctgtgattaacaagattgatcaaccgactgctgatccagataatgtaaaggatcaattgaagaggttatttgatattgatccaagtgaagctctgcttacttctgccaagactggtagaggccttgaacaggtattgcctgctgttattgaacgcataccttccccgcccgggaaatgtgatgcacctgtacggatgttgcttttggattcctactatgatgaatacagaggagtgatttgccatgttgctgttgttgatggtgctctgcgtaaaggtgataagattgcttcggctgcaactagccgtgcatatgaagttcttgacgttggcattatgcaccctgagcttacacctactggagttctctacactggacaagttggatatgttattagtggaatgcgttcaactaaagaagcacgcatcggtgatacccttcaccaggcaaagagtactgttgagccacttcctggtttcaagcctgtaaaacacatggtcttctctggtctctatcctgccgatggttccgactttgaagctcttagccatgcgattgagaaactaacatgtaatgatgccagtgtctctgttacaaaggagacaagtaatgcacttggcatgggattcagcaatctgtttttttatgtctgctttacagatgtggcttcctaggattgctacacatggatgtgttccatcaacggcttgagcaagaatatggagctcaagtcatatcgaccataccaaccgtaccttatatttttgaatacggtgatggaagcaaggtgcaagttgagaaccctgctgctttggcttcgaatcctggaaagcgtgtagcagcctgttgggagcccacagttattgcaacaatcattattcctagtatgttgggcctgtcattatgctttgttcagaaagaaggggcgaacagctagaatatacatttatcgatgcccaaagggctctgttgaagtaccgattaccattgaaggagataattgtggacttctacaatgagttgaagggcattacgtctggctatgctacttttgactacgaagattcagaataccaacaagctgatctagttaagatggatatccttctcaatggtcaacctgttgatgctatggcaactatagtgcataaccagaaggctcagcgggttggaaaggatttagtggagaagctcaagaaatttatagaaaggcaaatgtttgagatcaccatacaagcagcaattggttcaaaagttattgcaagggaaaccctgtccgcaatgaggaagaatgtcctggccaagtgctatggcggtgatattactcggaagaagaagttgctagagaagcaaaaggaaggcaagaagcgcatgaaacgtgtgggatctgtcgacattcctcaggaagccttccatgagctactgaaggtctccaattcaaaatagatggtgatccactgcaaatttagtttctgtagctgtccaaattttataagtagctgtgtggtgatgagtagcagcaaccttttctagtcatcttctgacagatcttgacagaatgatcgattccattgagtacataatggcctctcctgcgccttgtcagacgagccaacttgtgctggaagttgctcctcctgtagtcctgtcatccatcctgtggtgattgatatacacacaagtcttctcagctggccgcagacggatttcagtagagccaccatctttgtatttgttgattgattgatggaaaaccatcctttgagcacttgctgaacccagttttctctgctgacctgacttgtcacgttacactctattttttgtgttagataacggttttgagcaaaaataataggtcatatacacattaattggtcactgaaacaatgtggtacatgtaataagaggagctgcattgaataaagacatagtagtatcacgtttttggagtttgcgggctatctccttttcatcctgaaatgaacccctcttctaagccgagagtatcgtttggcttcgaacacagaagttgataaataaacacaaaaaataaaaaaaaaga

SEQ ID NO: 3166 - DNA, 3994 bp, Zea Mays
cagcaccactcgtcgggttaaaacttaaaaccccgaggagtctagtctctcgagggcatacgaggcgagcaggagccggcagcacgaggaagacagaagaagcaaagcgaagcaaggcgacctcctcctcccctgctgcacagagtgggccggggccacggttgcaggaagcagtgtccgtcagtagcagcggcggaggtgctccgcggtcctggttcagtagttctccccctccggccgtggcagcggtcggatctgcgtcgcggcggcggaaagcaccccctccccgcctggagcccggagccgccgtccttctgaagctcggcggcgtcgagatctgagttcggtcgcgcggagaggaggtttcgctgtgccggcgtgcttctcccggagccgcgcgcggaggcggcgcctttgctgcgcattgccgttccgtccgtcccgtcccgtcaagctctaaggcttccgaagaattgaaaccggggttcttgggctttgcgcctcgcgcctcgcgccgtgatgtaaacttgatccctcggatcgaaaaggccgtccctttgcgccggccggccggccggaggtttggcgctgttcggcggaggagcaagtggcggtgctcaatccggaccacgccgcgcacgtgcttggaaaaggagcgtggtttggtgtacaaggaagggcagcaagggcccttgcctccccccttccctctcctctccattccggtgcgcgcctggaacgcgtcttgtgggtcggccggcgagcggagcggcgggaggagaatgaagctctcgccgtcggccagcggtggcctccaggaccagccggcgtcgccggaagaagctgaagagcacaagtgcctgaattctgagttgtggcatgcatgtgctggccctctagtttcattgccttcggtcggtagtcgagtggtgtattttcctcaaggccacggtagcagcatcaacaaataaggaaatggaggctcagatccccaactatcctagtctacctccgcagcttatatgccaactgcataatgtgactatgcatgctgatgctgagacagatgaggtgtatgcacagatgacactccagccactcagtccacaagagctcaaggacccatttttgcctgctgagttaggcactgccagcaaccagccaacaaattatttttgtaaaacactaactgcaagtgatacgagtacacatggtgggttctctgttccacgccgagcagctgagaaggtgtttcctccactggatttcaatcagcaacctcccgcacaggagttgattgcaaaagatcttcatggcaacgactggaaatttcgccatatttttcgaggtcagccaaagcggcatcttctgacaacaggttggagtgtctttgttagtgcaaagagactggttgctggcgactctgtcctttttatctggaatgacaacaaccagctgcttctgggaattcgccgggcaaacagaccacaaaccgtcatgccatcatcagtactttctagtgatagcatgcatattggcctgctcgctgctgcagctcatgctgcatcaacaaatagccggtttactatcttctataatccaagagcaagcccttgtgaatttgtcatacccatggctaagtatgtgaaagctgtgtaccatacccgtatatctgtgggcatgcgtttccggatgctttttgagacggaggaatctagtgtaaggcgttatatggggacaattacaggaataagtgatcttgatcctgttcgctggccaaactcgcactggcgctcagtaaaggttggatgggacgagtcaactgctggagagaagcagccaagggtatctctttgggagattgaaccgttgacaacttttccaatgtatccatctccttttgctcttggattaaagcgcccatggcctgcaggcctgccttctttatacggtggaaggggtgatggcttgacctcttctcttatgtggcttcgagacagggcaaacccgggtttccagtcactgaatttcagcgggcttggtatgagtccctggatgcagcctaggctggataattccttacttggtctccaatctgacatgtaccagaccatagcagcagcagcagcattacaaagcactacgaagcaagttccaccttcagcaatgcagttccaacagcctcagaacattgctgatagatctgctcttctatcaagtcagattctgcagcaagtacaacctcggtttcagcaaatttaccctcaaaatctcaacgaaaacaaaattcaaggtcatacacaacctgagtacctccaagtccaacagcagcttcaacgctgccaatcatttaatgagcagaagcctccgatgcatccacagcaacaacagcaggaaccacagcagcagcaatgcgtccaaacaccacaggatcaacaaatgcaagaacagaagcatctgcacaacttccactccttgccagatgcattatcggccttttctcagctttccccagccactcactccccaccttccgcattgcagacagttccagcattctcgcatcaacaaaacttcccagatacaaacattagctctctctcaccatctactggcccttcaatgcatggcatgttggggagattaccttccgaagcagcttcgagcctcccatgtgtggcaatgaacgcccctgtatcggtatctgacccatggtcatccaagagagttgcagtggagtctgttaacccttgtcgacctcatgtttcaccacatatagaacatttggatatggcgacgtgtaacatgccgcagagctctgcactagcaccattacctggacgggaatgcctagtggatgaagatgggtgctctgatcctcaaaatcacctcttgtttggtgttcacatagactcgcattcacttctgatgcaagggggcattccagcccttcagaatgataacagttcaggcactattccatactcaacctccaatttcctgagcccttctgagaacgatttccccttgaatcaaccgctacgcagcgcgggctgcttagatgagtcggattatcttccatgtgcagagaatgccgaacaggcaaatcaacagtttgcaacctttgtgaaggtttacaaatccgggaccgtcggaaggttgctcgacatcactagattcagcagctacgacgagctccgtagcgaggtggggcgtctgtttggcctcgagggccagctggaagaccctctgagatcaggctggcagcttgtatttgttgacagggaggacgatgtccttctggttggcgatgacccatggcaggaattcgtgaacagtgtgtcctgtataaagatactttcaccggaggaggtccagcggatgggaaagccgggcatccagctcctgagctcggctccttcaagaaggctgggcaatggctgcgacagctacgcgagcatgcaggagccgagaggcctggacgctgggatggcgccggtgggttcggtcgagttctgaagacggcggagggaagcccaccatggccctcgggtcgaggattactctccctcctgtatgtttctgcagcacttgctagctctgcgacttggaacaaagcacgtagatcaaatggagctctgtgctgctccccgtctgatgatgtcttatggtatagactcgtagcagtaactactacatgttgtatacatgccggcacttcagttcttatcgagtagcaataccgctagtttagtccatccaatcaactacgttcttgttcctatgatcctgttgttgcgatgcagtaaaaccttttttttgtcataataacctgtatattgaaactgttcttggctcccacggtatacggctgacgacgagtgacgagggaaactggaatttgggggcatttcacagaattgaaactactgataattccaacttaccgatgcaattccaattccaacttggtcagaccaacattgccgttgct

SEQ ID NO: 3167 - DNA, 1548 bp, Zea Mays
aacagatttcgtctccatttcctcctttctttccactaaaactccgcccccgtgtgccgtgttatctatccacccatcggttcgccttcctctcgccgctcgccgcatcgctttttagggttttctcgctcctgctcccccatcctccgcaccctcgctcctcccaacgcacgcgcgtcgacgacgaccggcagccgcgcatctgtccgccgccgccactcactacaaggagaaatgggcaacagcgacgctgcatcgcccgcatcggcggccgccgcgcgcgactccaagaagaagagggcaataaggatgccaaatctgcagcttcgccaacaggagcagtttctgggtcgcccatactcgcttccccgcaccctccacttcctcgtcgccgtgctgattccagatcaaggggcagtgatccggaggatagggatgaggctattgctgctggccttgaggcagatggcagtggccttgactccccaggctcagacaagcgccaaagtggtgactgccctcagaggaaggggttccctggcaatggcggtggtcccagcctcagcagtggaagcagtgtatggtccagctcaaggagtgtgagtgatgctgaggaggatacaggcggccctgaggatgagagtgaagtcttcgatgattgggaaatggctgctgatgcgctttatgtcgatgacagttcttgtaaccagagttcaggtcccacaccgacactcccacaagctccgaccactgcagaaccttctcatgcagcgaaaccagaaccgattcaaagcaagacaagggcttgggcaccggatgacatatttcgaccacagagcttacccagcatctccaagcagaccagcttcccagcaagcattggtaaccgctggcaggatatgggaatgagtgctgcgcagcagggaattctttcattgccgctgtcgtgccccatttgctgtgacgatcttgacctgacagattcgagcttctgtccctgtccttgtgggtttcacatgtgcctcttctgccacaacaggatcttggtggaagatgggcgctgcccaggttgcaggaagcaatacaacacagtttctgcagcagaaggcggcggtggaggtggctcaagagcaacagttgggactggacgagagatggaaaagcgactgtcccgttcttgtagcatgggtccaagttactaaactgccagggttatgctagatctatgttgtagcgctacccgttgcatgttactgtcagatatgctcgttttttgcgtatcgtctgcttttggtataaagaaatgtgaatattcgaaataggtgctgaatccatatagacttgtccagaaactcagttccataccgttctcgttgcatgtgatgcatatgttgctggagaggactgtttgttgcttacagtttgtgagataatatatatgccatataaggtgactgttttgtccttgtctacgagtatatgggcacttgagcagtaactgttgtttatttaattttagacattaagtttaggtattcacaatctcat

SEQ ID NO: 3168 - DNA, 1056 bp, Zea Mays
catagggctgccatctgctactctttgtaccccctttgcgcttaataaaatgaaaggcgtgcatcatatccaaagtgaactggtagcttgtgcttctggtgccaactttacaccacatattattaatgttgctgctggtgaggatgtcagcatgaaggtcatatctttctcccaacaaggtccaagggctatttgcattctatctgccaatggagttatcgcaaatgttacactgcgtcaacaagactcattaggtggtacagttacttatgagggtcggttcgagctgctctccctgtccggatctttcactcccactgatagcggcggcggcaccagaagccgctcaggtgggatgagcgtgtccttagcagccgccgacggccgcgtcatcggaggcggagtcgccggcctcctcgtggccgccagccctgtccaggtcgtggtgggaagcttcctcccgagctaccagctggaccagggcgccaacaagaagccggtgatagagatcacgacagtgccgccggcgcccgtcgggttcaccatctcaagcggggacatggacgacgcgtacagcggcagccagcatccaaggtcggcggcggcgaaagggggctcgaccaccacggcactgttcaaggtggagaactggacggcgcccgcgcccgcgcccgatcaggcgaggaaggcgccggcgccggaggccaaagtccccgtccccggaggctgaagccgacatcctctacctagctagccggccgaccgtcgatcgatcaggccctgcagcttgttgggaatccagtaattcgtgatccttgtaaccgacgccgtcttagtacagaagtggatcagtatgaatcacccgctgttcatcattaattaggtgtcgacattttcccggtttatatatgtgtggagtttcattatccattgtttaaataacggtgtatgtatactggttagcagtaatacagtcgtcgtagcacagtgccaattttttgtgtgttcatctgaaacatcaaacaagtaatatacacagcatgtagtgtagtgcct

SEQ ID NO: 3169 - DNA, 2962 bp, Zea Mays
ctgcctcggccgaccaccgccatggctcccacggtcccttcggcggcgaagtctgcctctccttcccaaccttccgggaagagcgaggtggcagatctgaagcagcagctgcggcagctggcggggagccgcgctcccgatgcggacgaccagcgccgtgatgtcttcaagagggtgatctcctgcatgacggccggcatcgacgtgtcggccgcgttcggggagatggtgctctgctccgccacctccgacgtagtaaccaagaagatgtgctatctctatgtaggctcccacgcgcgcgcgcacccggacctagcactcctgaccatcaacttcctccagcgggactgccgtgatcaggaccccaccattcgcggcctcgcgctccgcagcctctgctccctccgtgtccccaaccttgtcgagtatctcgttacgccactcacgaccgggctgaaggatcctagcgcctacgtccggacgatcgctgctgttggtgctgccaagttgtatcacatatctgccacagcttgcattgatgctgaccttccggcttcgctcaaggcgctcatgctctccgatccagacgcacaggtagttgccaattgcctacatgcattgcaggagatctggaccctagaagctgctaactcagaggcagcagcaagagagattgagacattgtatagcaagccagtggtattttacctgttaaacaagatcaaagagttcagtgaatgggcacagtgtattgttcttgagttggcatcaaagttccttccatctgataataacgaaatatttgacataatgaatctgctggaggatagacttcagcatgcaaatggagctgttgttttggcaacgattaaagtttttctccatttgacaatgtctatgactgatgtccatcaacaggtttatgaacgtattaaagcacccttgcttactctggtgggtgctggcagtcctgaacagtcatactctgtgctatgccatctacatcttctggtgatgcgtgctccaatgttattttcctcggactataaaagcttctactgccaatttagtgatccttcatatgtgaagaagttgaaacttgagatgttgactgctatagcaaatgaaagcaacacatatgagattgtcactgaactatgtgaatatgctggaaatgttgatgtaccaattgcaagagagtctatccgggcagttggaaaaatagcactgcagcagtatgatgttaatgccattgtggacaggcttctacaatttcttgaaatggataaggattatgtgactgctgaaactctagtcttggtgaaagatcttctcagaaaatatcctcaatggagtcatgattgtatagcagttgtgggaaatatcagcagcaaaaacattcaggagccaaaaggaaaagcagctctcatatggatgttgggagaatattcacaggacatgcatgatgctccatacatccttgaaagtcttgttgaaaactgggatgaagagcactctcctgaggttcgcttgcatctcctgacagcagtgatgaaatgtttctttaaaagacccccagagacacagaaggcactaggggatacattagcagctggtctatctgacacccatcaggcttttgcaatacagtcctaatgtagcagaacgtgtagtaaaccctcccaagcaagctgtctctgtatttgcagacacacagagcagtgaaatcaaagatcggatattcgatgagttcaacagtctatcagttgtatatcagaagccatcgtacatgtttacagataaggagcatcgcggaccatttgagtactcagaggatcttacaggcttgactgaggatccagaaaatgtaatttctgcccaaagatatcaagaaaatgataatgatcttttgctaagtacttcagataaagaggacaatggtacaagagccagcaatggttcttccacctctacatacaatgctccttccgatttgattagtccttcattgataagctcgcaagcaccagctgaaacttcactagtaaatactggtgggacatattcctcacaatcaaacttcagtctcgatgaccttcttggccttagcgttactgaagctcctgctttaccacaaccaacactggcccttaactcaaagcctgtgctagatcctggtacgttccagaggaaatggggccagctagcattggcactgtctcaggaatgttctttgagtccacaaggggcagtagctttgatgaatccccaatcactcatccgtcatatgcaaagcaatcacatccaatgtattgcttcaggcggtcagcctccgaactacaagttctttttctatgctcaaaaagatggggctgctgctttcttccttgttgaatgtattgtcaacacagcatcagcgaaggcacagctcaaaatcaaggctgatgatggaactgctgctgaggcattctcgagtttgtttcagtcagccttgtccaaatttgggctttcttgatcctgagtaatttgtctgagcgattcaccggtccacagttttttatgggtttcacagtttgccccaactccactgtcttggcttgtccagtacttgtgatcatattattggagaatcagagtagaaggtgcaaaagggtactggagttttgcggagctaaaaatcctatttgtactatttgggtgaactgtgcatttgtacatgactacatgtcacccagataaatagctgggttatttaggactgtactgtttgatgttctgggttatttaggattgtgatagtttgatgccttgatctcttctgaagggtttcgtttccttgaaggatgtagaaacaacacgcaacaacccctttcatgtatgctatttaccatttcttgcacagatgatcaataagatgtttcgtcttccattttgattcgtattatttagtactattttgaca

SEQ ID NO: 3170 - DNA, 3008 bp, Zea Mays
ctgttgctgctgcgcgtactggcacagggaccgagtacctggcgccattgctcctcatctttgaccggaaatctagtgcttccggtggacgatccctattgcatcactggcacttcaaatctttgaaccatctcactgtttctgtaataactaatactgctccaagcgtaatggatactgccaagagctccccaaactcgactcagtcgccggaggtcacatcgaaggaactggaagacggtgacaatgtgaaggtgaaggtattgagtgagaggctctcatccgtagttctggatattcgtgcgaaggatgatctcgtgaagcagcattccaaggttgcagaggaggctgttctaggatgggagaaggccgagacagagatcgcgtcactgaaggcgcagctgaacgctgcggcggccaagaactctgcgctggaggaccgcctcgtccacctggacggcgccctcaaggaatgcgtccggcagctccggcgcgccaaggacgagcaggaccagacggtgcagggcgcgctagcacagcaagcgcggcagtgggagtcgcacaaggccgacctcgagctgcgcgtcgtcgagctcacggcgaggttggaggccaagtccgagcgctcggtggccgccgccgactgcgacaccggctccaggctagccgcgctggagaaggagaactcggcgctcaggacgcagctgctcgccaagacggaggagctggagctcaggacgatcgagaaggagctcaaccggcgggcggcggagactgcgagcaagcagcagctggagggcatcaagaaggtggccaagctccaagttgagtgcaggaggctgcaggccgcggcacaacggaggccctccgtgaacgtcgaactcaggcgttctccgagctcggcctgcgccgagtcggtgacggattgccagtcggactgctccgactcatgggcctcggtcctcgtcgccgagctcgaccagttcaggatcgacaggagcggcgcgagcagcagggccgccagcctcgcgaccgcggacattggcgtgatggacgacttcctcgagatggagaagctcgcctctgcgtcaaaaggcgacgccgtcgaggacgcgagcgggcaggtgctcaggctcgaggagaaggtcaagaagctggcagccgagaaggccgagcgggagaaggcgctgcacgaggctcagcgcgagctgaggacttcccgccagcgggtaatggtggcagaggagagatcagctgagctacagcggcagctgaaccttgccaatggcgagaaacatgccatgggggccgaggtgaaagctgctgaggcgaagagaggagagctggagggcttgctcgagctcgcccgcgccgagatcgcggggttgctggacaaggggcgcatcctggaggaacggctcgagtctgagaaggcgctgacacttgagctcgcagcaaagtaccaggacatggaggcgctgagggcagagaagagggagctgagcgctcagctggagacgtcacggtccgaagccaagaagctcggtgacaagatcgccctgatggagaggaagctggaggtggagaaggccttgtcgatccgactggcgacgaaatgccatggcattgatgctctggaagcaaagaagaagggagtcgagctcgagctggagacggcgcgcgaggaaatcgcttcgctgcaaaacaaggctagcagcttggaactgcgacgagtcgaggaagagaaagcgtcgtctgctgcactcgcactgcggtgccaagaactggatgaccttagatcccagctggagtcttcgaattcacggatcgttgagctcaatgagaaggttaaaacgctcgaggatgtagtcgaggaacagaggccagtgacggtggaattggagtctcagctccggtcgaggcgcgctgaaatcagtagcctgaaggaggatataagcctgttgcagaagaagctggagagccagaagaacctgtcatcagcttacatatctgcacttggtgcttctgaaacagagaagaaggagctggctagtcggtttgagctcggagagaaagaagccgaggaattacgtgggaagatgagcttgcttgaggaacagatccgtaaagagaaggcacggtcatccgagtttgcggtaaaatgtcagaagatggaggaacaaatctcctgtagatctcttcttggccaccaaccagtgaaatcatctgcggcgatcaaagatcttcagctcagaaaggagacagagctggccaaggctgcagagaaactggccgactgccagaagacgatagcttcactgagcagccagctgaaatcgttggctgatttcgacgaattcccccctgaaactgagaccagtggcgctgactcagacgacgcctgggacagcgatctgaagcttctccaacccgcaagctatcccacgcagattggctgtttggcagtcacatgattcacgatcctcgttggcaagtggatagcgaaactgtttttgcttggcttccgccgcatgattgctgtgatgagattgccatgatgttccaccacatgtcatatagagttaagttaataggtgagcaaatgttcatatggaagctgtttatagagttgtttggtgaagcctcaaagggactcatattgaatattatctttgatcttccaatctccctgtcccttggaaacatcctcactgtcagaagactgcaaatagtgaaatacacatggcatgtcaatcaaagaatgtaagaataaaaaccaggggcaggttcatatgacggcacgttcccacccgacatgctaccacatgttcataaggatcttggatttgcaaattccaattgaaagtttgtacataattcagttctagcatcttgtatctgtcaagagaaaatccgggtcttagtaagctaacttctcgactgacaggacgcctagtagctggatgtatacacttcgtggtcgaatctgaatgttcgcatgattggcg

SEQ ID NO: 3171 - DNA, 584 bp, Zea Mays
acgacgcgtcttgtaaagttgtaacgaaccgaaccggaacgtaacctctgtctcgtcaacgacctcgtccgtcgcgcccgaggcgaggaagcaacccgccccagtttcgcgctatggcgacggcgacgtcatcgaggcgcgtgtcggtgccggccctggcggccgccgccgtgctcctgctcgcgtccgtagccgcggccgacgaccacaacggcgtctacgacccctgcgcggacgcgtcggtgcagcgcggcgacgggttcaccttcggggtggtcttctccgggcgcgactccttctcctccggcggcgtgcagctctccccctgcgacagccgcctcgggctcgccaaccgcgcgcaggtcgcgctgttccgcccccaggtcgacgagatttcgctcctcaccgtcaactcctcctccttcgacccgatttggaagctcctgttctatacactcctacttaattgatttcgtcaaggaattggttggagctggtggggccgctctataacttttcgtgtaccaggagaaacacagcctctactgaagcaattggctttgcataaatctcaactcgtgatc

SEQ ID NO: 3172 - DNA, 1878 bp, Zea Mays
ctgagcctgaattcttatccacgccgcaacgccaaaagaacagagaaatagacagacggacacgatcaaaagagtgacaaggaaaagagagagaaaaagagggacttgggacgacagagaggggagggcggagttggtgagcgtgctcgggatcagcgggtgacctcagagtcctttcttcctcttggaggaggagggctgcggcctgagcaggagacggagacatgggtagcttcgttaaactggcgaggagggcggtggagacggacgcgccggtcatggtcaagatacaagaactgcttcgaggggccaaggatgtcatgtcgcttgcgcagggagttgtttactggcaacctcctgagtcagcaatggctaaggtcgaaaaaataattagggaaccaacgctcagtaaatatggctctgatgatggtcttcccgagcttcgagaagcactttttgaaaagttacgcagagagaataagcttactaagtcatcagttatggtcactgctggtgcaaatcaagcttttgtgaacttggtcctcactctttgtgatgccggtgattctgttgtcatgtttgcaccatattatttcaatgcctacatgtcattccagatgacaggtgttactgacatattagttggtggttctgatcccaagacacttcatcctgatgttgattggttggagaaggttctgaaagaaaatgaccctatccctaaacttgttaccgttgtgaatccgggtaacccctctggagcttttattcccaggcctatgcttgagaggatttcagatctgtgcaaaaacgctggtgcatggcttgtggttgacaatacctatgaatactttatgtatgatggaatgaagcactattgcttagaaggcactcatattgtcaacctcttctcattctcaaaggcttatggaatgatggggtggcgtgtaggatacatcgcttttccaaacgaagtcgatggcttccacgaccagctcctcaaagtgcaggacaacatacccatctgcgcctccatcatcgggcagcgcctggcgctctactcgctggaggccggccccgagtggatcaaagaaagggtgagagacctggtgaaaaaccgcgcgctgctcgtggacgcgctgtccccgctcggtgacgacaacgtcaggggcgggcagggcgccatctacctgtgggcgaagctcccggacacctgctccgacgatttcgaggtcgtcaggtggctcgcgaacaggcacggcgtcgccgtgatccctggcagcgccagcggaggccccgggcacatccgcatctccttcggagggctcaaggaggaagacaccaggctggccgctgagaggctacggcgcggcttgcaggaactggtggctgatggaacggtacagtaacggctccattggtgtaggtaaaaagcacagcattgtagttttacacaacgactccgattttccaatggcataactccgccgggattgattcgagagaagaactggaccttgttatgaagactgcattgttcggacgagagctgggacagaataaaaggcatccggtctgcagtcatctttgttataaaatatgagtactacatattataatcagcagtaagtatttgtttctgtttggttttcagttatctatattactgatggcacccatttgtacagaatcaaaagcataagcaagaaagtcctgacgtacggagctgcctgttaggccgtttccaacagtggacctaaagtttacctcaaagcactttttacattgttctgcattgtactgtttatagagtggaatttgaatataagtacaaggataaataaactgctcgacctcttggtctcttctttattaagg

SEQ ID NO: 3173 - DNA, 3699 bp, Zea Mays
cggggaaaggagaaaaatccacctcgccccttttccaccaggtcccagcccaagcctcttcgcctccgctagtacgcctccatggacgcgtaccagcaccagcgacgcttcgccggcgccggcgacgcaccgccgccgccgcctcacccctcccacccgagcgctcagtggtacccggcgcccccactgccataccatcctccccaccccggacacccctaccctccgcagcaccaccaccagtgggccccgccacccgacatgcagcaccagcaccatccgccgctgccgcagccctacgtgtaccaaccgccacccccgcccatggcgatgcagcaacagccgcccccgcctcctgggaacccctggccccctcaccacggcgccgggcagcacccgccgcctacctaccctcctcctccgccggggcaggcttggaccaatcactcatgggctcagaatcatggatatcaaggtcaacagagagaaacaaaccatttattagatagaggtccaatggtgtctccagcaaagaattttggttcattttcgtccacctatgagcaggaggtatcttataattattcttctgctccaggtactgggaataatatgcttcaatatccaaactctcaagcacagccatttccaaccacggcagctgttcaaggtggattctcacagggttgccttagtatgcctgttcccttgacagaacagcctctttttgggcatgaaagacagccaattgatccaagtgaccaacctttggaatttaacagtaggaaagctcctgatttggcagtacatataaatgtcaattccaatatcccagctcctcaaacactagcacctaatcatgatgtagctgcaacctctacacattcatggacgccatctgctacagtagggtacctgcctcgagctcctgtgccaccacaaacagcacagatggatccttctgtgcatgctgcaccactttttggagcagcatctagttctagttatgtttcacctgcagcatttggtgttggtaatgtaacagaagtgttccctacagatccaaacactccttttagtgttgcagataaatcaaagaaacctccagtacctaactggcttcgggaagaacttttaaagaaaaaatcggaaccactgagtgcttcagcgcaaaactcagaaaacttaaatcccatggaagctaatgaggcagtacagacaataggaagacctgaccaaagtgacagcagaagcaatgattccgctaaatccactgaagacgatgacgatgatgaggatgaaattgaagcagctcgaatggcagcaatcaacaaggaaattaagcgtgtgttgactgaggtccttttgaaggttactgatgagctttttgatgagatagcaacaaaagttctaaatgaagacgactcagctgaatccaatgaagccactggtgttttcggatcaaaggagactggtctgggaagatcaagagccaaggcctcggctaaagttgttctccctgctaagtcaacaaatagttctgatcataaagatagtactgggttaagttcccctaaaggtgctcttctcggcctggctagttatgattcagatgatgacgacgatgctgacactgacagcaaggataagatgccaatatcaaatttatcttctaaagataatgctggtgctgtaaatactgaaggtgataaaagcactcttggtaaaagaaatgggaatcacaatgaacagaattcttcacttggaagttctccatcaggggaagatcttaaatctaataatcaaaactttcaaaggaatgcgaatgcagaacctgaacaaatgcatattcgtgatacagagaatggggagttccgtttcaaggccaagactcgtactgagccaaagggtgcatttgacagaatggatgagaaggcacatacgtatgcagaggtagatatccagaacagaaaaacctcttttggcaataatgctgaaaagcacaatgatttggaaagcagtcacagacattcagaaaagagcagcaaagaggactttgttaatgagttgaaggctgatcatacaaaagaactcgaatattctagagcagaaaaatataataacgatgacaaatacagcatgtatggaaatattgacaaaaggggtagctgcaaggagggaaaaggttctgatagtgctgcaaagcatgaatccgatacaagggagccacattacagaggtaactctaagcttgatggtgcaaagggagattggaaggatttgccgaaggatagagagagaaatagagatgatagaagggggaaaggaaaggatgaaaaggacgacaggttaaggcagatgacaagtcataacagcagaagttcacggtcacgatcaccaagggggagaagtcgtactagaaaggagaactcacatgttcgagggagtgtttcaagtgatgagccttctgatagtgtgaaaaagagaaagcattattcccataaaaccagcatgtcaccttcacccccaaaatctagaaacaggtacactgttcatgttgtctctctataatactagtgttggggtgtgtgtgctgtaatggggttctctccccctttcttattcttctattaatacaaagatgcgcagctctcctgtgtattccagaaaaaaaatactatgctaggaattattcttggattgagagaattttgaatgtggacagccccagtattcatacctattaatatgttttatggttggcattaagttctagtcacctagatttaaagaacacatcagctttttatgttttattatgaatgaagctgtccatgctagatgttcttgtcttcagttctactcattaaagaatgggatttatgtttatcataaggtggtacctggtaacactaaatgcgggtttctgctatatgctaatttgaaccatgctgctgttctttattggatatgtgatggcaagttgttgaatcacatagaaatggtttgttgtagatattttggatgtgatatgagcatgcaggtatcttctgcgtgaagaaacatcaggttcatatacctcttatccttacacttacccatttagtattatgtttcatctctagacgaatttcgcggtctccacatagcaagcattctcaccgcaggcattcgccttattcatcggctggcaggaagaggcggtcgagatcgagaactccggtcaaaaggagatagaaggcatggacagtttatccgacgagatctttgcctaaacattcctctgaaacaaccaaagacatttttgcggttctgctgttgtctatctagtgcgtcttttgctccgacaacataatggtagaacagcattcctacagtgacaaacatgaaggcgaggactggatgtaccttgatataagatgcacattgaactgtatcttgtttgatagatgagctatataactagctcacgcagctggctgtatgatctgtagttcccccgttatctgaattgttcatgtattaggccatgtactgctcagcagagctatgtagttagttgcacttgtatgacttcagcatgcctgttgccagttgtttgtttgtctatgcaggatttttttcccgtttcctacttttttgataaaaataaactgattcctgtgaaatctatatatgatttctctcaaattcctgcca

SEQ ID NO: 3174 - DNA, 3942 bp, Zea Mays
cggggaaaggagaaaaatccacctcgccccttttccaccaggtcccagcccaagcctcttcgcctccgctagtacgcctccatggacgcgtaccagcaccagcgacgcttcgccggcgccggcgacgcaccgccgccgccgcctcacccctcccacccgagcgctcagtggtacccggcgcccccactgccataccatcctccccaccccggacacccctaccctccgcagcaccaccaccagtgggccccgccacccgacatgcagcaccagcaccatccgccgctgccgcagccctacgtgtaccaaccgccacccccgcccatggcgatgcagcaacagccgcccccgcctcctgggaacccctggccccctcaccacggcgccgggcagcacccgccgcctacctaccctcctcctccgccggggcaggcttggaccaatcactcatgggctcagaatcatggatatcaaggtcatgacaatgaggaagattgggctacaaaggctaaggcatgggttgctgctaaatctgttatgggaaaccaccagattcaacagcatgccatatccacaagtagaactgaaggtcatcataatggttaccatgatcagtatcagcaaccagctggtctgccaacagaagttacagaagctttgcacccaccagtacctcaatcaagtattgatcatgtgccatttccaatgacaggtcaacagagagaaacaaaccatttattagatagaggtccaatggtgtctccagcaaagaattttggttcattttcgtccacctatgagcaggaggtatcttataattattcttctgctccaggtactgggaataatatgcttcaatatccaaactctcaagcacagccatttccaaccacggcagctgttcaaggtggattctcacagggttgccttagtatgcctgttcccttgacagaacagcctctttttgggcatgaaagacagccaattgatccaagtgaccaacctttggaatttaacagtaggaaagctcctgatttggcagtacatataaatgtcaattccaatatcccagctcctcaaacactagcacctaatcatgatgtagctgcaacctctacacattcatggacgccatctgctacagtagggtacctgcctcgagctcctgtgccaccacaaacagcacagatggatccttctgtgcatgctgcaccactttttggagcagcatctagttctagttatgtttcacctgcagcatttggtgttggtaatgtaacagaagtgttccctacagatccaaacactccttttagtgttgcagataaatcaaagaaacctccagtacctaactggcttcgggaagaacttttaaagaaaaaatcggaaccactgagtgcttcagcgcaaaactcagaaaacttaaatcccatggaagctaatgaggcagtacagacaataggaagacctgaccaaagtgacagcagaagcaatgattccgctaaatccactgaagacgatgacgatgatgaggatgaaattgaagcagctcgaatggcagcaatcaacaaggaaattaagcgtgtgttgactgaggtccttttgaaggttactgatgagctttttgatgagatagcaacaaaagttctaaatgaagacgactcagctgaatccaatgaagccactggtgttttcggatcaaaggagactggtctgggaagatcaagagccaaggcctcggctaaagttgttctccctgctaagtcaacaaatagttctgatcataaagatagtactgggttaagttcccctaaaggtgctcttctcggcctggctagttatgattcagatgatgacgacgatgctgacactgacagcaaggataagatgccaatatcaaatttatcttctaaagataatgctggtgctgtaaatactgaaggtgataaaagcactcttggtaaaagaaatgggaatcacaatgaacagaattcttcacttggaagttctccatcaggggaagatcttaaatctaataatcaaaactttcaaaggaatgcgaatgcagaacctgaacaaatgcatattcgtgatacagagaatggggagttccgtttcaaggccaagactcgtactgagccaaagggtgcatttgacagaatggatgagaaggcacatacgtatgcagaggtagatatccagaacagaaaaacctcttttggcaataatgctgaaaagcacaatgatttggaaagcagtcacagacattcagaaaagagcagcaaagaggactttgttaatgagttgaaggctgatcatacaaaagaactcgaatattctagagcagaaaaatataataacgatgacaaatacagcatgtatggaaatattgacaaaaggggtagctgcaaggagggaaaaggttctgatagtgctgcaaagcatgaatccgatacaagggagccacattacagaggtaactctaagcttgatggtgcaaagggagattggaaggatttgccgaaggatagagagagaaatagagatgatagaagggggaaaggaaaggatgaaaaggacgacaggttaaggcagatgacaagtcataacagcagaagttcacggtcacgatcaccaagggggagaagtcgtactagaaaggagaactcacatgttcgagggagtgtttcaagtgatgagccttctgatagtgtgaaaaagagaaagcattattcccataaaaccagcatgtcaccttcacccccaaaatctagaaacagacgaatttcgcggtctccacatagcaagcattctcaccgcaggcattcgccttattcatcggctggcaggtaagagattaatcagttcttcctttgccattatactattactcgtgctgatggttcatcatgaaatttctatttgctttcagatttaggatgcaaactagattagctatcaatctttctgtggctgattatggaaattagattagctgcaaacaaaaataagtaataaggaatttaagaataaaatcgaaccttaggtatttttacagcacattcttataaaaaatattgtttcgatcttactaggaaccttgtttatgaaatgtgatattttatagttctcccagaaaagttgtgttatcttgagaaataaagagattttctgcacaatttctcctgggtaagctgaaaactgcgcatcgtaaatttgtagcctgcagaaaagttttcagtttagttgttttagatttaactgtacttgtcttgaactcttgggtattctggacgggaactgctgattctttcaaatccgggatcttcaattgtctgcaccagctgattcctttaaatctggaatcctctatctgttggcccacttgtacagtaactcgtgatttatacttccttaactgtgtctaatcattgcaggaagaggcggtcgagatcgagaactccggtcaaaaggagatagaaggcatggacagtttatccgacgagatctttgcctaaacattcctctgaaacaaccaaagacatttttgcggttctgctgttgtctatctagtgcgtcttttgctccgacaacataatggtagaacagcattcctacagtgacaaacatgaaggcgaggactggatgtaccttgatataagatgcacattgaactgtatcttgtttgatagatgagctatataactagctcacgcagctggctgtatgatctgtagttcccccgttatctgaattgttcatgtattaggccatgtactgctcagcagagctatgtagttagttgcacttgtatgacttcagcatgcctgttgccagttgtttgtttgtctatgcaggatttttttcccgtttcctacttttttgataaaaataaactgattcctgtgaaatctatatatgatttctctcaaattcctgcca

SEQ ID NO: 3175 - DNA, 1911 bp, Zea Mays
gcgattgtcgcttctcagtgattggtgccctaccgatccagtctctgttccccttcttgtatttcatgataagggatctgcatattgctaaacaaacacaagacattggattttatgctggttttgttggcgcttcatatatgtgtgggagggcagtctcctcaacagtatggggaatcgtggctgataagtatggaaggaaaccagttatcgtactgacccttattgcaatagttatcttcaatactatgtttggactaagctcaaactattggatggcattaatcacacgatgcctgcttggaatcatgtgtggttatctcgggccaattaaggcttatgctacagaagtgtgccgaaaagaatacaatcatctggctttggcagttgtttcttcctcacgaggcattggtctcattattggtccagctattggtggttaccttgcgcagcctgcagataaatatccaagtatattctctcagacgtccatatttgggaggtttccatactttcttccgtgcctgtgtatatcaatccttgcagttattgctctaattgcctgcatctggtttccggaaactttgcataaacacaatggggatgccgttgataattcagttgaaaccgtagaagaatctcttgctggcaccgacactgaagaaaatggaggtggcggatgtctaaaattatttacaaactggccgttgatgtcagctattactttatattgtatcttctctcttcaggatgtggcttatgcagagacattctctctttgggctgtcagtgacagatcgtttggtggattaagctttactaccacagatgtgggcaatgtccttgcgatgtcaggtctcttcctttttctatatcaaatgttgatctatccgttccttgccaaaacggtggaccacatcacattagtccgtgcagtggcgttattgactctaccggttcttgctagctacccattctttccttcgttgtccgggttcgggctcatggtggtagtaaattgtgcatcttttctgaagaatacattctcggtaactaccattaccgtgttcaacattttgatgaatgaagctgtgactcaggatgtaagagccgcagccaatgggatagctgtaacactaatgtccatctctaaagcggttgctccagctgttgcaggaatcatattttcgtgggcccagaggcgtcaaacagctgcatttcttccaggcgaccacttggtgttcttcatactgaacatcttcacgttcatcggtttcgtcttcaccttcagaccgtttttcgttcgaggcagtgccaagcactgaaacatggatgaaccggacgacgacccatggtatcctatccaggggcaatcgaatataaattttcttccggcgtggccaagggaggtgccgagtctgtaccagtacgacgactcaggccagaacacacggcgtatggtatggtacacagcaaggccgtgttgttgctgtaagttttgtaatttctgtttccttctcggcttcgcagcatgcagttgctgtatatgatggaagaacactctgttactgggcatgttgcgcggtttccacgcgtgtaagtaatgtagaagtcgctatggtaggtatttccataccgtcattagtggatcattgattttttttttgtaagaaggttattgcaatgccctttttccgggcatgaataagaaaaaggaaatatgcttatatgcatggtatgaataagtgagcaatagacttgtactgtgttcttgatttatttaaaatcagactaagagaactggtgacattttaaaccattcgtacaagaaccttgtactacctcagcacgttctcatttgaccatgcaattctggtcggtgaaattcttttcagccttgtgttggcgcca

SEQ ID NO: 3176 - DNA, 3176 bp, Zea Mays
tcgggtttcagcagcgggaaaaccaaaaacgaaacctatctcaccgcagagtctcctcaccgcagtaccagactccggccgaaccgcacctctgcccccttcctcccggaggctcagggcctgtggcgcacgtctatggagcggatccacgtagcggtgcgctcgcggccgctctccccggaggactcgcggagcagcccgtggaagatctcgggcaacgcaatcgctcactccgcgcagtcctcctcccgcttcgagttcgacaggatattcggcgaggagtgccgcactgccgaggtctaccaggcccgcatcaagcacatcgtcgataacgtggtccgagggttcaatgtgggaagaccttcacaatgagaggatcggctaatgaacctggaataataccgcttgcagttcatgacttattccagcgtattcaagagcatatggacagagagtttcttgtgcggatgtcctacatggaaatttacaatgaagatattaatgaccttcttgtgcctgaacatcgaaaattgcagattcatgagagtattgagggatctttgttgctggtttaagggaagaaattgttacatgcgcggaacaggtcatggatttcatgtcttttggagaatcccaccggcatatcggagagacaaacatgaatctttatagcagtcgttctcacactatatttcgcatggtaatcgagagtagagaaaaaggcgatgacaatgaagttgaagatttttgtgatgctgtacgagtatctgttttgaaccttgttgacttagctggctcagaacgcgctgcaaagactggtgcagagggtgtgagacttaaggagggttctcatattaacaaaagtctcatgactcttggtacggtcataaagaaacttagtgaaggcattgagagtcaagggggacatgtgccataccgtgatagtaaactgacaaggatactgcagcctgctctgggtggaaattctaacacagctatcatctgcaatataacacttgcacagatccacactgatgagacaaaaagcagtttgcaatttgcgagtagagcattacgtgtaacaaactgtgcatgcgttaatgagattttgacagatgctgcattattaaaacgccaaaggaaagaaatagaagagcttcgagcaaaacttagaaaatctgaaagtgatcattgggaggaagaaattctgaatctgcgaaacacactactgcagagtgaattggaaaaggaaagaatctctttagagctggaggaggaaaagaaagctaaagagcagcgtgacagatgcttgattgaacaggcaaagaaaattgaaaatcttagttcactggttttaaattcagacagagatgacaggagtactgcttttagtaagaacaaaagaagggtaacatggtgtcctggaccaaatgcaaagcaatttgatattgaggatttaagacctgtccaggaaggctctacaagcagcacagttagaaatgaacgggatatgggaatgccaccactttttgaagagttaatgcaagaaagtaatgatgagccttgtgctaacgtttactcatctggacctggtaatgtgtccaaagacagtgaagacgtccctcttcctgactcgcatgctttgctgcatgttaccaacagaagaaagccaaaggcaatgaagaaatcagatcaagagcaattcagggggagagctggtgaactattaataccccaggacccctgtgatgggaatgatgctctacgccacaaaaacactgtgccttgtgtagttagtagcttatcttctcgagaatctgaagccattcttgtcatcaaacaacttcaagatcagatcaagctgctggaggcagagaagagttctgttcaaactaatttggatgctgttcttgtgctggcaactcaacagaaggtttcatttaatgaggagtatgaagagcttcagcagatcactctagctgcagaagaacaagcaaaggttgctaatgagaacctgtccacactatctgctactgtaaaatccaaacaggaactagcatatgaattcctcggtaatttattgatggagactcaaggaataaatgtggagatggatcagtggagaaactcggttgacagtgctctttcttttattgatgaactctttcagaatctctgcatcatggcacaaggcattcgtggactatgaaaaactatcaacctgtttgatggacaaagtttacaaacttgaattggagaagaaactattggaggaacagtcccaagaccaacaaaatgagatttataagctgaaggccaatctggaaagctgtgagaaggccatagatgactgtactcttcaacatgaattggagaaggatgccattcttttagagctcctaaacctccagaaggaagtatctatcttgtcatcatcttctttgatgaaagaaaaggaatctatccgaaaggaacttgatagaactaaatcaaagttaagagagacggaggacaaacttaagaattccattcaggagaaaacaaaacttcagagtgagaaagcagaggcccacaaagaaattaagaaattgcaaagccagagaactttgcttgaacgtgatttacggaaacgtgattcagctactgttgacaaaaggcatgaactgaattccatgccacaggaaagttctggtgcttttggtcacatgcaggagaactaccaaaatcttgagatgcatgcttttgatatggatgctgaaatttattctttacaagaagctcttgtcacttcaattgatgaaaaggatgaagcgttgtctaaagtagggcttataacatctgaactagaagatcttgcgaataaactgaacttagcagaatcagaaaggaactcctttagcaacgagatcacactcttgactgaaaagttaattgcatctgaatcttcccttaaaagtttggagacttctctcaattctgtatcaagggaaaaggaagatttgggaatgcaacttactgatgcccttttggacatggaatctgaaagatcaatttggacagcaaaggagaaagaatatgtagaagctaatcatagattgaacatctgccttgatgagaaccacaaactttcagaagatttgatgaagtgtataaatggattgcctaccttctcttaa

SEQ ID NO: 3177 - DNA, 2151 bp, Zea Mays
gtgcgcgcaacccccacccaccgacgcctgggacggacgtcgctgcctccctactttttcccctccgccgccgacgagcaccaccatatgccttctccttggtcttctctttttgctgtgtgcgaaaccttgcgcccaaaccctaatttcctatccgtattcggatctgaatctcattacaagtgtgtaggttatcaaatacggtgaaccttgtgttcctgtgaaattttgcagctcattatacattgaaggcagaaagtcattctccaatctgaaggcgaaacaaggtgtgcacatatatgttctagaggataaagttcactgagctgctgttgggcattggagagcccagttgtggttctatgcctgaaaggaattctttgtaattttctcctgtatctggttctgttatcatcattattttcctggtgtggggcaatcatgtcagagagcgagttagcagtaataaaaccagaggcattgaaaacttatatctggcttcagtgctttgatggctccatacaacaagtggaggaagaagttgccatgttctgccctatgatatgtcgggaaataatgaaaaatgggacagggtcatctaagaatcatgctatagttctaccggaaagagttaatccggcaagtttgagtttgattcttgattattgtcggtttcatcaggtccctgggcgctcaaacaaggagcggaagtcattcgatgaaaagtttgtcaggatagacacagaaaaactgtgtaagttggcttctgcagcccttggtctgcagttaaggccactagttgatcttacttgtggagcacttgctcgaatcattggaggaaaaacacctgatgaagttagagatattttccatttaccagatgacttaacagaggaagagaaactggagccactaaaaaatttaaatgatgatcctacaattcgtttattgaaccgattgtatgcaaagaagcggaaagaactgcaggaacgccagaaactaaaggatgttcaaacacaagaagaacaaaaagacgagagatctttggatgagttactttgttttataaatggagatggagattccagaggtgggaaagcttctaagagtaagaaaaagaataaaagaaggaaagatcaagctaagaatcccacaaaagcgaactccgaacctgtaaataaggagggagcttcctgtgtggttccgtgcaaagcagataatggtaacatttctaggcatccttgccaaagtcaaaatttgcaagataccgagtaccccttcgacaatgctgaccttgacgatggacttgatcctgcaatgagggaggagattgatagagaagtggccgacttcgagatgaagttgaagctagcttggaccgaaagaatgagtttggagcaggaccaacaaatggagtcacatgttgatacgcggtggtaatggttctgtggtgggaatctctgttagggctagtttggaaacactaatttcccatgggattttcattttcccaagggaaattagttcattttcccttgggaaaatgaaaatcccatgggaaattagtgttcccaaactagcccttagtttttttccgaatagaattttcttgatgaggttttcttttgctgttagagtcggcagaaaaccttaggcaggaaggagttttggtcgagaggtacaggatgacattgcgaggtgctattgtcatatgctgtgatttgtatgtaccctgctcttcaagaaagtagtgcccaaccatgttactgttaccccccaaagaaaggtgggtgactttgttagtgtaaaaaccagaagttttgaatctatgtatgttcattaattttgacaggaactcttatcattatgaaatgaataaaagggaaaatgatgtgttgttggaagttggcggaaacaataggtcgcttagctctataccgttggttcaatagtgctccagttttttctatccacgtttgggactggcttgttgagttgtttttaccgtgtaaactcggtcaaaatgtttgcaattatggtatttgtggactgctggataattctcagtcaaaaagtttgtgaaaatgtattatttgtggactatttgatacttctcagtcaaaaagtttcaccaaatatggtatttgggca

SEQ ID NO: 3178 - DNA, 2208 bp, Zea Mays
tacgcctagcaacggcgtcaatcgcttcctcccaacccgcaggttatcaaatacggtgaaccttgtgttcctgtgaaattttgcagctcattatacattgaaggcagaaagtcattctccaatctgaaggcgaaacaaggtgtgcacatatatgttctagaggataaagttcactgagctgctgttgggcattggagagcccagttgtggttctatgcctgaaaggaattctttgtaattttctcctgtatctggttctgttatcatcattattttcctggtgtggggcaatcatgtcagagagcgagttagcagtaataaaaccagaggcattgaaaacttatatctggcttcagtgctttgatggctccatacaacaagtggaggaagaagttgccatgttctgccctatgatatgtcgggaaataatgaaaaatgggacagggtcatctaagaatcatgctatagttctaccggaaagagttaatccggcaagtttgagtttgattcttgattattgtcggtttcatcaggtccctgggcgctcaaacaaggagcggaagtcattcgatgaaaagtttgtcaggatagacacagaaaaactgtgtaagttggcttctgcagcccttggtctgcagttaaggccactagttgatcttacttgtggagcacttgctcgaatcattggaggaaaaacacctgatgaagttagagatattttccatttaccagatgacttaacagaggaagagaaactggagccactaaaaaatttaaatgatgatcctacaattcgtttattgaaccgattgtatgcaaagaagcggaaagaactgcaggaacgccagaaactaaaggatgttcaaacacaagaagaacaaaaagacgagagatctttggatgagttactttgttttataaatggagatggagaggtgggaaagcttctaagagtaagaaaaagaataaaagaaggaaagatcaagctaagaatcccacaaaagcgaactccgaacctgtaaataaggagggagcttcctgtgtggttccgtgcaaagcagataatggtaacatttctaggcatccttgccaaagtcaaaatttgcaagataccgagtaccccttcgacaatgctgaccttgacgatggacttgatcctgcaatgagggaggagattgataggtgagggcataagatatcttatgggttgatgcacgcagctctttgttgtgctactggcctgtttctcaatcgaaaaagcctgtttttgtacatgaaacagcaaggttattgatgcttatatactgtcattttgataagtataagctgatttctggactttgaatcgataaattctgttaaatgcttccactcatctttttctgcagttctgcttgaactttgtggttggtgcttgtgcctgtcgcttgatccacccatttactgttgacatgcatgaaacactgccgtgttttgatataacaagcgattgttcttgacaattgacatacagagaagtggccgacttcgagatgaagttgaagctagcttggaccgaaagaatgagtttggagcaggaccaacaaatggagtcacatgttgatacgcggtggtaatggttctgtggtgggaatctctgttaggtttttttccgaatagaattttcttgatgaggttttcttttgctgttagagtcggcagaaaaccttaggcaggaaggagttttggtcgagaggtacaggatgacattgcgaggtgctattgtcatatgctgtgatttgtatgtaccctgctcttcaagaaagtagtgcccaaccatgttactgttaccccccaaagaaaggtgggtgactttgttagtgtaaaaaccagaagttttgaatctatgtatgttcattaattttgacaggaactcttatcattatgaaatgaataaaagggaaaatgatgtgttgttggaagttggcggaaacaataggtcgcttagctctataccgttggttcaatagtgctccagttttttctatccacgtttgggactggcttgttgagttgtttttaccgtgtaaactcggtcaaaatgtttgcaattatggtatttgtggactgctggataattctcagtcaaaaagtttgtgaaaatgtattatttgtggactatttgatacttctcagtcaaaaagtttcaccaaatatggtatttgggca

SEQ ID NO: 3179 - DNA, 2209 bp, Zea Mays
ggagtttctccgttcccgtctctccggccgctgcaggttatcaaatacggtgaaccttgtgttcctgtgaaattttgcagctcattatacattgaaggcagaaagtcattctccaatctgaaggcgaaacaaggtgtgcacatatatgttctagaggataaagttcactgagctgctgttgggcattggagagcccagttgtggttctatgcctgaaaggaattctttgtaattttctcctgtatctggttctgttatcatcattattttcctggtgtggggcaatcatgtcagagagcgagttagcagtaataaaaccagaggcattgaaaacttatatctggcttcagtgctttgatggctccatacaacaagtggaggaagaagttgccatgttctgccctatgatatgtcgggaaataatgaaaaatgggacagggtcatctaagaatcatgctatagttctaccggaaagagttaatccggcaagtttgagtttgattcttgattattgtcggtttcatcaggtccctgggcgctcaaacaaggagcggaagtcattcgatgaaaagtttgtcaggatagacacagaaaaactgtgtaagttggcttctgcagcccttggtctgcagttaaggccactagttgatcttacttgtggagcacttgctcgaatcattggaggaaaaacacctgatgaagttagagatattttccatttaccagatgacttaacagaggaagagaaactggagccactaaaaaatttaaatgatgatcctacaattcgtttattgaaccgattgtatgcaaagaagcggaaagaactgcaggaacgccagaaactaaaggatgttcaaacacaagaagaacaaaaagacgagagatctttggatgagttactttgttttataaatggagatggagattccagaggtgggaaagcttctaagagtaagaaaaagaataaaagaaggaaagatcaagctaagaatcccacaaaagcgaactccgaacctgtaaataaggagggagcttcctgtgtggttccgtgcaaagcagataatggtaacatttctaggcatccttgccaaagtcaaaatttgcaagataccgagtaccccttcgacaatgctgaccttgacgatggacttgatcctgcaatgagggaggagattgataggtgagggcataagatatcttatgggttgatgcacgcagctctttgttgtgctactggcctgtttctcaatcgaaaaagcctgtttttgtacatgaaacagcaaggttattgatgcttatatactgtcattttgataagtataagctgatttctggactttgaatcgataaattctgttaaatgcttccactcatctttttctgcagttctgcttgaactttgtggttggtgcttgtgcctgtcgcttgatccacccatttactgttgacatgcatgaaacactgccgtgttttgatataacaagcgattgttcttgacaattgacatacagagaagtggccgacttcgagatgaagttgaagctagcttggaccgaaagaatgagtttggagcaggaccaacaaatggagtcacatgttgatacgcggtggtaatggttctgtggtgggaatctctgttaggtttttttccgaatagaattttcttgatgaggttttcttttgctgttagagtcggcagaaaaccttaggcaggaaggagttttggtcgagaggtacaggatgacattgcgaggtgctattgtcatatgctgtgatttgtatgtaccctgctcttcaagaaagtagtgcccaaccatgttactgttaccccccaaagaaaggtgggtgactttgttagtgtaaaaaccagaagttttgaatctatgtatgttcattaattttgacaggaactcttatcattatgaaatgaataaaagggaaaatgatgtgttgttggaagttggcggaaacaataggtcgcttagctctataccgttggttcaatagtgctccagttttttctatccacgtttgggactggcttgttgagttgtttttaccgtgtaaactcggtcaaaatgtttgcaattatggtatttgtggactgctggataattctcagtcaaaaagtttgtgaaaatgtattatttgtggactatttgatacttctcagtcaaaaagtttcaccaaatatggtatttgggca

SEQ ID NO: 3180 - DNA, 2234 bp, Zea Mays
cacaggcccatggccccgcgccgttacgattgggttggaccgttggacgtgccattgccgaccgagcctgaaatcgttctatcctcgccgccgccgccgccgccgccgtttgttatcgctcggagtttctccgttcccgtctctccggccgctgcaggttatcaaatacggtgaaccttgtgttcctgtgaaattttgcagctcattatacattgaaggcagaaagtcattctccaatctgaaggcgaaacaaggtgtgcacatatatgttctagaggataaagttcactgagctgctgttgggcattggagagcccagttgtggttctatgcctgaaaggaattctttgtaattttctcctgtatctggttctgttatcatcattattttcctggtgtggggcaatcatgtcagagagcgagttagcagtaataaaaccagaggcattgaaaacttatatctggcttcagtgctttgatggctccatacaacaagtggaggaagaagttgccatgttctgccctatgatatgtcgggaaataatgaaaaatgggacagggtcatctaagaatcatgctatagttctaccggaaagagttaatccggcaagtttgagtttgattcttgattattgtcggtttcatcaggtccctgggcgctcaaacaaggagcggaagtcattcgatgaaaagtttgtcaggatagacacagaaaaactgtgtaagttggcttctgcagcccttggtctgcagttaaggccactagttgatcttacttgtggagcacttgctcgaatcattggaggaaaaacacctgatgaagttagagatattttccatttaccagatgacttaacagaggaagagaaactggagccactaaaaaatttaaatgatgatcctacaattcgtttattgaaccgattgtatgcaaagaagcggaaagaactgcaggaacgccagaaactaaaggatgttcaaacacaagaagaacaaaaagacgagagatctttggatgagttactttgttttataaatggagatggagaggtgggaaagcttctaagagtaagaaaaagaataaaagaaggaaagatcaagctaagaatcccacaaaagcgaactccgaacctgtaaataaggagggagcttcctgtgtggttccgtgcaaagcagataatggtaacatttctaggcatccttgccaaagtcaaaatttgcaagataccgagtaccccttcgacaatgctgaccttgacgatggacttgatcctgcaatgagggaggagattgataggtgagggcataagatatcttatgggttgatgcacgcagctctttgttgtgctactggcctgtttctcaatcgaaaaagcctgtttttgtacatgaaacagcaaggttattgatgcttatatactgtcattttgataagtataagctgatttctggactttgaatcgataaattctgttaaatgcttccactcatctttttctgcagttctgcttgaactttgtggttggtgcttgtgcctgtcgcttgatccacccatttactgttgacatgcatgaaacactgccgtgttttgatataacaagcgattgttcttgacaattgacatacagagaagtggccgacttcgagatgaagttgaagctagcttggaccgaaagaatgagtttggagcaggaccaacaaatggagtcacatgttgatacgcggtgaaaaccttaggcaggaaggagttttggtcgagaggtacaggatgacattgcgaggtgctattgtcatatgctgtgatttgtatgtaccctgctcttcaagaaagtagtgcccaaccatgttactgttaccccccaaagaaaggtgggtgactttgttagtgtaaaaaccagaagttttgaatctatgtatgttcattaattttgacaggaactcttatcattatgaaatgaataaaagggaaaatgatgtgttgttggaagttggcggaaacaataggtcgcttagctctataccgttggttcaatagtgctccagttttttctatccacgtttgggactggcttgttgagttgtttttaccgtgtaaactcggtcaaaatgtttgcaattatggtatttgtggactgctggataattctcagtcaaaaagtttgtgaaaatgtattatttgtggactatttgatacttctcagtcaaaaagtttcaccaaatatggtatttgggca

SEQ ID NO: 3181 - DNA, 2071 bp, Zea Mays
ccgtcgctatcgaccccatcgcgttgccggatcgagctcagctctatctcgaaccttggttcgccgcacggcaccagaagcacggccgtgttctcatcccctccacacgtttccgcctcccgatccacgtccgccgttagccgcggccgacacagctcctcctcctcctcgcagctcttctccagctctcggaggcccgaggtttcatcgacccgcgctccttcatcctcgacacctcactccggcggcgcgggtccgcagtgctgcacatcgcgagccgcgcggcacagccgcacttgttgtccttcgtgcgtggggtgcggttcgacgcggcggcgggatggcggcgagcgcgcgggacagcgccgatgcagcggagcgagttgtggatgaccacgacggctgggcgtcggacgccgagatggacgtggagatggatgtggtggaaggcgatgccgaccggagggacggcggcgcggatggtgatgatgaatacttgctgctcactaggataagggacacgtcagcagctgaagcaagggcaggaaaggatatacaaggtataccatgggagaggatacacatagccaggcaagattaccgaaaagctaggttggaacagtataagaactatgaaaatttccctcaatcaggagagctcatggataagcaagtggagaagagcagcaagtattatgaatttcagcacaacactagatcagtgaagccatcaattctccattttcagtaagccactggtcatcattgtctcacaaattatcagaggttcttgacttctctgggcatgttgctccagcggagaagtatcctggcagtttactagaaggtttctctggtgttcaagttagcacacttgctgtgaatgagggtttggtggtagctggcggttttcaaggagaactaattggcaaagatgtggaaggctgtagtgtaaaattctgtatgaggacaactttgagtgacaatgccataacaaatgccatagatatacacagatcgataagtggaagcctgcacattacagtatctaacaacgattgtggtgttcgtgaatatgatatggagagatatcagctcgtgaaccactaccgatataactggccggttaatcacacatccgtgagcccagataagaaacttttggctgtggttggagatgatcgagatgctcttcttgtggattcacgaaatggaaaggtaacctctaccctagttggccatctggactactcatttgctacggcatggcacccggacagccggacattcgcgaccgggaaccaggacaaaacctgccgcatctgggacacccgcaacttgtcgacctcacttgcagtactgcggggcaacatcggcgcgatccggtgcatccgctactcctccgacgggcggttcctggtgttctcggagcctgccgacttcgtccatgtgtacagtgtggctgcggactacaagaaacggcaggagatcgacttctttggtgaggtgtccgggatcacgctcagcccggacgacgagtccctgttcatcggagtgtgcgaccgcgtctatgccagcctgttgcagtacaggatgatccgcggattcgactatcttgactcatacgtgtgaagaactgagctttggtgaccggtgttgtgctaggtgctggctgaaggttctgatgcgcggttcagggaatatatctgcctgctcttagttcatggcgaatgatggttcggtgggactcgacgccagcgaatctgccgtgtaaatagtttagaatttgaagcgtagtgtagtgctgtggaccaatgctgtctctgaacatacatatgatcagagtaatgtgtgtttgcgctgttagtttcagactccggaatacaaatagttttggaccaaattcctaaagcctgtttgtactgtggaacacatgaaagggctagtttgtattcacttcgatatatgtgttgttattattgagttccctggacagtgtttcaaatttaaacatcgtatttttagatgcataataaaaacatgtatgcagatataacatgtatatttgtta

SEQ ID NO: 3182 - DNA, 2136 bp, Zea Mays
ccgtcgctatcgaccccatcgcgttgccggatcgagctcagctctatctcgaaccttggttcgccgcacggcaccagaagcacggccgtgttctcatcccctccacacgtttccgcctcccgatccacgtccgccgttagccgcggccgacacagctcctcctcctcctcgcagctcttctccagctctcggaggcccgaggtttcatcgacccgcgctccttcatcctcgacacctcactccggcggcgcgggtccgcagtgctgcacatcgcgagccgcgcggcacagccgcacttgttgtccttcgtgcgtggggtgcggttcgacgcggcggcgggatggcggcgagcgcgcgggacagcgccgatgcagcggagcgagttgtggatgaccacgacggctgggcgtcggacgccgagatggacgtggagatggatgtggtggaaggcgatgccgaccggagggacggcggcgcggatggtgatgatgaatacttgctgctcactaggataagggacacgtcagcagctgaagcaagggcaggaaaggatatacaaggtataccatgggagaggatacacatagccaggcaagattaccgaaaagctaggttggaacagtataagaactatgaaaatttccctcaatcaggagagctcatggataagttgtgcaagcaagtggagaagagcagcaagtattatgaatttcagcacaacactagatcagtgaagccatcaattctccattttcaggaatttgttatgggcaacatcgaagcatgatgtctattttatgtcaaattccacagtaagccactggtcatcattgtctcacaaattatcagaggttcttgacttctctgggcatgttgctccagcggagaagtatcctggcagtttactagaaggtttctctggtgttcaagttagcacacttgctgtgaatgagggtttggtggtagctggcggttttcaaggagaactaattggcaaagatgtggaaggctgtagtgtaaaattctgtatgaggacaactttgagtgacaatgccataacaaatgccatagatatacacagatcgataagtggaagcctgcacattacagtatctaacaacgattgtggtgttcgtgaatatgatatggagagatatcagctcgtgaaccactaccgatataactggccggttaatcacacatccgtgagcccagataagaaacttttggctgtggttggagatgatcgagatgctcttcttgtggattcacgaaatggaaaggtaacctctaccctagttggccatctggactactcatttgctacggcatggcacccggacagccggacattcgcgaccgggaaccaggacaaaacctgccgcatctgggacacccgcaacttgtcgacctcacttgcagtactgcggggcaacatcggcgcgatccggtgcatccgctactcctccgacgggcggttcctggtgttctcggagcctgccgacttcgtccatgtgtacagtgtggctgcggactacaagaaacggcaggagatcgacttctttggtgaggtgtccgggatcacgctcagcccggacgacgagtccctgttcatcggagtgtgcgaccgcgtctatgccagcctgttgcagtacaggatgatccgcggattcgactatcttgactcatacgtgtgaagaactgagctttggtgaccggtgttgtgctaggtgctggctgaaggttctgatgcgcggttcagggaatatatctgcctgctcttagttcatggcgaatgatggttcggtgggactcgacgccagcgaatctgccgtgtaaatagtttagaatttgaagcgtagtgtagtgctgtggaccaatgctgtctctgaacatacatatgatcagagtaatgtgtgtttgcgctgttagtttcagactccggaatacaaatagttttggaccaaattcctaaagcctgtttgtactgtggaacacatgaaagggctagtttgtattcacttcgatatatgtgttgttattattgagttccctggacagtgtttcaaatttaaacatcgtatttttagatgcataataaaaacatgtatgcagatataacatgtatatttgtta

SEQ ID NO: 3183 - DNA, 1434 bp, Zea Mays
ctttcttcttcttcgccaagaagaccgacgaccccaacttccagccggtatagacccgtgaccgccttcctctccactcctctttcttgccgcgcaagaacgagcgccggttttatctaccgcggccgccgcctgcaggccagtccgttcacgttcctgcttttcccctgtcctgcggttttggcctttttgcccccggcttcctggcggcaacgaaacaaccagtcggttcggtcgatgcttcgcgagttggaattggacgccggccgacccgctgctcaatccgtcgagttcgacatggtacttgctagctctccttgcctgcgcccttctcgttcctatacgcttcggattttaccggactgctctgttctacgcgatccgaggcaggaaaccggcgtgttggattggattgcacttgcgcatgctcttcccggtagatgatctgactgtatctctctgcttccttggtcccctcgcagattgtagtcgttccttgactcacgatagccatgagccaatgatagattgtgttttttttgtgtgtggtttgttggatatagttaatgggaccattataagcatgggatcttacttgctgtttggctccaatgatacttactataacctggacccggaataattcacgcacacaatttctcaactgcatgaagatacacgcacacaatttgctcaactgtattaagatattgttcctagtgtctgaaagttgtacattagtagcagggtgtctgaaagttgtacactctgggaaggcagggctgaacaattgcagtttaagcgttaggggcttgatactctaatttcttcgcaggagtctgacactgcatgcctttgttaatcgacaggctactcccttggttgctgggttgtcagtggctgccgctgcattaagcggaagatacatgattagagcatggcaagccttccggacccaggcggcaatgccgcgggtgcgccgcttctaccctggtggattccagggggaaatgaatcgaagggaagctgcattgatcctcggcgtcagagaacgtgctacagtggacaagatcaaggaggctcacaggagggtcatggtagctaaccaccctgatgctggtggcagccattacgtcgcttccaagatcaacgaggcaaaggacatgctgatgggaaaagggaagtccgggtcttcgatcttttagctgacacaaagctcattctgctgtggcgtgatcaggctgtagctttttcaagggactgacagttgcacgtttcaaatttcttaacaatgctctgctgcttgtaccatatatcataaaggatacagatacagatacagaattgaatcaacttattatctgggtcttaagttattgtttggcctgattggaaatagtaaccatgtatatctcagagcccccaattcttgtc

SEQ ID NO: 3184 - DNA, 1847 bp, Zea Mays
ctcccacgcggacgcgctcgcagagtcgcaagagaagagccgcatcgcgtccattaggtccatagcatctggaggggacccgtctggcgtctgtctgggaccgggctgcccagccgctcgatcgacgtttggcgaggacgctgctccggtactccggttggttggaccggaggcgcggcgatgggggcgctgtcgcggccggaggaggtgctggcgctggtgaaattgcgggtggcagcggggcagatcaagcgtcagatcccgcccgaggaacactgggccttcgcctactccatgctccagaaggtctcccgcagcttcgccctcgtcatccagcagctcgggcccgaactccgcaatgccgtgtgcatcttctacctcgtgctccgtgccctcgacaccgttgaggatgacactagcatcccgaccgaggtgaaggtgcccatcctccaggaattttatcggcacgtctacaaccgcgactggcattattcattgtgtgtggctgggccttacaggtggaacaaatcactacaaagtgctgatggataagtttcacctcgtatccactgccttcctggagcttggtcaaggctatcaaaaggcaatcgaagaaatcactaggcgaatgggagcaggaatggcaaaatttatatgcaaggaggttgaaactgttgatgactatgacgagtattgtcactatgtagccgggctagttggttatggactttccaggctcttttatgctgctgggacggaagatctggctccagattcactatcaaattcaatgggtctctttttacagaaaactaatataattagggattatttggaggacataaatgagataccaaagtcccgcatgttctggcctcgagagatatggagtaaatatgcagataaactcgaggatttcaaatatgaggaaaataccgaaaaggcagtacaatgcttgaacgatatagtgacgaatgcactgattcatgctgaagagtgccttcagtacatgtcagccttgaagaaccatgccatcttccatttttgcgcaattccccagataatggcaattggaacatgtgctctttgctacaataacgtgcatgtctttagaggagttgtaaagatgagacgtggtctcacggcacgaataattgacgagacaaattcaatgtcagacgtctataccgctttctatgagttttcttcattgatagagtcaaagattgatgacaatgatccaaatgctgctctaacacggagacacgtgaattcaataaagcaaacttgcaagtcatctggtttggtaaagaggagggggtaccatttggacacatcaccttacaggcctatgctgatcatgattgtcctcctgctggtggctatccttttcggggcactgtataccaagtgacttgtagctggcctttttcccctatggagacgagacaaactctgccaatctgatccttttcgtactctgtagtccccaatgactgcaggaagttcggaattactggctgtagaagtgtagatcatacggcagcatgctactgcttccatgactccgttactgctctcgattcgtttcttcattatgttttttcgcgcgttgtatcgtttgaagctgttttaagcaacggaaaaaaaataccatgtgacacgtgtatcctacgaacatgggtttctgtttagttagcagtgggcgcactgtattatgttgtcttgttgacatgtcatgttttcaaagctgacgtgtttgtgtttaccagaattgtgtagtggagaagaacatttgccgcgttgaccttgatgagttactcaactatacaccagcaataatagtg

SEQ ID NO: 3185 - DNA, 1589 bp, Zea Mays
ctaccaccaacccgggctcctccattgaaccgccgtctcctccattcctggcttcccctccattgaaccgccaccagtctcttccattgaaccgcggtcgtaagacgcctcacccaacaccgcgcccaccaccccaaacgacgcctacattcctgacttcccctcctacgcgcagacgccgtcccaccgccgggatgccgccggcgatcccaagcctggtccacccgtcccgtgtgcggattctccacccgggcggaagccatattcacgggccggtggtgtactggatgctgcgggaccaacgtctcgcggacaactgggccctcctccacgcggccgaactcgccgctgcgtccacccccgcggcgccgctcgccatcgctttcacgctattcccacggcctttcctcctaggcgcgcacctccgccagctaggtttcctcctccgcgggctccgccgccttgccgccgatgcgcacgcccgcggcctcccgttctttctactcgagggcggacctgcggagctgccgtcgttggtgcggcggctcggggcttcggcgctcgtcgccgacttctctccgctgcggccggtgcgggaggcattggatgctgtcgtccaggagcttctgcgtgacgccgccaacatggccgtgcaccaggtggacgcacacaatgtagtgcctgtctggacggcgtcagggaagctcgagtactcggccaaaacctttagaagtaaggtgaacaaggtgataaacgagtatctggtggagtaccctgaggttccgcagtgggcgccttggtgcatggagcagccgaagagtgttgactgggatgcactgatcaatagcatcttcagtgaggctgagaatgtgccggagattaactggtgcgagcctggggagtcctcagcgatggaggtccttcttgggagtaaggatgggttcttgacgaagaggattaagaactatgacactggccggaatgatcctacaaagccacatgcattgtcgtgcctttcaccgtacttacattttgggcacatttctgcacaaaggtgtgctcttgaagcaaaaaaacgccgtcatcttagtccaaagtcagtggacacgttcttggaggagctgataataaggagggaactagctgacaatttctgctattaccagcctcaatatgattcactggctggtgcatgggagtgggctagaaagacgttaacggatcacactggtgataaaagagagcatatctatacgagggagcagctcgaaaatgccaaaacatctgatccagtttgtattagcatattccttgtactctactgaagttcttgaattcatttttatctagttcctgactggactatctgtccctcatttcccaaactttatcagctttggaatgcatctcaattggagatggtgcaccatgggaaaatgcatggatttatgcgaatgtattgggccaaaaagattctagaatggaccagtcaacctgaagaagcactttccatagcaatatatttgaacgacaagttctccatagaggaaacccatagatggcttcacatccccatctaccaaacgaag

SEQ ID NO: 3186 - DNA, 2160 bp, Zea Mays
tttttttggtgtacggttctgccatctaccgtcgcatcgccggctacaccacgcccccgctccatccctgcagcgcgtccgcggccctccgccctcgccctcccccctccccacaaatctcgcctcctcacccaacgccatcagcgctgccctccgctccatccctgtagcgcagaccttcgccaccgtccctgcccttcctcaccgcgcaatcaccgcccttcccgacgtgcctcggccgccatccacggcatcaccttccttccccacgcgcgcgccccctcctctgtgcgtgccccgcccccgttctttgctcacccgatgccccgccacctccgccgcgatagcctcccccacgaagtgcccccgtgatgtcttccattcccttcctccctcattcgtcctgttgcagcgattgctcccagtggctcggcggcaatggaggcaccacctgacccggtcgtcccatcctgctcgacgagatcgtcggcgacatccacggtgtggttccagattttcctttgctggctgccagggctatcaatgcagctcagcgagctagccccactgccagcttagttgtcgtgacagccattggggctgcacgccgtcagtggggtgaaggcgacagctgacgagatgttggccgaagcggagaaggcaaatgtcctagctgcaaaaaaaattgatcgcctgcttcgtcgttgacctcccatgatgttggtttatgctatgactttctgaaggagaagatgaagaacatgtcgacgatgagttcgatgaccggagtctgtggagtgagaagtaaagacgatagtacccgatgacgtcctgggcaaggccgaggcaaggtgttccattactccgccatgttttatttcatttgtactactgtcgtctcctatggtttaatttcagcagtacaaacggagctcatcctatctctttggttgaagctttcccaaatatgagatttttaaaggtcgttatgatatcaaattattaataatggatctcccaggcttggtaaattagtggttctaaggtattaacactactatttttggtacatctcgatcctgtctcttgtgcattgtccatctagatatgtgagtttgtctatgtcaatagaatcatttgctgaaatgaggacacactatttatctatcaagacacttcgtaataaaggagatgattaacagtggttataaaaagtgcaatataaaccttatatatgtaaaacccactaaagtttttattttatttctctgaggttatattaattagttggttatttctcatctaagctcaataagcacaaacatggtttcagtatgtgcatggtatatcagtacattcttgcatgtcagtgtgatatagtcatgaaaacaagctaatatattatttgcttaataaaagaaaaccgagtgtgcgtattgaggccctaaacatgctgattttctacatatctttacggtcactcatacagtcgtcgaacttccaagtcctagtgtatttgtttcttcattgcaaagaaacttttctcgtttcttgggactgaaagcttaccacaacaaaggaatactactaagtgatactggacttccttggtggtctgcgttcatccatccaatatggaggctccaacacatctcttcattatctgtatctggatttatctgtgtaatagcattatggtgctcctaacttccaagcttcattaaacaaggaaactgaaagtgtcagaactgcaattcatatagactagatttttatgatacattgtaactaatgcattggtaagcattactttgaatgtgtgggtttttccaggggttgagtggtatgttgtggtcagatttggcaacaatgtatctgccatcatgtgctatatcgataaattatgatacaatgtggtcagattctaggtttagttactgtttttgcgcaacctgtgtgccatctgtttaccgacaactggacaaataggacatattgcaatcggataaataacttggcactcttagtcaaaattttgattttccaatatttagaatcgtgtatttttcattgagctaaataggtcccctcgttgtattatgtttgaaaacctgttgtattatgtttgaaaacctgaaatgattatctatgttgtcctaa

SEQ ID NO: 3187 - DNA, 2674 bp, Zea Mays
tttttttggtgtacggttctgccatctaccgtcgcatcgccggctacaccacgcccccgctccatccctgcagcgcgtccgcggccctccgccctcgccctcccccctccccacaaatctcgcctcctcacccaacgccatcagcgctgccctccgctccatccctgtagcgcagaccttcgccaccgtccctgcccttcctcaccgcgcaatcaccgcccttcccgacgtgcctcggccgccatccacggcatcaccttccttccccacgcgcgcgccccctcctctgtgcgtgccccgcccccgttctttgctcacccgatgccccgccacctccgccgcgatagcctcccccacgaagtgcccccgtgatgtcttccattcccttcctccctcattcgtcctgttgcagcgattgctcccagtggctcggcggcaatggaggcaccacctgacccggtcgtcccatcctgctcgacgagatcgtcggcgacatccacggtgtggttccagattttcctttgctggctgccagggctatcaatgcagctcagcgagctagccccactgccagcttagttgtcgtgacagccattggggctgcacgccgtcagtggggtgaaggcgacagctgacgagatgttggccgaagcggagaaggcaaatgtcctagctgcaaaaaaaattgatcgcctgcttcgtcgttgacctcccatgatgttggtttatgctatgactttctgaaggagaagatgaagaacatgtcgacgatgagttcgatgaccggagtctgtggagtgaggtattttgcaaggacatgtccaatttacctcctcgtccaactctttctaaaatgtgtgcagagtacgacctcacatagatgagatactagatcgcttgatatgagtcagcttttgtttatgcttatgaagccatttctgtttcactgaagtctgtatcgtatgctttatgaactatagtgtattgcagtttacaaaagaaccaaaatataggaaactcagttaccagttagtccattcagattctgggcaacagttaacaggaacagctaacagttaacatgaacttactaggaaacccgttcacattttacataatccagttctacaaattgcagttattaaagtgccataatactacgataacaccattgaacagctcacagttctacaagtgccataatacatcacttatatcttttccttcagaattgcacaggatccacaagttgctgaaaggaagatggcgttgcaccaagttgctgataggaagtgccagtggttacaagctgctgtcagcgaagtcaatggtgatggagcagtctgcgttcgttggcgcaggggcagtcagcgaaggaaaatctggaaccgcactgtggatgtcagcgacgatcttgtcgagcaggatgggacggccgggtcaggtggcacctccattgccgcctagccgccgggagcaatcgctgcaacgggaagaatgagggaggaagggaatggaagacaagaccatgatccattttcaccaacgggatatcaagcacgggggtaaaagaagttaatgagcggcaccttacggttgatgacaatagaaagggtttcaaaccagcgatgaaaacaaaactacaaacagaagagtgttataagactggtagcaacggtagcctcggtatcctgtacggcgtatcctctatgtcctacgggcccatgcccagtcacgcaaacgagaggagccgggagctaggacttgccggatgctccctcgtcctccatatctgcgggatggagccacccccctggataatacggaacgaggtaccgggtaccactgcagacgttttttattctcagatccggtattctacaggtccaggacgacatacaggccaccgctgctaccagtctaatactataaatccaattgcatgatttggggtaatatttttaagaagcacagtgttcgggataatccagttcaaaaaaactcatctgattctgcttccatttttttgctatgtttcgatggaggcagaagtaaagacgatagtacccgatgacgtcctgggcaaggccgaggaatactactaagtgatactggacttccttggtggtctgcgttcatccatccaatatggaggctccaacacatctcttcattatctgtatctggatttatctgtgtaatagcattatggtgctcctaacttccaagcttcattaaacaaggaaactgaaagtgtcagaactgcaattcatatagactagatttttatgatacattgtaactaatgcattggtaagcattactttgaatgtgtgggtttttccaggggttgagtggtatgttgtggtcagatttggcaacaatgtatctgccatcatgtgctatatcgataaattatgatacaatgtggtcagattctaggtttagttactgtttttgcgcaacctgtgtgccatctgtttaccgacaactggacaaataggacatattgcaatcggataaataacttggcactcttagtcaaaattttgattttccaatatttagaatcgtgtatttttcattgagctaaataggtcccctcgttgtattatgtttgaaaacctgttgtattatgtttgaaaacctgaaatgattatctatgttgtcctaa

SEQ ID NO: 3188 - DNA, 2725 bp, Zea Mays
tttttttggtgtacggttctgccatctaccgtcgcatcgccggctacaccacgcccccgctccatccctgcagcgcgtccgcggccctccgccctcgccctcccccctccccacaaatctcgcctcctcacccaacgccatcagcgctgccctccgctccatccctgtagcgcagaccttcgccaccgtccctgcccttcctcaccgcgcaatcaccgcccttcccgacgtgcctcggccgccatccacggcatcaccttccttccccacgcgcgcgccccctcctctgtgcgtgccccgcccccgttctttgctcacccgatgccccgccacctccgccgcgatagcctcccccacgaagtgcccccgtgatgtcttccattcccttcctccctcattcgtcctgttgcagcgattgctcccagtggctcggcggcaatggaggcaccacctgacccggtcgtcccatcctgctcgacgagatcgtcggcgacatccacggtgtggttccagattttcctttgctggctgccagggctatcaatgcagctcagcgagctagccccactgccagcttagttgtcgtgacagccattggggctgcacgccgtcagtggggtgaaggcgacagctgacgagatgttggccgaagcggagaaggcaaatgtcctagctgcaaaaaaaattgatcgcctgcttcgtcgttgacctcccatgatgttggtttatgctatgactttctgaaggagaagatgaagaacatgtcgacgatgagttcgatgaccggagtctgtggagtgaggtattttgcaaggacatgtccaatttacctcctcgtccaactctttctaaaatgtgtgcagagtacgacctcacatagatgagatactagatcgcttgatatgagtcagcttttgtttatgcttatgaagccatttctgtttcactgaagtctgtatcgtatgctttatgaactatagtgtattgcagtttacaaaagaaccaaaatataggaaactcagttaccagttagtccattcagattctgggcaacagttaacaggaacagctaacagttaacatgaacttactaggaaacccgttcacattttacataatccagttctacaaattgcagttattaaagtgccataatactacgataacaccattgaacagctcacagttctacaagtgccataatacatcacttatatcttttccttcagagtaagcttcttcacacctctcctttcaattctaggtgtgaatagagtagaaacaacctctgttgtagattgcacaggatccacaagttgctgaaaggaagatggcgttgcaccaagttgctgataggaagtgccagtggttacaagctgctgtcagcgaagtcaatggtgatggagcagtctgcgttcgttggcgcaggggcagtcagcgaaggaaaatctggaaccgcactgtggatgtcagcgacgatcttgtcgagcaggatgggacggccgggtcaggtggcacctccattgccgcctagccgccgggagcaatcgctgcaacgggaagaatgagggaggaagggaatggaagacaagaccatgatccattttcaccaacgggatatcaagcacgggggtaaaagaagttaatgagcggcaccttacggttgatgacaatagaaagggtttcaaaccagcgatgaaaacaaaactacaaacagaagagtgttataagactggtagcaacggtagcctgtatattgcatcccctaaatactaatttagagattcctccaaaagagtttttcccctaaataaattttatccgcagcggtatcctgtacggcgtatcctctatgtcctacgggcccatgcccagtcacgcaaacgagaggagccgggagctaggacttgccggatgctccctcgtcctccatatctgcgggatggagccacccccctggataatacggaacgaggtaccgggtaccactgcagacgttttttattctcagatccggtattctacaggtccaggacgacatacaggccaccgctgctaccagtctaatactataaatccaattgcatgatttgggaagtaaagacgatagtacccgatgacgtcctgggcaaggccgaggcaaggaatactactaagtgatactggacttccttggtggtctgcgttcatccatccaatatggaggctccaacacatctcttcattatctgtatctggatttatctgtgtaatagcattatggtgctcctaacttccaagcttcattaaacaaggaaactgaaagtgtcagaactgcaattcatatagactagatttttatgatacattgtaactaatgcattggtaagcattactttgaatgtgtgggtttttccaggggttgagtggtatgttgtggtcagatttggcaacaatgtatctgccatcatgtgctatatcgataaattatgatacaatgtggtcagattctaggtttagttactgtttttgcgcaacctgtgtgccatctgtttaccgacaactggacaaataggacatattgcaatcggataaataacttggcactcttagtcaaaattttgattttccaatatttagaatcgtgtatttttcattgagctaaataggtcccctcgttgtattatgtttgaaaacctgttgtattatgtttgaaaacctgaaatgattatctatgttgtcctaa

SEQ ID NO: 3189 - DNA, 795 bp, Zea Mays
cccttcctcgccggccgcagccatcgtgaccgcgtgctcgcaggccacacggaggtcagattatgacaggcagccttgacaagaagctaaagctttgggattcaaaaacaagaaatttgagagaaatgtttatctttatgacatgaggaatctaacaagaccagttgatgaaaaagactgtcctctggattatcaaattcgatgccttcatacttctctagagtggaatgcttatgttgctggctctgtggatggagttgttgcattgaagtatcttgatcgtggaacagatagagatttgggatatgcatttcgttgtcatccaaattccagaaacggaaaatggaatctggtccctgtaaattgcatctcagttcatccctgcaacagaactttcgttacgggagatgataaaggatgcactattgtttgggatgctcaattgaaaaagaagctgattgagggagcaacaccaccaggtattcattgaaactgtggagaacttcaaaggcaagtcccgtgtgggatagagccttctaacaaaacatgttctgttcatctgttgtattgtattttgtctaccatacatgttaaaggtcaccaagatgtgacagcatgttgtattatgttgtatgactaagcattttttttaggaaacgacataatatggctaagcaatacttgtatatattggttacatctagtctgagacagctgtggtgtgttgtaactcttttgagcttttgcaaccagtattgctgttctggacttctggtaaccgcagctatccctgct

SEQ ID NO: 3190 - DNA, 1752 bp, Zea Mays
ttcttctctcggcgtcttcgaacttcctggtttccccaaaatacccctctcttaaaccctccgccgccgccctctctcctccgccgtcgaggagcaggatgaggagcactcgcgggacgtggcgctcgcgctgctcgatgcggcgctggagccgcccgacgaggacgaagatgatctcggggaggtcaaggaagaagaccagatgtcgctttccgttggcattgtcggcgcgcccaacgccggcaagtcctcgctcacaaataccatggttgggacaaaagtggctgcagtttcccgcaagacaaatactacgactcacgaaattttgggggtgctaacaaaagggaacacacagatttgcttttttgacaccccagggctcatgttagggcaccatggatttccttatagggatgtcacagttcgtgtggagagtgcctggagctcaattaacctatatgatttactaatagtcatgttcgatgtcaataggcatcttaatttgcctgattcacgtgttataaagttaatcaaacgttttggtacagaggtgaacccaaaccagcggcgaatattgtgcatgaataaggttgacctggtggaagacaagaaggacctccttaaagttgcaaaagaatttgaagatcttcctggatatgaaaggtacttcatggtatctgggctaaaaggcaagggggtgaaagaccttatacagtacttgatggaccaggcagtaagaagaccttgggatgaagaaccaactgtaatgactgaagaggtaatgaaaaccatatcattggaggttgtgcgggagaagatgctgcatcacatccaccaagaaatcccctatgtaattgagcatcgtctgatgggctggaaggagctaaaagatggttctcttagggtggagcagcacttcattgccccaaagcaaagccaacgtcagattcttgttggtaaaaatggctctaagatagggagaatcggtattgaggccaatgaagaactgaggtccatattcaagagagatgtccatctaatcctccaagttagagttgcgaagaagagaagtgcttgaacagattttttttagtgcctgtatagactgctagtgatatgggaagtgcagttcagtgttggcacaatgtattaacgagaatggttagtaagtggtgcttgggtgcatcagttccggggactgagttgatagaactttggattgaggatctaatggaggcactgagctgtacgggtgtgtggagccaagatttctgaagaaaggatatattggcggcaattcacatgccagtagtgacaaggaaacggcttgcggcatgtagcccttctctttccaggtctcagcctgtattttctgtaggttatttaaacagtgttgtaataataatctgatgtccgggcatgccccgtcttgaggacgtctagaggacgttctcgaaggcaaagtttgctgctgatcttccagtgttctgagcactacaaattccaggatggaatctggtgatctaccttgtaaagtgcacgaacgttgtgcaagggaaatctatcacttgcggcccttttgttgggtttgatgattttattctgtcacatcgaagcattgaagatcttgcattgcaattctactactaaaagctgcatgcaatggccatgaccagtgacatctgcgtgcgggcggctacggctccattgcaaaaactgggaagactaaactacagggccgaagagttcaaa

SEQ ID NO: 3191 - DNA, 1664 bp, Zea Mays
aggtgacctgaaaaccgcagctgacgcccacaaattcctgtcgaagtggttcgagttgtaccccgagtttcagttgaacccgttctacatctcgggggagtcgtacgcaggggtctacatccccacgatcactgacgaagttgttaaaggcattgagagaggtgtgaagccaagaatcaatttcaagggctatctgattggcaatccgttaactgacgtggactacgatttcaattccttcgtgccatttgcgcatgggatgggcctcatctcaaccgacatgtatgaggatgtcaaagcgtcctgccgcggcacattcttcggcgccgtggatgatctgtgccaggagaagatcgacagagtgcgctgggaactgaaggacctgaacaagtacaacatccttgcgccttgctaccatcatcccgaaatccaagaggtagagttcagcaacagcagcttgccgcggagtttcagaaggctaggagagacggacaggccgtttccagtgaggaagcggatgtcggggcgttcttggccgctccgtcttgctctcaaggacggccacgtccccatgtggccaggccttagtggcagatcacttccctgcacgagtgatgaagtcgctacggcgtggctggacgacgaagatgttagagctgcgattcatgccaaaccagtaagatatatgtagtgtgtgtggtaggtaaaaaaaagacttaaccctcaaagttagcactgatcctctagtctatgtgcacatcatcagaaaagcttaattggatcatgggaactgtacactgcaaggatagacttcactcatgatacagggacgatggtgagctaccacaagaagtttacggctttgggatatcgcgtgctaatctacagcggagaccatgacctgtgtattccttaccctggtaccgaagcgtgggtgaaatcaataggctaccaagttactgatagatggcggccatggtacttcggagaccaagttgccggatatacagaaggatacggtcacaatattaccttcctcactataaagggagccggacatgctgtgcccgagtacaagcccaaggaggctctcgcgttctacagtcgctggctggcaggagagaagttctaagaagaccaggaccattacagatttcacaagccttcagttattcgtcgctcatcggacaattactgtgtgcatggactcagagtagatgtatgcagatcagatccgttcactcggctgtgtaagcctctgtatacagctgaagagatttttaacgtgggatcttcacctctactcaattaaccatgggtcagatccattggcaatattattctactattatataaagaataatttaaatatacagaaataaatactcacaagatatcaattaaccatgggttagtgacaaaagaggcatggtcacagcataaatatggatggatgaaagtagtgttagaagcagagagcgagaggggtggggtcaagagtgatgtaaatgggattatctttcactgaacgtgtgtgcatacaaacataaagtgacgaaccaatcaatgtgtcatctagaactaatcggatggtggaaccagcccaccagacccggaacatgtgtgattaacccatttattggattcgtgcacgccgatttggt

SEQ ID NO: 3192 - DNA, 925 bp, Zea Mays
agattcagcccacaaggccataacaaaatagccccgccccccctcccctagggtttcactacatatgtaaccctctcgcgcaaacactcctctttccgcgccgcctcccctcccgccctcttgctccgccggcgcggccaccgccaccgccaccgcaacagctagtcagcagatcgtaaccatggcggattcgaaggccgctgcggcggtgacgctccgcacacgcaagttcatgaccaaccgtcttctctcccgcaagcagttcgtgctcgaggtcatccaccccggccgccccaacgtctccaaggcggagctcaaggagaggctggcgaagatctacgaggtgaaggacccaaactgcatcttcgtgttcaagttccgaaccaacttcggaggcggcaagtccaccggcttcggtctcatctacgacaaccttgaggccgccaagaagttcgagcccaagtaccgcctcatcaggaacggccttgctaccaaggtagagaagtcacgaaagcagatgaaggaacgtaagaacagggcgaagaaaatccgtggtgtgaagaaggctggagatgccaagaagaagtaagggaggaagttacttgccttgctctttctctcatcataggctttggtttgtttagggtggggctccttccggcaatgctgaatgtttagttagaagtagagaagattttgccaattacccatcatgttgagtttctcgtcgcaccttctgttcagttttgaggcactttgtcagacacaagaatatatatatacctggtcatcacggcttttgtcctgctattatcattttgatttcagttttgtgcactcggtacactgaagttggatgcaaagcttctgatttgattaggtttatattaaaagattttgttattaagatttgttttatgtaaat

SEQ ID NO: 3193 - DNA, 392 bp, Zea Mays
ttgtgcgattttagacgaatggctgtcgacggagaacaatggagtggacgaactgattagacgccatcttggagggggattgacgcttcaaggtccccaagatcgcagtcgtaagctgatgggtagtcctttgctagacgatgataataggcccgctaattcagcagagacggacatttttattcatgctgtggaacgtgtcttgcctaatttgccaaaaagttgcatagacaaaatcaagagactaatgggctgagctagcaagtacgtgatagcgacctgcaatggcacctatggacccgaagggaacaaccttcagcctgttcttgtagcttcaagcaaggagctaaaaacaccaccaagatgaaaaaaagaacatccaattatggagg

SEQ ID NO: 3194 - DNA, 736 bp, Zea Mays
  misc_feature (1)..(1): n is a, c, g, or t
nttgtgcgattttagacgaatggctgtcgacggagaacaatggagtggacgaactgattagacgccatcttggagggggattgacgcttcaaggtccccaagatcgcagtcgtaagctgatgggtagtcctttgctagacgatgataataggcccgctaattcagcagagacggacatttttattcatgctgtggaacgtgtcttgcctaatttgccaaaaagttgcatagacaaaatcaagagactaatgggctgagctagcaagtacgtgatagcgacctgcaatggcacctatggacccggtatgacatgtataatgactgagcaggctagagcctgaacatagtcaatgatatgctcatgaggtgaaaccaatcgcttatgcaagggtcgatggctgtttgaaattgctagaacacaaactgaagaccgatttcgagttatatagtggacctgaaaatgttcctgaacttttaaaggatgtgcaggaagtgttgttctttcagatttatttttgttttttagtctcaatgtctagcgtcatagttgtaaagcacatgaactgcgaaattctgcagataatggctgcattttttataaatgtgatttttaggtaccagcagcctagcaacggtcttgtttattgcagtggccaaccagtcaattggtacttaaaaagacatgtttgtttaaatgaatgattcaagtgcatggtttgttaatatttgattgaaa

SEQ ID NO: 3195 - DNA, 820 bp, Zea Mays
gggataccggaaataccctgcacggccatccgatcgagccaacgcttggagacgccgtctccgaatgaagtaggggagagcggggtgccggggggtcagtttgttgccggtcatcctcctcgtcgtccaacccaggtgagttccgcatttcacatcatcccatgctcgccttttaattttatatgggaacactaggtcatcgcatcgttcacgttcactctctgagactccgagacgcggttgctatggcctatttgttgattattacgggaatatggctgatgaggaatgcagtttaaaaactggagcaccaccgcgtggttgcttttgcaggatagtgtgccaatcaggtcaggacataggcttcagcattattttctgaatcctgctcacaacaattgaactgcagtctgtgccatgacaactgacaagtcatatgcgtgagtcagacgaagagtttgagacgagacaaattttcaaagcaggacacctctactaattagttgcagaatcaagtgtgtctgttgcacatggctttgacaaagcattgcatttctagtttgctgttacatacctagaccctagtgaatagagaagtcactccggtgctgctttaggaataatgctaatttattcagtcttgatatcttctgtaaaattcacagtaaattcataaacgaaagggaattttatttgtgagtaaagccgtaatagtatttgcatcaggagttcacaattgcagcattgccatctttaggaatgtttatttatttgatcaagaatgtcatagatttcttttcacagggaacatacatgattc

SEQ ID NO: 3196 - DNA, 1099 bp, Zea Mays
ctcactgcgcgttcgcattcgccaattccgccgcctcctcctcctcctcccctgtgtccgagatctcgcatccgctccatctatggaaggccaccacacgccgtgcccagccatcctcggattccgccaccccatcctcggattccaagcgtcgtccaccccacgtgcccctgcccgacgaccccgttcctcgcggcgcttggcttcagcgccgcgaccgccgcgccatccccacccagcacccatccgcaaacccactcccatgactgcccccgcctgaagaccccgttccccgcgacttcggtgccgcgaccatcgcgccatccccacccatccgcaaccccgctcccccgccgcgccatccccacccattcacaaccccatcccctgccgcccctcacgtgatcacccattcgcgacctgccccctcccctcccccgatgggacagggagcagcaaggtcaccaccggagacgacctcgatgggtggcggcgccgaggacggaggtggtgtcacagtctatgggaggaaggagatcatgatgggggagcagtgccagtcgatggacttctctggggtcatctactacgacgctgaaggccaccacgtcgcacaaccgccgccgcggcgctagcctgatgcccgcctccgtgacctcgccgccaatgcccacaccgcgctcgtcttcagtgggctggacagtgataccccgcgacggtggtgtagtgggagtgggacggcgaggaggttaagggcggcgacggcgaggtgcagagctcctacgggctccgccatcaacactatggatacactccaagaggccccttcagatttccagcaccctgttttcaacaccgaggaggatgaacattctacgaaatcaaaaggaccccttaagttctacaactcggagatccacacgacatcattctgtttgtcctcttttgcaaagagggtaattgagtcaaaggcagtgtaccgaggcacctcccattggaatggcgagtgctgatctgaatgggagatatttctattactgagattcagactccaatacaatatagttttcccaaatcaagtctgaatcgagcacttcag

SEQ ID NO: 3197 - DNA, 305 bp, Zea Mays
gcttgaccacggtggaatccagctagcaagttattggcatcaagaagaaaatctcaatgcttctagaattaaagtccttcaagctcaggatgatttggtaacagatatgttgaagtcagcaagcaaagagctactgcgcataagtagagatcacctcacttacaagaagcttctcaagacacttattgttcagagtttgctgcgcctgaaagaaccagctgtgcttctgcgctgcaggaaggaggatctccaacttgttgatttagttttggagtctgcaaggaatgagtatgcaaataaagcaa

SEQ ID NO: 3198 - DNA, 513 bp, Zea Mays
cccgcatcctgaggaacctgttgcattcgctccacgtcaaggaggttccaggaaccaagcaggtagcgtgctctcacctctcagtcactgtatatggctaaatgttatcatgagatttaagagaaaaaaaacttcgcagttcacaaggtcacagaagccaattgcgtcatcatcatctgatttcatcacaaggcttgaccacggtggaatccagctagcaagttattggcatcaagaagaaaattgattactcaatgcagctcaatgcttctagaattaaagtccttcaagctcaggatgatttggtaacagatatgttgaagtcagcaagcaaagagctactgcgcataagtagagatcacctcacttacaagaagcttctcaagacacttattgttcagagtttgctgcgcctgaaagaaccagctgtgcttctgcgctgcaggaaggaggatctccaacttgttgatttagttttggagtctgcaaggaatgagtatgcaaataaagcaa

SEQ ID NO: 3199 - DNA, 3484 bp, Zea Mays
ctgcggcctacagctgtaggcctgtagcctttgccttcctctctgctgtggctctgcatctcatcgctgcggctttcatcctcgccaccggacctctgtcgctcacctgttgcccccaagtccaaatgatgaagtccctcctcttctccgcccaccccacgtcgctgctcctccccgctccccgccttcgcaggctcctccgcctccgcgccgcctcctctgcctccgcttccgcgccgccccgagccgaccgccgctcccccgggacgccttcgcgccgaccatcctcctccctctacgcgcgccccagcctcctcgacatggagcgggatcgcgccacccgccgcgccgatgtcgacgccttcctcacctccctcggcgtcgacccgggcgaactcgcgggcctcgagctcccagtcaccgtcgacgtcatgcgggagcgcgcggagtttttgggttccctcgggctcacccaggaggacctcgctgcctaccctctcgctctcggctgcagcgtgcgcaagaacatggtccccgtcctcgactacctcggcaagctaggcgtacgccgcgatgcgctcccggacctgctgagacggtacccgcaggtactacacgccagcgtcgtcgtcgaccttgcccccgtcgtcaagtacctccagggtatggacgtgaggcccactgacgtgccgcgcgtgctcgagcgctacccggagctcctcggattcaagctcgagggcaccatgagcacttccgtcgcctacctcgtcggcattggagtggggaggcgtcaggtaggcagcgtcatcacccgttttccagaggtgcttggcatgcgcgtggggaagataataaagcctttcgtcgaacaccttgagggcatcgggctgcagaggttagctattgcaagaataatagagaagaagccatatgtgcttggatttgggctacaggagaaggtgaagcctaacattgaggctcttgtggacattggagtgaggaaggaggccctagcatccattgtgatgcagtaccccgacgttcttggacttgaactgagggacaagcttgttgcacaacagagcttatttgagtcgagcatattggttagtcgtgaagattttgggagagtgctggagaggatgccgcaagccattagtcttggacgagctgcggttctgaagcatgttaatttcctcacagcttgtggatttatgctatctcaagtgagcaaaatggttgtggcatgcccccaactgcttgcactaaatatagatataatgaggatgaattttgaatacttcaagaatgagatggagagggatttggaggagctggttgagtttcctgcattcttcacatatggcatcgagtcgactgtgaggcctcggcatgagatggtgtcccggaagggcctcacatgctcccttgcatggcttcttaactgttctgatgccaaatttgatgagcgcatgaagtatgatacaattggggttgaggaaatggagcgtgaggattcttctgacatgaatgcatctgtggatgaggtagagagtgaggagtatgaagacagtgattatggtgactctgatgatgagtttgttcgataatttatttcactagtcattagatttttaactttggagtatgtgcttggtacgcgaaatgtcaaattatagcttaatgatgcatttctcatcttccttactgatgtatcccctcagttccaaattataagaggttttggcttttccagatatatagtcttaatcatttaaatatacattatgtctaaatgtatagtaaaaataatgtaagtagaaaagtcaaaatgtcttataatttgaaatagaggaagtacttgtcaattctatgccaaaacactacgggcaactaacactagtgtgtgtatcccttcatgacagacaactagcactagatatatagttataacttttaagcacttagatatacactatctagatatatagtaaaaacgatctaagtaaaaaagtcaaaatgtcttacaatttgaaacagtgtcaattctatgcaaaacacatgtgaaaccatctttttcatgcatgcccagaggttgataacacgagaccagtggactgaagattagaggtgctgactggtttccatattgtattgaaaacacaagctaatgaatcttcttacgtgaatgcatttgtggaggactggagggtgtagagagtgcagaggatgaaggcgtttatgatgattctgatcatggttttgttcaatggtttgtttaatcgtatcaagttcttttgttgaattagagtgtagagcataagaaaagtgttttttgttagtgttgctgtagttctggctgtgtctgatgcatcacagagttctatagcaatgcaagaacattttaaccgatcctatgtatctgtatatgacctattgccattaccatgattttctgctattatgaaatatgaattgctaaaatgtatgagagtccatttaatttagttttttttttcacatgggaagcatgtatttaattctgtgagttactataactagtgtgcaccgtttccacattgttgcatgggagtcattattacatgccaaatatcatggtagaactagtagtttctgactgatgtgatgtttggcatgtggtgcggtgaagctgattctctgttgaactaggcgtcatagtttttgctgagttcatttggttgtctgatttcgcaggtaccctggaacgggtgagttctacaagttctttgaggagagcatttataagggcttgttcagtttcatcagaatccatatccatatggattggaggggattgagtgagttttaatccatagcaagtcaaaattcttcataattttttccaatcccttccaatccatgagatataggaataaccgaacaaaaatgtgccggatgtggaactcccttatacaaatcatcgacaaagttcaactcaggtgtggctggccagcattctatgagggacttcctggggccataaaggcagacgccagacgaccctgatgggagccggacagagatcacatgtactgcccgtggaggacacttggggctcatattcaaaggggaggggtttaaaacgcctgccaacgagcgacactgtgttaatagcatttcgctcaagtttattccgtcccccaaggaagcctgactgcagatgagctctaatctggaactcaacaacagaataaatttggacttttgtttgttgcttccatgtgagagttatgagatgggatttgtcattcctctgaccattttgaatatgctgtaacaaattttcaatcgcaagtgctggtctttgttgataaaattattgtaccgcagtcttagaagaataggccatgtatctgctcatacaacaaatcaaataccatcataaagtcatcgcatctgcaaatacatgttatcaaactagtcagttgtctgtgtattgcca

SEQ ID NO: 3200 - DNA, 489 bp, Zea Mays
acctcctgggcgacacctaaaggatcacacaattgggagcagaacccaagcaactagccttctctgctgcccttggtatcacgattgggatctttccgaaatattaggagcacctaaaggatcaactacgataaatgttttcagtgagtgtaccaaggccgaatcgtttcttccatttggttctggaagtcgagcatgtgttgggcagaagtttgttgttcttgcaatatcgatgttgattgccagtctgctccgcagctatgagagacacatacactgcttaaagatatgcgtctgagaacatcattgcatcatgccactgggcatacaagggtgttgaggaagactcaaccctagaaggtactactaatactagcaattacttttttaattaatgcctacattcctgttatgtagtatgcacatcggatttgtattgttgtcgtactattgatgcatgattttaacttgagggggcaagaatatgct

SEQ ID NO: 3201 - DNA, 1795 bp, Zea Mays
ctacttttgctagttcgcggtcggaagaagccatagccatccaggaagaagaagccatagcaaaagcagctgaggggggattagagaagaacagcagcgcatcagatagggagaattgaagctgatcttttgtatcatatatctttcctgcatgcttcatcagtccgacacttgagagaggttcgagagagaagttattaagctgcctccacactggtagcaagtgattgcatgcatgggggataggacatggcagcagccacatgcgcaggcttcttccccagacgcagggaccaaggtccaagcttcatcatcgtccgtccatggcaacatcatcagaaaggagccagctggaggcggcggatacgacgacatggccgagttcgatcaagcgctcttcctctatcttaacagcagccaggatcaagcatcagttattcaagatcaacctcaaactctcaacatcttcccttctgaaccaatgcatgtcgtcgagcctgctgcaccaaaggaatctatgggggctacgactaacaacacggcgtggaacaacgccggcgcaggcccatccaagcagccgccatccaaccttccgtcgaggacgacggcgactccggcagggccgcgaaaggacggcagcaaaccgccggcagccgtcaagagagaagggagcagcagcggtggcgccatgggaagcggcacaccgtcgacgtcgaaccaacaggagggccccaccaggacctcagacgccaagacgctgagaaggctcgcgcagaacagggaggcggcacggaaaagcaggctcagaaagaaggcgtacattcagaacctagagacaagcagggttaggctggcccatctggaacaagaggtacacagatcaagaactcagggagcagtatttggtggtggaggtctatctggttccaatggcggactgctaagcccagaggcggcatggttcgacatggagcacgcgaggtggcaggaggagcacggcaaggtgatgcgccacctgcgggcggcgctggaggcggagtacgccgcgacggcgacgacgccagcggcggcggcggcggacgcgcagctccggcagctggtggacgcggcggcggcgcaccacggtgcgctggcggagctgaaggccgtggcggcgagcgccgacgcgttccacctcgtgtccggggcgtgggtgtccgccgccgagcgctgcttcctctggatcggcggcttccgcccttcagagctcatcaagatagcggcccggcacgcggagcccctgacggagcagcaggcgatgagcgtctgcggtgtgcagcagtgggcgagggacgcggaggcggcgttggaccacgagctgcaagcgatgcacagctccgtgtcggaggccatctcctccgacgcggcggcgctgctctacccctactccgacgtgcccggcttcatggccaccatgtccctcgccatcagcaagctcgcctccctcgaagccttcgtcagacaagcggacgcgcttaggctgcagacgctgcaccggctgccgcagatcctgacggcgcggcagtcagcgcggtgcttcctcgccatcgccgactactcccaccgcctccgcgcgctcagcgaactctggcacacccggcaaggacatgagcgagcggcgagcacccaggcggccaggcccagccagacaccgccctaccaaagtagagacggtttactatagacgttacaaagtagagatagtttcaaagatacagatagaggtgatcactgatcaggaattctgatgacccat

SEQ ID NO: 3202 - DNA, 2396 bp, Zea Mays
atcacaatgccacgccggatgccaagtctctcaaatctggaatcctttcacgccgccactctcccctttttccttctctcttcgtcgttgtggctcctgccttcctgcctcggcgcatcgactcgcggagagggacagcacagcgcctcctccccatcctttctccattcccagatcgaaggtccatacctgaaattcgagagatgtaggaagtttagaacacgagtcagaaaaaaccatccttttgcatctgattgagcactgtctttgtgcaagagaacaatttagttgtacatacaaacaaaaagaagtgggagtatttttcagagtttattagaagagactgtttcgaggacccaggtcagagaaaggcgagaagctttagcagcggcaatggtctggtcaatggacccgcaggtgaccgtccacggcgactgggtgtcagccgtggtgccgctgatgaagctgctgtgcctggcggtgatcggcctgctcctcgccaacccgcgggtccaggtcgtgcccagggccaccttcaagctcctgagcaagctcgtcttcgcgctcttcctcccctgcctcatcttcgtccacctcggcaagtcggtcaccatagacaacgtcctgcactggtggttcatccccgtcaacgtgctcatcagcactgccatcgggtgcgcccttgggtacatcgtggccctgatctgccgcccgccgccgcacctgttccggtttacggtgatcatgaccgggttcggtaacacggggaacctcccgatcgcgatcatcgggtcagtctgccacaccaacgaccaccccttcggccctgggtgcgacaccatgggcatcgcctatgtctcgttcgcgcagtgggttgcggtcattcttgtgtacactctggtctaccacatgatggagccaccgatgcagttctacgagatcgtcggggaagggaatgagatacagcaggaacccgagctggtcagcaactacagtaggtccctgcttcatgaggcggagtggccagggatggtcgacaaggaaactgagcattcgaagacaccgttcatcgcgagagttttcatgagcatttcaggttcctcacagaacacgttccctgacatcgatttcaccgaagaaggaacttctgcagctggaccaagcagtcctaagtcgctccgatgtctggcagagccaagagtggtcaggaggattagggttgtcgccgagaagactccgatccagcacgtccttcagcccccgacgatcgcctctttgcttgccattaccatcggcatggttcctgtcctgaaagattttgttttcggggctgatgcgccgctctcgttcttcaccgacagtttggagatcctagccgctgctgtggttccgtcggtgatgttgattctcggaggcatgctcgcggaaggcccaaaagacaacgccttgggcatgaggactatcatcggtatcattgtggccaggctcttggttctcccatgcattggcatcggtgttgtgaccctggcagacaggttgcatctgctcgtggaggaaaaccatatgtaccgctttgtgctctccctgcagtactccaccccgagtgctatcctgcttggagcgatcgccagtctcagaggctatggcgtcaaggaagcatccgcccttctgttctggcagcatatttgtgcggtgttctctctttcactctacctggttgtatacttcaagttgttttctttcatatgaagacaatggccatccatccatccatccatccagttctggcatatatacgtagctatcaagtaggatgctagaagaatgggttttcggcatcggctcctatcagtcagaagtgtttataattcggtagttatttaagtttcagttgtgtgtgttgtttgtgaacaggagatacagacagttattgtctgttcatttcggtcgatatattgatgtgtattttcatgatgctattgttgtatgcaaatcattacctggataaaattagtagaccaggatagactgatagtagtgaataacatggttgcctgatggtcaatatatgaagatgatcagtgttcagtcttctcgtggaagacccaaatcaggcgaccttgctacatgacatcaaggatgtgattcatttgtgtcaattgactttcagcattcctcctagactgtgcattcagatggattacccctttgccccgaaggagcaaataaccatttgctttggcatgggaaattctctctgtatgttcttttgattgaaggtttgggctgaggctatctttaaggctgtctcgtcgtcagagtgaagtttgaaataaaagatgagataaaagatagtatgagtaaactgctagagatagcctaacaatttatatgga

SEQ ID NO: 3203 - DNA, 3223 bp, Zea Mays
ggcgatcgcgcttgatttttagcgctctcctgtgagcctccggctgcggcgtcgcagagatgggctgtgccccggtggtgtgggccgcggtgtggttgcttgctgccgcggtggcagggttcgccgatcccggcggcctcgagcgcgcgtttccaatagtgaagccagactacgggcacacgaaactccaactcgcaaaagaaggtctggaagcaattcagaggatcagaactccaatagctgctgtttctgttattggcccctatcggtcgggcaaatcttttcttctcaaccaacttctctccctatcatgtgacaatggttttggagttggacacatgcgggatacaaaaacaaaaggtatatgggtatggggttcccccgttgaggtggatatcggtggctccaaggtgtctgttctatacctggacaccgaaggatttgagagtgttggaaaatcaaatgtatatgatgataggatatttgctctggcaactgttttaagttctgttctgatctacaatcttcctgaaacaattcgtgaagccgatatatcgagactttcatttgccgtcgaaattgctgaagaattctatggaagagtcaaggggcaagatgttgcttttgagccagccaaacttctgtggttgatccagagggattttctccaaggaaaatcggttcagcagatggttgatgaagctctccaacgggtacctaacaacaatggagacacaaatattgacgagctcaaccaaatcagagactctttggcggttatgggagataacagtacagcttttagcttaccacagcctcatctgcaaaggacaaagttatgtgatatggaggaccaggaacttgatccgttgtatgtaaagaagagggatcagttgaaagaagtcgttgcatccatgataaaaccaaaaattgtgcagggtagaactctgaatggaacagagtttgtatccttcctagggcagatagttgatgctttgaataaaggtgaaattccatcagccgggtcgctggttgaaattttcaataaggccattcttgaacgttgcttgaaggtgtacagtgaaataatgggcagagcaggtctaccagtgtcagtggatgaacttcgggagttccacgacctggcaaaagatgaagctagaaggcttttcaacaagcagcatttcggtgtacagaaacttgggccaagctaacgagtatcagtcatcaaagctgtgcgaagcacggttctcagagtgcgaagataaaatggaacgactccaagtcttgaagcttccgtccatggcgaaatttgatgccggattccttctctgcaatcgaagttttgaaacggactgtgtggggccagccaaggaaagctatcgacaccggatgtcaaagatgctggcaaggtcccgtgctcttttcatcaaggagtacaacaacaagctcttcaactggctcgccatattctccctggccatggttgtcgttgggcgcttcttggtcaagttcttcctgctcgaagttgctgcgtgggtgatgtttgccttcctagagacatacacgaggctgttctggtcgtcggagtccctgtactacaaccccgcctggcacgcgatcgtctcttcttgggaaaccgtcgtctacagccccgttcttgatcttgacagatgggcgttcccgatctgcgctgtcctgttgtttttggcgttttattggcgttgcctcggtggaaggaggggaattgcccggtcactgctacctctgtacaacggggcttattacagaagctccagtcgcacaagaacagactgatccctcgaaccatgcgcacaatcacaccattagcgtgcacatatagttgtatcatgcttattccaacactgcattcttcgattatgagtcaaaactcgggtgttgctgtaaatatgaaacccagaaggtttgtcaattgtataaatatatggctgcttgctaaacttcttggatttatttgtttgtttatttattaagctctgatcctctggggtttgtctccgtagtgtcaagcccattgaatggcgtagctgctgtagttggtctgcttgtcggcgtagcggtcccagatcatgatcccggcgtagctgggcgccttctgcaccaccgggaggacgccgtagtacaggttcttggggtgcacgtacccgaccgtccgctccgacgccggcaggccgacgtagagcccggagcccgggtacgccgcggcccacttgtcccactcctgctgccagtacgcggcgcagcgcgcgtcgccgtagagcctgacgttgacgcgggtaacgagccccgtggcgagcagccgcagcgccggcccgtccggcgggaacgcgcaccgcggcgtcgccgacagctgcacgggcgtgcgggcgcggaactgccggttgtagctccacaggcgcgcggccagcgcgtcgaggtggtccggcggcgggcggccgccgcggtcgaggaagaagtcgaggccgtcgacgtacgcgtcgccgaacgggcggcgcacgccggcgcgcggcgccggcgccgggaagtaggcgtaccagaggtagtcggcgaggtccgcggcggcctcggcgctcggcagggagtgctgccggccgccgagggagaggaacaccatgatgctcttcgactggcagtgcttgatgtcggcgccgatgccggcgacggggtggcccgagaggtccaggctcggcgggctgttgccggggccggccgagacgttgaggaaggagatgacgacgatggtgtacgtgcccgtgtcgcaggcctctcggagcgtgccctcggccttgttccggccccagaagacagtcacctgcccggtcttccccgcggccgcggccgggccggcgaggaagagggagccagcgacggccacaagggccgccaggggcagtagagtggttgctggtctattacttgcgaccgccattggtgtctcgttggttaattgctgctaccactactcgtcactactcttgcgtgtgcgtgtagcagcagtcacccatcacccattatatgcctttcatttggtgttcgtcttagacttgtcttgttttggatcgaatcgggaaagaggaggacagctcaccgagctagaaggacgtggacgtggtacatagcatggcggcgaatcgactatgcatgctgttgtgtttgaccgacgcacgacgcagtgtctcgt

SEQ ID NO: 3204 - DNA, 1855 bp, Zea Mays
ccaccgcgctcgccctcttcgtcgttgccgtccgtctccacagtccccacccatattccattttggttatcctcttgcgtcacacctcctccctcctggcctcctcctgcggcccacttatatataccaccacgtcgatgcgctgctccgccggcatctccatcgccgtcgcgccgccgtagatggcctgacatttttcacttcatttgtcatcccaattccacaaacctcgcgcgcggcggcggagggaaacaaaaaaaaaaaggaaggatggcgttggagccggtggcgcgggcggtggcggaggaggtggcgcgctggggcgcgatgcgccagaccggggtcagcttgcgctacatgatggagttcggggtgcgccccacggagcggaccctcctgctcgccgcacagttcctgcacaaggagctccccatccgcatcgcgcgacgggcgctcgacctcgactcgctccccttcggcctctccaccaagcccgccatcctcaaggtgagagattggtatgtggagtcattccgtgacatccggtccttcccagaggtgaagaaccaggaagatgaactcgccttcacccagatgatcaaaatgatcaaggtgcggcacaccaatgtggtgcctgcggttgcattgggtgtgcagcagctgaagaaggacttgggtggtccaaaggcgttcccacctggaatccatgagatccatcagttccttgatcgcttctacatgtcaaggattgggatccggatgctgatagggcagcacgtcgctttgcatgaccctgatccagagcctggtgtgatagggcttataaacacaaaaatgtcacccatgacagtagctcgaattgctagtgaagatgcacgtgctatttgcatgcgggagtatggatcatctcctaatgtcgacatatatggtgatccggggtttacattcccatatgttacaccacatctacatctcatgatttttgagctggtgaagaactcccttcgcgcagtacaggaacggtatatggattctgataagcttgcacctccggttcgaatcatagttgctgatggagcagaggacgtgactattaagccaaaggagtaaaagagatttaagggaagttcactctatttatttcttgctggcctgaggagacaagacccgtattaatagtcatccagcaatgtcagctgactttttttttcttctggttacagccaaatgcaactagcagaaatgtaaataaacgccctttatgatgctaacagatagccaatccaactaactggctaacgccttttgttagaattttctcattaattgtgatattcaaccgacaaacttgtatcttctgcacctatgttagcaaaaatcaatagcttcgattattcatgatctggtatgaagtatgaactgtttgactaaaccatacttttgcagattactgatgaaggtggtggaataccaaggagtggtctctcaagaatttttacgtatctctatagtacagcagaaaaccctcctgatcttgatgtacataatgaaggagtaactatggctggatatggttatgggattcctattagtcgtctttatgctcgatatttcggcggggacttgcagatcatctctatggaaggatatggaactgatgcatacctccacttatcacggctgggagattcggaggaacccttgacttaatcgattcataagaagccattcctcattcctgtagttaggactctattgctttctcaattaccgtgctggtgtcacaccaataagcgaaggcagtggagacgccttcggcgtggcgggtctggagccgacgacggcatgacttggg

SEQ ID NO: 3205 - DNA, 1875 bp, Zea Mays
ccaccgcgctcgccctcttcgtcgttgccgtccgtctccacagtccccacccatattccattttggttatcctcttgcgtcacacctcctccctcctggcctcctcctgcggcccacttatatataccaccacgtcgatgcgctgctccgccggcatctccatcgccgtcgcgccgccgtagatggcctgacatttttcacttcatttgtcatcccaattccacaaacctcgcgcgcggcggcggagggaaacaaaaaaaaaaaggaaggatggcgttggagccggtggcgcgggcggtggcggaggaggtggcgcgctggggcgcgatgcgccagaccggggtcagcttgcgctacatgatggagttcggggtgcgccccacggagcggaccctcctgctcgccgcacagttcctgcacaaggagctccccatccgcatcgcgcgacgggcgctcgacctcgactcgctccccttcggcctctccaccaagcccgccatcctcaaggtgagagattggtatgtggagtcattccgtgacatccggtccttcccagaggtgaagaaccaggaagatgaactcgccttcacccagatgatcaaaatgatcaaggtgcggcacaccaatgtggtgcctgcggttgcattgggtgtgcagcagctgaagaaggacttgggtggtccaaaggcgttcccacctggaatccatgagatccatcagttccttgatcgcttctacatgtcaaggattgggatccggatgctgatagatatgttacaccacatctacatctcatgatttttgagctggtgaagaactcccttcgcgcagtacaggaacggtatatggattctgataagcttgcacctccggttcgaatcatagttgctgatggagcagaggacgtgactattaagccaaaggagtaaaagagatttaagggaagttcactctatttatttcttgctggcctgaggagacaagacccgtattaatagtcatccagcaatgtcagctgactttttttttcttctggttacagccaaatgcaactagcagaaatgtaaataaacgccctttatgatgctaacagatagccaatccaactaactggctaacgccttttgttagaattttctcattaattgtgatattcaaccgacaaacttgtatcttctgcacctatgttagcaaaaatcaatagcttcgattattcatgatctggtatgaagtatgaactgtttgactaaaccatacttttgcagattactgatgaaggtggtggaataccaaggagtggtctctcaagaatttttacgtatctctatagtacagcagaaaaccctcctgatcttgatgtacataatgaaggagtaactatggctggatatggttatgggattcctattagtcgtctttatgctcgatatttcggcggggacttgcagatcatctctatggaaggatatggaactgatgcatacctccacttatcacggctgggagattcggaggaacccttgacttaatcgattcataagaagccattcctcattcctgtagttaggactctattgctttctcaattaccgtgctggtatgcaaatattgttctgaaggccagtcacctattagttcagctgtccatgccctatttgttatctttgttgttcattcatcatctcgatggaatgtgatcataattcagaatagttttgcttctggtttgtactgtcattataattgttcaacctccaataatggtatctgtcgagcacccgaggcattgaatttgagtaatggaattcaccataattgttcaacctccaataaagtctgtaactccaattcttcaaagcatgttttttagttcga

SEQ ID NO: 3206 - DNA, 316 bp, Zea Mays
acacgacatccaaatcgaagaacacgtcgctgacacaccacctctccctcgccgcattctccactctctggtcttcgccgtggtcggtgccttccaaatccaaaaaaccccaagccctagctgtagccgtcccccaaggtcgccgagatgtcttcgtggctgcgcagcgcggtgagccgggcagtggaggccggcggccgcagcggcgtcgcccgcgcggtcaaggggtacgccgataccgtcgcgcaccacgccggtcaggccgtcgcggacatcctccacgaccgcatggtctgggacgcgaatcggacatgct

SEQ ID NO: 3207 - DNA, 3457 bp, Zea Mays
ctatgcatccactcgcctgaactgaacgtggtccctctcctctgtcctccgcgatggtggtccccagctcggcaaatgttgtccccggggcggcagcgccggcggcctgaagcgcgacgactaggacggcagcggcaatctttagcgctgtcggcggcgggatactcgctgcgcgccacgcgctgacatggacgagcccccgtgcccgcccccgcggcccgcgctcaactccgccgccgcgacgtcatggccggagctgctcgcgccgttcgacctctcccgcctccgcgccacgctgtcctcgcacccgctcaccccgcgccgcctggcccgcctcctcgcgctcccgctcgcgccggccacctccctgctcctcctcgactggtacgcgtcgtcccacccggcgctctcgctctcgtccctcccgctccgccccatcctcgcggcagccgaccccgaccgcgcgctcgcgctcctcgactccctgccggcctcccgcctgcccccgctccgcgagtccctcctgctcccgctgctccgctccctgccacccggccgcgcgctccacctgctcgaccagatgccccgccgcttcgccgtctccccctccttccgctcctacaacgtcgtcctctccacgctcgccagggccgactgccacgccgacgccctgctcctgtaccgccggatgctcagggaccgcgtgccgcccaccaccttcaccttcggtgtcgccgcgcgcgcgctctgccgcctcggccgcgccggcgacgcgctcgcgctgctccgcgggatggcgcgccacggatgcgtgcctgatgcggttctctaccagactgtcatccacgccctggtcgcgcagggcggggtcgccgaggccgcgatgctcctcgacgagatgttactcatggggtgtgcggcggacgtgaacaccttcaacgacctggtgctcgggctgtgcgggctcgggcgcgtgcgagaggcagccaggctggtggacaggatgatgacgcagggatgcatgccaagtgtggtgacatatgggttcctcctgcaagggctgtgccgaacaaggcaggcggacgaggcgtgcgccatgctcgggaggttgccggaggtgaacgtggtgatgcttaacacggtgatccgtggatgtctgacggaggggaagctggccagggcaacagagttgtatgagatgatgggttcaaaaggatgcccgcctgatgtgcacacatacagtattttgatgcatggcctttgcaagcttgggagatttggttcagcagtgcggatgcttgatgagatggaggagaagggttgtgcaccaaatatcgtgacctactctaccttgctgcattcattttgcaggaatggcatgtgggatgacgcaagagcaatgctggatcagatgttagccaagggctttagtatgaactcccaaggatacaatggtatcatatatgccttatgcaaggatggcaagcttgatcaagcgacaaggcttgtccaagagatgaagagtcaggggtgcaagcctgatatttgcacgtacaatacaatgatttatcatctgtgcaacaatgacctgatggaggaggcagaacatattttcagaaacttaattgaagagggtgttgttgccaatggaataacttataatactctcattcatgcacttctgcgcaacggaaggtggcaggagggcctaaggcttgcaagtgaaatgctacttcatggttgccagctagatgttattagctacaatggcctgattaaagccctctgcaaagaggggaatgttgatcggagtatggcgttgcttgaggaaatggtgacaaagggaattaagccaaataatttctcgtataacatgctgatcaatgaactctgcaaggcgggaaaggtacgtgatgcactggagctctcaaaggagatgctgaatcaaggactgacacctgacattgtgacttacaatacactcataaatgggttatgcaaagtgggatggacacatgctgctttaaatcttttagagaagctacccaacgaaaatgtgcatcctgacattgtgacatacaacattctcattagttggcactgcaaagtcagattgcttgatgatgccgctatgcttctagacaaagcaataagtggaggaatagttcctaatgagcgaacgtggggaatgatggtgcaaaattttgtcagacagacagtcaatctcgagggttactaaaaggatttattgtatatgttgtatgtcatatcagaagggagcctggtgcagtggtgagagttgtctcaccgagtcacctgatcgcaggttcgaagcagtctctttgcattcgcaggaggaaagcttactttggtttatcccttcctcaaacatcactcatttgggagcctccggcacttggtctgtctctttgtgtgccatactggttttgggactccgcagctcgatatgcttttagatcaatatgggcacatcttaacttccagcatactgcctgccgtgcatgtcgtcatgtcgatctgtggcagtgaactatcaagtaagtagttgaatatacctatgaagcatggaccagagtctccctggggtggttggcactagtcgtgaacttgcgatgctgctgtctgtggtcagcgtttccacggcacttaagggtcaacatttaaggaacactccgtcgtgctgaacccaagcactttgattgatggaatgctgaaaaaaaaagcatgcgtgtggcccatgaaagcatggcaaggcctcccagaggttgagaacgtgtctccagaaactctgtatcatcttggtacactgatcgatcttggttgaatctaatcttctgttaccgaaaaattctgcggctgtcgggctcgaatctgtagacggctctggcaaggaggagtcccgttgctggtttggataattttctgttgggcgatcgatgaatgctgtctgctgccgcctgttgagtgcttgtggagtagcaccgtggtgtgggaaaggccgaggcaagtacctgggtggtagtagcacggccatggtgtgcgtgcctgcgtgcgctacacccacgccgctggccccacggctggctgatggcacggaccgtataccttgttgtctcggtcaaaatggatgtactaccaccaccgctcgtgcgcactgctactgtgctacctgttccccgtcccccgatgcttctccagtggtccatctgctgctccgcttaccaggtggaaaaaatcactggtggtaaaacaataagggcacaacaaacgatggactcaagaatataagaaatacatagggtatgatgataatgtgtaaaccattcatttttacacaaacagttacgatgattttttttttaaaaaaaacaacatttctattatacattaacttttcaaatgaccctttaaactcgtctaatatatttttaaatat

SEQ ID NO: 3208 - DNA, 1159 bp, Zea Mays
aatggacttctctctcccgccccttctctcttcgtgatgctcctctgcttgccttgccctggtgtggtggtgtctagtcaagtacgcttccgaattaaaagcgctctggcctgcaacctgctgtctgctccgtcctcccacggccggccgcctgcccgcgtcttcttcgccacccctcttctccggtcccgcacctgcatttcttgaccccttcctccaccgcagccaaacaatgtctccggcgccgagttcgcatcactcgcagatcaattcgaggaaggagaagcggatgaggaaggtggacaccttcgcgccgcacaacgatggccaccaatggaggaagtacggcgagaaaaagatcaacaacaccaacttccccagcgaagaacccggcttttattagccagcctcctttgacttgaatgtttggttcttgtcccgctgcaggtattactacagatgcacgtacaaggacaacatgaactgcccggccacgaagcaggtgcagcagaaggaccacagcgacccgccattgtacgcggtcacgtactacaacgaccactcgtgcaacagcgcgttcctcccgctctccccctccgagttccagctgcagacctcgtccgggaaggccgtctccatctgcttcgactcctcgtccgggacggcggcggcggcggccgccaccaccaatgccagcggcggctcgccctcttccagcgcggcggcggcggcggcgcggcgaggcacgccgccggaagtcagcaacccgcccgtgctgcggcggtctgagacgtacccgtggggcgccggcgccgtggagcagaagccggcgtcctgcagcaccgagtaccacgacgccttctcggctggcgccgccgccgtgccggaggaggtggtagatgcaggcagatttggatctatcaggttcttccattttttgtaaattgatcactcagtggaaggaaggcaattgatgcctttacttcgacaaactaatatgatacagtcatacagatgtcttcttttcttccttcttctttttattccttcattacatgccgaagcttactacatattcgcatgttacttttgttttcttgattcgaaatcgaaataccaatgctaattttaatccaacacttcgtttctgcaatggctt

SEQ ID NO: 3209 - DNA, 1699 bp, Zea Mays
agaccgacatgttactttaccctaaacctttgcagtttgcactgccaccgcgaaggcacacagccgccgtttcttttacttgcgctcggcacgcaggcgacggctgcggcgctcaggttggggttctcatcgacggcgtcagcggcttcccctcccgcctctcgccagtcgcttcgcgccctcgcctccggtcctccgcacactggccggtgaccctgcatagtattatctgattttcctggaggccacattttaaggactgaggttacaatggcagatgccagccctagaacagaaacatcaacagatgatactgacgacaataacgggcttgaaccaggcagaggtggtcttgttgcttctgactccagtgacagatccaaagacaaacatggagatcaaaagacattgcgtcgccttgctcaaaatcgtgaggctgcaaggaagagccgactaaggaagaaggcatatgttcaacagttggagaatagcaggctaaaacttacccaactagagcaagagctgcaaagagctcgtcagcagttgatcagtcacactccatgagtggaaatggggcattggcctttgatatggagtatgcgaggtggttggaagagcacaatcggcaaattagtgaactaagggctggtgtcagtgctcatgcaagtgatactgatcttcgaagtgttgttgataagatcatgtcacactatgatgagatttttaggctcaaaggcaatgcagccaaggcagatgtttttcacgtcttatctggcatgtggaagacaccggcggagaggtgttttttgtggctaggaggtttccgaccatctgaggttttaaagcttctttcgacacaacttgaacctctcaccgaacagcagctgtcagggataagcaaccttcagcaatcttcacagcaggctgaggatgctctttcacaaggaatggaggcccttcagcaatcattggccgaaaccttggctgggtctctttcgtcttctggatcaacaggaaatgtggcaaactacatgggtcaaatggccatggctatgggaaaacttggaacgcttgagaatttccttcgtcaggctgacaacctgcggctgcagactctacaacagatgcaaaggatcctgaccactagacagtcagctcgggcgctacttgtgataagtgattactcttcacgtctccgtgccctaagctctctctggcttgctcggcccaaggaatagcaagaacatgctatttgactgcaatacttttcacaatttggttttcaatggtcaggagatttgacaaggctgcgacagacttgattcggacatatctgcacatactatgacccaaatggaaggggatgttcatgtagcttaggctgcttagctttgtagttaagtgttgttgatgtatcattaccaactgctgtaaaattctcactctgtatgcccctgatttgcagcgaaccattagaatgcacattgatgttcacctgtcgattttttttgttcactcttaggaacacataatgctctgcccagtatcatctaaccagggtatatggctgattcaccgcactaaaacttgcatagttgatcattcagcattgctgccattgtcgttttgtatgttttccctcgtcatgcgtgagggggaaccgcaccatttactttgttaatataatatttgttggttt

SEQ ID NO: 3210 - DNA, 1324 bp, Zea Mays
gtgcgcgtaaatataaccccgcaacaagtgggacgccgcttctgctcctccgtcgtccgctcctctcctctcccccacccgtcgtctccttgtcgtccttgcctgcggattggggcggcacggcagtcggcacagcctctcgcttctcccgcgcgcgagccctttctccacggccgcggcatgacgttgccggaggcgaatgccggtgcgacgccgcagaggaagaagtgctgcctgcctggatggggattaattagctccagcggagcgccgtgtgccgggcagcggcgcccgtgtatgacgactcactggacaaggacccgcgtctccggattttggcgcggcaggagctgcgggatttgggggatctggatttcgtgcggggtttaattttttttgaccctgagttgcttgctccctccctgcgccggagaatatgcctcttctcctgggatgggatttgcatttaccatactgattttcttgccttcttaggaggacaaccccctcccctcgtcttatccgaatcctcggaggagccacctttaaagctaggttttcagtttcaaatccccacccctcaaaaatcacgccatcgttgtaagcgggagcgctgaattctttctttagtaggaatattaagtacctcgcgacgggacgggtggtcgaggagtcgtcctggtaaacgcgggtattggattcggctgacttgaactcgccagagatggagttcttcagcgagtacggcgatgccaacagatacaagatccaggagatcattggcaaagggagctatggggtcgtctgttcggctattgaccaacatacgggcgagaaggtagccatcaagaagatacagaacatcttcgagcacctgtcggacgctgccaggatcctccgcgagatcaagcttctccggctgctgaggcaccccgatatcgtcgagatcaaacatgttatgctgcccccgtcgaggagggactatagagatatttatgttgtgtttgagctgatggataccgaccttcaccaagttattaaggctaacgatgacttgacgaaggaacaccatcagttctttctctatcagatgctgcgtgcattgaaatatattcatactggtatgcacctctaaaagattccttattttagcctgaaaggtctcctgactagcattgacagactgatgtgctgcttttctgttttcaattaggagtatgaacggttctgattagcatttgcacatgagttcaactctagtggctgagtgctaaccaatcctaatgacttactttcatgtgtgtattactctcgatcattcctt

SEQ ID NO: 3211 - DNA, 849 bp, Zea Mays
agaacgtgtcgtgggtatggtctccaggtatggtgcttggtcatgggagcttttttttgtacgtgtctccaggtctccagggctgttacgtgtgcattgtcattggtttctgtgagggagggggtcattgcttgtcatcatctcattgtcaactgaagcctgttttatgaatcttcgaagattggtgttcagaaaaagacaaaaaaatgcaaattgcacatgaatcgagcggggaaatgtcgtttggatggggacgtcagccagctttcttgggaacatttagcaagaggcttaacaggtgtttcaatgatgctacaaatggggttccaggtgatggttggtctctaatgagcaatgatggtgctgaggatgttcctattgttgtcgactctttctccaaacaaacttattggtgctcatgtcaactcctcccagatgttttttgactgttgaaggtggtctcctgcgtgttaaggtataaattggatgaacttgcggaactgatccaagctgagcggacagagatcccggccgccactgatgatgcctgagttgaagaagagcagagggattcgtcgtcctggaattggaacagaaccgctctgtgctctgtcagtgtcatgaattaattaagagctccgcgtctgaaaattattgcagtatatatatcctgggctgggacgcatgcataccaagcgcgccggcctgttgtagcagcttcgctttatactgtgcgtagaagttgatctgtgtaggaatataaaataatccagtggccaccaggcggacaggaacagcttgttgctccataacaccatgattattagctaccttgctttcaagcgtttc

SEQ ID NO: 3212 - DNA, 2328 bp, Zea Mays
gctcactgtttgatttttttggtactcaagcgtcgctcctgttcactttcctcagcccttccagaagctgagagattgagggcggagcgtgattttcgcggtgattttcctgctcccatatcgttggcggccggttgatagcgagttgtgctggagggggaggtgcctgtgacaggatctgtggttgctgtccgtgggcaacaagctgtgtcgaaggaggtcgaactcccaacgcgatgtgtggtggcggggatagttcaatgacgttttcagttccaacctgtagcgatggtgctccagctcgtgttgacacggtcgatctggtatcgcacctcttcactttccccatccccttatggaaggcgtgagatagagtgtcgaacggagcttcccacgacgatgctgctgtttgccggcgagctctcccccctacccatttcttctactcctttagagctgcctacagagagaaggtgctaattgaagcagagaaacagtttcaggacgatttcaattttttgaaggaaaaggtattagttgattttggccaattagtggatgtccaacgtattgacagtatttgccaagttatgtgcgacaagttcaagggttgttgttcggtttgcaagacaatgtgtattgaagctatagtcgattctgtgaaaattatggttgaagcaatgtctatcaagcatcaggagattttgaattccatgaaccctctagtgaaaactatggctgttaagcagatgagaaatacacccatactgatatcaatgtacaaccagctattgttaagtcggatgagaaagtcgttgttgcagactttgttgagtcatctgatgggaaaaggtcttggtgtgggtactagcaatcctctggtaacagtgcccatacatctgaacacatcaacacaccagtcgtttataggtcggatgcaaatactgcaacttctgtgaagcccccagcggaaaggcctaggaagttcgaagggataagtggcaaaaatcaagatgttattgttattgacgatcatgtgagagcggttcaggaggttcacaatgttgctggtgaaatggttggtgctagtttatatggcagtagaagatctaaatcaacagctatagttgaccaaatgtacaatgataggaatatattcaatgatccagaagctaggggaaatttgttgggatatcaactagaagtggcaaatttagtcaaaagtgatattcagtatattggtgaaaatcggttacaagcccaacatcctagtgtccctttaccatgttctgttgtacaattgcgatattattatatcctttgtggcatggggcgtagccaatggaaagattttgttgcagttcggttttcaaaaaccaccactataaattgggaatattttggactgtcaatagaacccaatggacattgcgacaacttttttattgctgggttctgccaaaaacattttgaagatgttcatccaaggatgtcaaagaaacatttcttttatcccaaagttgggaacgtgtcgtgggtatggtctccaggtatggtgcttggtcatgggagcttttttgtacgtctatatcattagttgagataacatgcaccgaatccacttcaacatgtaggctaagtgtttgcagactgcagagaccttagtcattaagaagtcctgatccttgtctcgctggctattgtttatataaagtcgaaatatattgttttatgaacctctcattatgttctatgatgcatttgtttttggttactgcaagggggacatgtatgttgactattttttctaaaactccatcccttgactgacctgaaatacagttgtgacctctgctttttttagggctgttacgtgtgcattgtcattggtttctgtgagggagggggtcataagtgcttgtcatcatctcattgtcaactgaagcctgttttatgaatcttcgaagattggtgttcagaaaaagacaaaaaaatgcaaattgcacatgaatcgagcggggaaatgtcgtttggatggggacgtcagccagctttcttgggaacatttagcaagaggcttaacaggtgtttcaatgatgctacaaatggggttccaggtgatggttggtctctaatgagcaatgatggtgctgaggatgttcctattgttgtcgactctttctccaaacaaacttattggtgctcatgtcaactcctcccagatgttttttgactgttgaaggtggtctcctgcgtgttaaggtcaattcaaggaaatatactgagttttggcaaaatttcagaagttgttgttacgttagttctaaa

SEQ ID NO: 3213 - DNA, 998 bp, Zea Mays
cactaagggaccaccttccatttccatttcagggtaccactaaacaatgggggttctctggtcatagaacagactgaagctctggtatcagttgatgtgaatggtggtcacagtatgtttggtcagggaacttcacaggagaaggctattttagaagttaatcttgaagctgcaaagcaagtccgaccaagcgttactttcatgatcagtgagccatgtacatgctgccatggtactggtcgtgtggaagctcttgacacatcgttttcaaagatcgaacgtgaaatatgtcgacgtcttgctgcctctcgacgaaaatcagaccctgagaaaccaaaatcatggccaaggtttctgcttagagtggatcatgagatgtgcacgtatttgacgtccggaaagaagacaaaactaggactcctgagtagctcccttaaagtgtggattttgttgaagattgccagaggtttctcccgtggcgcttttgaactgctaccgtactcggagaaggaaaactactctatggagaaagaaacatcagagttgccccaaaaagagtccaggcccaagctatctgtctttcctatcaagaagtggatgagccgggccaagcgtgctaagtgattctcttttattagcatggggccttcctttgtattcacaacttagaatgagtaaagattcaggaagaggatcattcttttcgttcatgaaatctcagcgtcggatatctagagatctctcgaccagcttttgtttacatttttttaggaattcagacaattccatgtttagtttaatccagaaaattttcagcaaaaatgtgacgatatatataactgtgcaaatctagtacccttaatagtagtagatctcttaaatggttcttagtgttaccataagatacataatatatttatcatgagaagactacgattactcttttaagttactacattgttatgctccttaggatttgcttatgaggttcctcgtga

SEQ ID NO: 3214 - DNA, 1003 bp, Zea Mays
acgcttggcagttggcaagcagcgagtggggggagacagccaactctctatcctcttcccccctcgtccatccccatcccaccgccttgctctcccctctccacttccagctgtccatggctgcagcagcgtgctcctctgcctcgccgctcctcctcccctcagggccgagacatgcgtcggcctccagggcgtggtttctcggcggcaggagcagggcgctgagatcagaggcgccgtgctgctgcaaggccgccgccgcccgtggaagcgctccgcaatgcgggacggtcggtggtggcagcagcagcacccggagggggctgctaggcgtggccctgggagcctctgccttggggctggccgcgtttgacgccgtcgccgccgggttgccgccggaggagaagcccaagctctgcgacgccgcctgcgaaggtgcctatggtaactacagaatccggactgcagtacaaggatatcaaagtgggcgaagggcctagcccacccgttggtttccaggttgcagcaaattatgttgctatggtgccaactgggcagatattcgacaggtgggattcggatagctgatgcctgacgtccagctagagatctgggattttatctctacttcgtttgcaaaacacaactcaactaattattgtcttcacaatcagcttgcagacttagaatctgttcctgtagaattttgttgtttattaggccttgggggatggaagccattctagttcttactgttcttcgctgctctgtgatgcagttcgctggagaaaggtcagccctacatattccgtgttggatcagggcaggtgatcaaggggcttgatgagggaattttgtcgatgaaggttggaggactacgtcggctgtacatacctgggccattagcgttcccctaagggtctttactttctgctcctgggaaggccaagagtacccccaaccagccctgtcgttgtcgacgtcaatttactgtacataccag

SEQ ID NO: 3215 - DNA, 1032 bp, Zea Mays
acgcttggcagttggcaagcagcgagtggggggagacagccaactctctatcctcttcccccctcgtccatccccatcccaccgccttgctctcccctctccacttccagctgtccatggctgcagcagcgtgctcctctgcctcgccgctcctcctcccctcagggccgagacatgcgtcggcctccagggcgtggtttctcggcggcaggagcagggcgctgagatcagaggcgccgtgctgctgcaaggccgccgccgcccgtggaagcgctccgcaatgcgggacggtcggtggtggcagcagcagcacccggagggggctgctaggcgtggccctgggagcctctgccttggggctggccgcgtttgacgccgtcgccgccgggttgccgccggaggagaagcccaagctctgcgacgccgcctgcgaaggcgagctcgaaaatgttggttgagcctccgtgcctatggtaactacagaatccggactgcagtacaaggatatcaaagtgggcgaagggcctagcccacccgttggtttccaggttgcagcaaattatgttgctatggtgccaactgggcagatattcgacaggtgggattcggatagctgatgcctgacgtccagctagagatctgggattttatctctacttcgtttgcaaaacacaactcaactaattattgtcttcacaatcagcttgcagacttagaatctgttcctgtagaattttgttgtttattaggccttgggggatggaagccattctagttcttactgttcttcgctgctctgtgatgcagttcgctggagaaaggtcagccctacatattccgtgttggatcagggcaggtgatcaaggggcttgatgagggaattttgtcgatgaaggttggaggactacgtcggctgtacatacctgggccattagcgttcccctaagggtctttactttctgctcctgggaaggccaagagtacccccaaccagccctgtcgttgtcgacgtcaatttactgtacataccag

SEQ ID NO: 3216 - DNA, 1378 bp, Zea Mays
gtcgccacgcttggcagttggcaagcagcgagtggggggagacagccaactctctatcctcttcccccctcgtccatccccatcccaccgccttgctctcccctctccacttccagctgtccatggctgcagcagcgtgctcctctgcctcgccgctcctcctcccctcagggccgagacatgcgtcggcctccagggcgtggtttctcggcggcaggagcagggcgctgagatcagaggcgccgtgctgctgcaaggccgccgccgcccgtggaagcgctccgcaatgcgggacggtcggtggtggcagcagcagcacccggagggggctgctaggcgtggccctgggagcctctgccttggggctggccgcgtttgacgccgtcgccgccgggttgccgccggaggagaagcccaagctctgcgacgccgcctgcgaaggcgagctcgaaaatgttggttgagcctccgtgcgtatattatcctttgtttatgcttgttggtgtttttccgttgacgggtgaaaaggattaaaggagtagtgatggcaacaattgataggggctggtttcagaaaattgggcacctgcctgcctggaccagtcagtaaatatttccttcaattctgcaaattttgaggtctcaacgtattcagcaacatacaatttctagagcaatgcgtagctggaatttgactatttgagacacgatcacctccccatacatcagtatggagagacatgccttgttccaaaatgacatatagtgagttaaatgctaaatctgagtgacataatgatatccatccaggtgcctatggtaactacagaatccggactgcagtacaaggatatcaaagtgggcgaagggcctagcccacccgttggtttccaggttgcagcaaattatgttgctatggtgccaactgggcagatattcgacaggtgggattcggatagctgatgcctgacgtccagctagagatctgggattttatctctacttcgtttgcaaaacacaactcaactaattattgtcttcacaatcagcttgcagacttagaatctgttcctgtagaattttgttgtttattaggccttgggggatggaagccattctagttcttactgttcttcgctgctctgtgatgcagttcgctggagaaaggtcagccctacatattccgtgttggatcagggcaggtgatcaaggggcttgatgagggaattttgtcgatgaaggttggaggactacgtcggctgtacatacctgggccattagcgttcccctaagggtctttactttctgctcctgggaaggccaagagtacccccaaccagccctgtcgttgtcgacgtcaatttactgtacataccag

SEQ ID NO: 3217 - DNA, 4298 bp, Zea Mays
atggaggccctcggcgccccgcccccgccgcgtttcactgtggccgacctcctccggctccgccgtcccacaaccggcgcctcctccctcctttgcctctccgtccccacctccacctccacatcccgaccccgtaaaaagcacaagctctccgccccagtcccaacctggagcaccggcacggtcccgttcgcgccgatgtcccaccccgtgctcctttccggcacgctctccctcccctccgcctcctccccgatctcctgccgcagcaactgcttttccttctccgacccatgccccaccgctgcctccccggccaccgcggccgcctccgtctgctgctgcatcctcgacttcgatcccgccgctctgggccgcgtgatccgtgtccttgcgtggaactacctaccctcactgcgcctccacgccgagccgggcgtactcgaagtggtccgctggcacctcgaggagtccgctcctcccgtgaaatatagcttcctggcgacggtccccttccgtttcccggatcaagagcccgacttggctacccgcggctgcgcatttggtttggtcaggtccgtcagcattgtgttcagtatgccgcttgccaaggctgatgcaggaagcagaaattcagttgggtttctggcggagattttgtgttgtgggtgtcgccgctgctgcagggcgacaccgccggaagatgcccagactcacatgtttgagacgatgaaatttgtctactttgtggatgcgtctagcatgtggcggccggttctagtgtggcttgtggggaggctggtgtacatttctgggttaagtaaaaaaatggtttctgttggggacaaagcctcacacacaattttggtgtcatctgcgaagacaaccatggcatggtgcccatcctacaggggcagtctgccattggataacttacctgaaaagtgcggtggagagtatgctggggttatcactggaatttattcacagggtctggtggttgagctggatgacactgcatggctgctgattgatgatcagaagcttctgccaccacattcccttcgagttggtgccattgtctctgtaaagaactttcgagcagtgtgtctgaactttgcttggacacgggttgttctgcttgcaacttgcagtaaaacctgcattactgtaaactgtttttccttggtggattccaaaattcatttgaagacagataacaagggcctcttaggaacgtttgttgactcattggagatgcctgctcgattttggatgttacttctgatatcatgctttaaacagaagtttactaaattattttctgataaagagattttgggttcacaaaatgtaccaacagaagcaagggttggttcatgcttatgctactaaaattctcacgtcaaagtgccaacctcaggaaagtttaataataaaattctgcagacataactgtagtagcttaagccttggatctaaactggaggcttgcaaattggtcgtaccattctctaatttagtctgcaagtgtgaatcattgtggatattatcgatgcttaaattatggaacggttctgaaaaagtgggcaagagccagggtttcttatgcgatggggtttcctataccagcagtaccaaaagaataatttcgagtgaagatctggattttatattagtgggaagcatcaagacttctccgctgtcagggagactgcagttggttgattccactggatgtatagatgtttttatacctgatctcccgcctaatgagagcttgcatgacatatatgagattgtcaattacaaactagctcttgaaggcccgatggcttacatagatcattatgatgttgctgatgccctatcctgtaaagctgtgtttcagaagcttccttacaaaaaaagattgcatcacctcaatatttatgttatagttcaatggaggcaattaattcatattggcccttcctcgtgtattccttcttatattaattataggatcaggttgtttcacttgctgaagttgtcccacatatttcctgtgaatagcaacattcaatgttcaaacatgccagggtctagcctgtatgctgaagctgtaatacttccatatgttttgaagtttattgggcaaggcgaatttcttgagcatgctgagggctttataatgtcacactctactttactaggtaattctgaagcctctgtggcaaaatcatgcaatattccatgttcgctaagctttggcagcaccaacctttgtggtactctggtgtctacctatgcctctggatcagaaggtactgttctaaatgaacctattgtactaagaaaagaatactcaaggatcttgttggagttcgaggcaggaatttttaagaaatatcagttaccgcgaatcaatggttcctatattctccaatgtcccagtcgaagttttacttgcaccatgggaaactgtggatgtttgcaaggtggtaaagtctcgattgatgctcaagatagactttggagcttcgccattaccattggtggtaatataaacatcaaggggtcaattggggatcaatctattggagttacttcaatgaagatggatgagatattttccagaaatatggtcgatgatgagctaagattagttcagccttggaatgacttctaccgtaattcttattttcatttggatttttcttatgaggcaataagcaaaaagatggaagattataacaccgtatgtcatgtattgaatgggctgtgtgtttcctccagtgaagttttaagtgtgtcatcatgtgttgatattatgatgcctaaagatgcttctgtgtccgctgacttcaaaactaaagaagtggttcatggagatttattaatatcagtacagggaaaagtagaaaatatacattcacttgtctgtaagtgggaaagatgcattcctggtaatgagaagtacagtctatgtatccatattgctgataataatcatgcggtatatatccgtggatactcaaacaaacattttactgttggcattggaccaggggcaacagtgacattccaccgcatccgtttcaaacagcatggattattcttaacctctgagacatacattgagcttcaccgtgcttgttctttcatcagaagtattttacagacagtagacccatgcaatttcactgcagggtagcaactatccttgtgctggtattgaacaaatcgactaatcagggtgaaactccaaatgtaaaagttcggctagctggttttattctggatgatggatcatccctgtgctgtggctgggctgatgatgctagggcagaattattgcttaggctgcaggaaattgtgcatctggatgcttctgttaatttaaagctttcaaaaggaggagagaatagcacaaaattaaaatatactattggatgctgtcttgaaaaaatgttgaagcagcacacaagtgttaccgtaaagaactgtggaattcctcctgatttctattgccgagatttggatgcatcttctgtttcggacaaagccttaagtcgcttggaagacaaacttctgaaatttattgtccttaatgcttgttgcaagggatctctgaatgttatggcatcagctctgagcccagatgatataaatgggttcaatgtggagctccctgttccagtgcagaacatgcggatgctttggatagaagaagttttcccagtagatcccttggaagaagctcgcagactacatgatattttggaaaacagctagtgttcacacattctggatagttagtatgcagcataaaaaaaagaggatggattgtccagaactccagatcgtactgccacttcgctgagattttcgcaaaggaaaacttgtttcacactcagtatccagaaaaggatggtttgtccagatagggccgccaccttgaagttgatcccagattggtcctccacattttccaaagagatgtactcacggcgaacgagcgatatatccttttgatgctgatactgatctctgacgtatgaagaagggacataaatttggctgttcgatctcttttgctgaacgagcgggccttttgtatccaatgtcccaagctccccaaagcaacgcaatgtgtatattctacttgcattattatgtcccaacgttaattttggcttatatcatgcttcctctttcgtatcctactactgttactataatctgatggtgtcaagatcaactgtgtagtttggacacacacaccaaagtgactggactatcttcacgtatcaacg

SEQ ID NO: 3218 - DNA, 6418 bp, Zea Mays
atggaggccctcggcgccccgcccccgccgcgtttcactgtggccgacctcctccggctccgccgtcccacaaccggcgcctcctccctcctttgcctctccgtccccacctccacctccacatcccgaccccgtaaaaagcacaagctctccgccccagtcccaacctggagcaccggcacggtcccgttcgcgccgatgtcccaccccgtgctcctttccggcacgctctccctcccctccgcctcctccccgatctcctgccgcagcaactgcttttccttctccgacccatgccccaccgctgcctccccggccaccgcggccgcctccgtctgctgctgcatcctcgacttcgatcccgccgctctgggccgcgtgatccgtgtccttgcgtggaactacctaccctcactgcgcctccacgccgagccgggcgtactcgaagtggtccgctggcacctcgaggagtccgctcctcccgtgaaatatagcttcctggcgacggtccccttccgtttcccggatcaagagcccgacttggctacccgcggctgcgcatttggtttggtcaggtccgtcagcattgtgttcagtatgccgcttgccaaggctgatgcaggaagcagaaattcagttgggtttctggcggagattttgtgttgtgggtgtcgccgctgctgcagggcgacaccgccggaagatgcccagactcacatgtttgagacgatgaaatttgtctactttgtggatgcgtctagcatgtggcggccggttctagtgtggcttgtggggaggctggtgtacatttctgggttaagtaaaaaaatggtttctgttggggacaaagcctcacacacaattttggtgtcatctgcgaagacaaccatggcatggtgcccatcctacaggggcagtctgccattggataacttacctgaaaagtgcggtggagagtatgctggggttatcactggaatttattcacagggtctggtggttgagctggatgacactgcatggctgctgattgatgatcagaagcttctgccaccacattcccttcgagttggtgccattgtctctgtaaagaactttcgagcagtgtgtctgaactttgcttggacacgggttgttctgcttgcaacttgcagtaaaacctgcattactgtaaactgtttttccttggtggattccaaaattcatttgaagacagataacaagggcctcttaggaacgtttgttgactcattggagatgcctgctcgattttggatgttacttctgatatcatgctttaaacagaagtttactaaattattttctgataaagagattttgggttcacaaaatgtaccaacagaagcaagggttggttcatgcttatgctactaaaattctcacgtcaaagtgccaacctcaggaaagtttaataataaaattctgcagacataactgtagtagcttaagccttggatctaaactggaggcttgcaaattggtcgtaccattctctaatttagtctgcaagtgtgaatcattgtggatattatcgatgcttaaattatggaacggttctgaaaaagtgggcaagagccagggtttcttatgcgatggggtttcctataccagcagtaccaaaagaataatttcgagtgaagatctggattttatattagtgggaagcatcaagacttctccgctgtcagggagactgcagttggttgattccactggatgtatagatgtttttatacctgatctcccgcctaatgagagcttgcatgacatatatgagattgtcaattacaaactagctcttgaaggcccgatggcttacatagatcattatgatgttgctgatgccctatcctgtaaagctgtgtttcagaagcttccttacaaaaaaagattgcatcacctcaatatttatgttatagttcaatggaggcaattaattcatattggcccttcctcgtgtattccttcttatattaattataggatcaggttgtttcacttgctgaagttgtcccacatatttcctgtgaatagcaacattcaatgttcaaacatgccagggtctagcctgtatgctgaagctgtaatacttccatatgttttgaagtttattgggcaaggcgaatttcttgagcatgctgagggctttataatgtcacactctactttactaggtaattctgaagcctctgtggcaaaatcatgcaatattccatgttcgctaagctttggcagcaccaacctttgtggtactctggtgtctacctatgcctctggatcagaaggtactgttctaaatgaacctattgtactaagaaaagaatactcaaggatcttgttggagttcgaggcaggaatttttaagaaatatcagttaccgcgaatcaatggttcctatattctccaatgtcccagtcgaagttttacttgcaccatgggaaactgtggatgtttgcaaggtggtaaagtctcgattgatgctcaagatagactttggagcttcgccattaccattggtggtaatataaacatcaaggggtcaattggggatcaatctattggagttacttcaatgaagatggatgagatattttccagaaatatggtcgatgatgagctaagattagttcagccttggaatgacttctaccgtaattcttattttcatttggatttttcttatgaggcaataagcaaaaagatggaagattataacaccgtatgtcatgtattgaatgggctgtgtgtttcctccagtgaagttttaagtgtgtcatcatgtgttgatattatgatgcctaaagatgcttctgtgtccgctgacttcaaaactaaagaagtggttcatggagatttattaatatcagtacagggaaaagtagaaaatatacattcacttgtctgtaagtgggaaagatgcattcctggtaatgagaagtacagtctatgtatccatattgctgataataatcatgcggtatatatccgtggatactcaaacaaacattttactgttggcattggaccaggggcaacagtgacattccaccgcatccgtttcaaacagtttgctccttcccttctggttttctttaattgtttcttccattattttgttaggatcgttgcagcataaaacccctatttacccatctgcagcattttagcttttaccttgatctgactagaaacctgatgtgatgtctacccttgcttgctttgtaagaaatggtagtttggtggtacactgaatagaacatgttgagcgaactgactagtgcgccctgtttacatgttatactctacatggataaacatgattttaatgagtttacttttgtcaatccttacaaattacaataactcgctgtgctaattgcttgggatcattctttttacataatatcaggttcaatgtataaatctgaacttcagggtacaatttacttctaaatataccattgcattctctttttttgaccgaaagggccatgccccccatttcattaagaaatgaaccacattcatactgtcttacaaggaccaggcaaaagcaagatttaatcctaaaccgccagttcaaccaaaatagcaaaaggaaccaaatgctaagactggtctagagtttaacattatcaacgctgaaacatacaagcagagataggccatctagattattacaaatttacaagctgttaggagacgaagctccagatcagctaagatgcagttaagacccagcaaccaaatttttccagcagcgctctcagaaatgctccagcagatgatgacgaatgtcgcgccagtcaacaacatcttccccgcgccactcatccaagaattctcttggtattcggcgcccagcctttagctcgatcaaacacctcccttgccgtccttctgactagacggcttcctccctccagggtctcttttcccattttttttctgcaaaatcgaccattagtccaaccaatgacaacataagaaaacaatgtcaaaactcaaaaggctcactaatcaacttattattgaaacaagcatcatttctgatttcccaaatggaccagagaaccgcccctgctcccacaatcatcaaatttctgtgcttcttactaaagccgtccaaccaacgagtacaggtctgtgtggctccttggaacagacttcaggttcagggcaacctgtacaattctccagatgaatttagccacagagcatttgaagaacaagtgatcaggttattcaaaaaccccacagaaacaacacacacaacttcctttccagtttttttttttttcagattgctttttgttagaattttgttgttaacgaccaaccagaggaaaattttgatcttttgaggtatgttaactttccacaagaaattgaaagggacttttgttgcaatgcttctaatctgtttgtaaagagattttacagagaagcctgctttgcctaaagtacacagagccgagtcctcttctctcagtctttaggacccacataacagtttaagggattcaaaatgagtcccagatttcaccaactaatcttctcctaaattttaaagcagaaaggttggatctaagaactctgttcactgtaatgtttttgtcaaaggttaagctaaatagaattgagttgccaggggggaatctcccagccaggtatcattccaaaagctagtttggttaccattgcctatcttttttctacagaacttgtaaacagtatctttaactttcagcagacctttccaaaaatacaaatcatcttgctttttctctaccataataagaggttttcccttaactgtatttcgacctaacgatattctgccaaatcccatctgaggtttctaacttccaaatccacttggcaaggaggccaatattcattttttccaagtcaatcacacccaaacccccttgatcttcagggagacacaccgtgtcccaatccgttaagtggtattttttggtcaattgacccccctgccacaataatcttttttctgtaaatatcaagttttttaatcagacttaggggcagaatacagggagagcatgtataaaggaacgttcgaaaggctgctgttcagcagagtgatcctaccccctaaatggcgcctctgagggggacaggcatggattattcttaacctctgagacatacattgagcttcaccgtgcttgttctttcatcagaagtattttacagacagtagacccatgcaatttcactgcagggtagcaactatccttgtgctggtattgaacaaatcgactaatcagggtgaaactccaaatgtaaaagttcggctagctggttttattctgggtaagacatgcagtattttttctgtttaagctacagaagatgatggatcatccctgtgctgtggctgggctgatgatgctagggcagaattattgcttaggctgcaggaaattgtgcatctggatgcttctgttaatttaaagctttcaaaaggaggagagaatagcacaaaattaaaatatactattggatgctgtcttgaaaaaatgttgaagcagcacacaagtgttaccgtaaagaactgtggaattcctcctgatttctattgccgagatttggatgcatcttctgtttcggacaaagccttaagtcgcttggaagacaaacttctgaaatttattgtccttaatgcttgttgcaagggatctctgaatgttatggcatcagctctgagcccagatgatataaatgggttcaatgtggagctccctgttccagtgcagaacatgcggatgctttggatagaagaagttttcccagtagatcccttggaagaagctcgcagactacatgatattttggaaaacagctagtgttcacacattctggatagttagtatgcagcataaaaaaaagaggatggattgtccagaactccagatcgtactgccacttcgctgagattttcgcaaaggaaaacttgtttcacactcagtatccagaaaaggatggtttgtccagatagggccgccaccttgaagttgatcccagattggtcctccacattttccaaagagatgtactcacggcgaacgagcgatatatccttttgatgctgatactgatctctgacgtatgaagaagggacataaatttggctgttcgatctcttttgctgaacgagcgggccttttgtatccaatgtcccaagctccccaaagcaacgcaatgtgtatattctacttgcattattatgtcccaacgttaattttggcttatatcatgcttcctctttcgtatcctactactgttactataatctgatggtgtcaagatcaactgtgtagtttggacacacacaccaaagtgactggactatcttcacgtatcaacg

SEQ ID NO: 3219 - DNA, 1493 bp, Zea Mays
acaggtatcaacccaagtgacctcctctctttcccggctccggtcgcgaatgcgcgatgcgttctctcctcctgccccgcaggtgcgccttcgcttcgcggcgcttcctctccgcgctcgccggcagcggggctagggccccgtgcgccggcgttgtgtacgggttcggggataacagccatggcgcggtgggccagcctccaccggctgcccacgcctacgtgcccacgcccgtgccctccctcccgccgtccgtgagcgccgtcgccgccggtcactaccactccctcgccgtatctgccgccggagaggtctgggcgtgggggcgcaacgacgagggccaactcggccgcgggcttcactccccgaggaatacttggagcaatgcagaactggtcagaggattggaaaatgttcaggttcaagctgtatctgcttcaggcgttgtttcagcagcaataggatctgatggttccctatgggtttgggggaggtcaaagcgtggccaacttggacttgggaaggacattgtagaggcagcagtgccatctaaagtgaaagctcttgctagctacgacattgttaaggatggaaagctatttggttggggctactcggaaaatggaaggttaggagaaatgggccaaagcactagagctctttctgcagaagaatacataggaaaaacggtagacaagtattctagtgtaatgctggaggctgttgaaaagatggttgaagagaaaattcagagtgaagacgatatgcccattatctgggaaccatcccttgttcatgaagtgagtcgtcttgaggtgtctgatgtgtcttgtgggcttgaccattccttgattctctgctctgatggcattgtactgagcggtggtgacaacacttatggacagctgggtaggaaggccgggccacccgaattgcttcctgttggcatgagctataggccattctccatgtcggcaagtgtcggccactctcttgcactatgctacacaacgactgaaggcaccgctggtgtggaaactggcctcctctcatggggatggaactgcagctcccagctcggacggtccagccaagaggacatccctgcactggtggactctctgagcagggagaggctggtatcggcctcggctggtcgagtccattcggttgctctcacgtcgaaaggtgaagtttggacctggggatcgggcaggaatggcaggctaggcctgggcagctccattgatgaggcggcgccatgtcttgtagataccctggaaggggtggaagtcttgcaagttgcagcagggatggaccataatctcctcctggttgccgagtaggtataggttggtatgctggtgaactgaaagatggtactccatttgttcttaactagctgaatgctcgtgcgttgcaacggaaatatataataccagtatactacgataacttatatacaaaatgtgtgttataccgttataagaaaa

SEQ ID NO: 3220 - DNA, 1940 bp, Zea Mays
cgacactatttagcatcgcttgatagtccactccactccctccgtcctacgctccgctcgctctgcgccgatccatccacctctccccccttctcatttaaacgcgcacccacgctgaacacacagcctcactgccctgccgccggccacttcttcttcttcgatcgctttcgcacgggatggcggcgagaggcgtgcaggcgccggcgccgcgacggccggtgacgctgcgggacttcctggagctcggctgcgactccagcagcgacggcttccgctcctacccgcgccgcctgctgcccctccctcccgacgccgtgctgcacctgcagcagcagcaggcgcccccgaccccgcgggcggaggccgcggccgcccagcggctgctcaggcggagctcgtcctcgctcgcgctcgcgctcttctcctcctccctccccggctccggctccggctccggcccagctggcgcgctcgccaggatctccagcatctccaggagcttctcgcggcggatcaaggaaggcttctggaggcgccgcgacgaggacgagggcgacggcgacggcgacgacgactacgacggcgactacttcgacgaccgggactcgtgcggcttcccctcgcctctcgtcagcagctgctccgcctccgactcggacgagtccgaggcggacgtgacgacggcgcccgagcgcaacaaagccaccgcttcctcctctacgtcgccgtcgccctccccaagctcggcggaccacgaccgcacgcgcacggacgccgccgttgctgacggggacaaggcggagacggcggcggtagaggacggcgactcgacgacgggtgcgcccagcacggtgggggacaagcagcaacagctcagccccgtgtccgttctggatttcgccttcgatgacaacgacggcgaggaggaagggagcgacgccggcaccagctgctcctgctcctcccccgccttccagttccagcgctgcacgccgccggcggtggacctccacgggacgaagccgcaggcgcagctgctgcacaagatcagacggtacgacggcgttgcgcagggaatcgaccccgtggacctcgacgcgcggttcacggcggccacctcggagtccggggagtccgccgacgccagcacgcgtctcgcaaccaccaccagcagctcgagcacggacaccagcagcagcagcagcagcagcgcggagacaacggcgccacagcacgacgacgaggaggcggagcaccagagcgccgagcgcgcgctctcgccctcgccctcgctccactaccaggcagaccaagaagagcccgacgacgagtaccgcctgctcgcgcggctgctggagcacgacgcggcggcggcggagtgcctggacgacgaggtcgcacgggtgctcgtcctcgacttcttcgcggagggcgccgaccgtcgtctcacccgttcggcggcggccggcggcaggccgctgcacgacgaccgaagcgagtcgctgctagtgagggccgccgccgcgtggctgcgtggcgcggggccgcggtggggcataggggacgtggcgcgctccggaaaggcggcgctggacgacatggagcgcagccggcggtggatgtgcgtgggcgaggaggagtgcgacgtcgccgcggacgtggagtgcgacgcggtcgacgccctcgtggacgagctggtcaccgagctagccatcgtgctgccccggtggccgcgctgtgacgtggccgtcgatgatgataatgtgctcgttgactgagtacgtgttgacgtcacaattcaatgacctcgccggcgaggtccagcgccagcaggcagtcgttcataccatacatacgctgcctccgttcacaaatatatgtgaacatatgatattgttaattttttcgaaaaaaattgatcactcgtattattcaaa

SEQ ID NO: 3221 - DNA, 1977 bp, Zea Mays
ttttttcgcccaactccacaggcgtgttgggtgcgatctactcaaacaatgtggccacaatatctgattcttccatgtaaaacatcaaagcaatagtgagtactgtactatcgatagtccaccttagtgagtactatcaatagtctaccttcacagaggggatggaccggtagctacatgcattgagtcggtggagcttggggtgttttgcgaaagctagtttatacacacagttgattttataatgctttctcattaaaaaaaacaacccttatttccttgcaggaggtttgcatatgcacttttcattttaacaccactggactataccacccagaccctcctcagcagattcgccgattcaccataaagtttattattactttagcaaacatcctttttgaaacatgaacctgaaacccaaatctcgcagttcttggcttgtgctggaccatccctgatgcggcaattccatgggcgacaaaggggactgaggtgaatgcagtgcaaattcctgagccgactattccctgctgtgtgcctctggaatcaacagatgctacccctcggacatcgagcttgtggctgttggcaagttcctagtgccaagtgctccgagcctccaaccaacggcgaagtgggcaaagctctccagacactgctgctccaagggcctccagaatttgctgtaagatttcgccctgataacatcattgtctattctcgagcaccaagacaacagggagaatcgccagctccagcatctgagttcattgaaaaggttaccaagaagatagacacccttgtacctgttccgatcattcagaaaaggagaaagaaaatgaactacccgacccgcctgccacggcgcacccgtcgaattgcctaactgccacctgaaaggctgaaactgacctagtttcagcatcagccgcttgccgtaagcttggcttgtcagatgaagaaggaaggatatctgatgaaacccttgagaggtacatcaaactctatgatgaggatagactatgccgcgagcttggcttgtcagatgaagaaggaaggatatctgatgaaacccttgagaggtacatcaaactctatgatgaggatagactattccgcgaccatgtggcagcgcttgctgctttatttggctgggacgcgcctcctgaaggacaagcttgtcttgccgacaacaccgtgttagttgtctgacagctcctatttttggtcctgcttctgattctgcgtcaatggatagatccaatatcttgatttggaatgtacggggtcttaatgataaatcaaggcgagataatcttcggaaagtcgttgatgcatccaaaccttctgtgattgaagtctcattttgaagcgaatccaagggacattgatttgctcaagcgtgataagttgataaacaacagggaaattcatgaactgatgcacacatgcgttatgttcctgactatctaattgaccctaaatcaaaagaagccattgtcaaactttccagggctcctatgggtatggacaagccccaaagacgaaaaagacacgggtttaagggaggatcagggagaagcagagatcctcttaaaactctctgctgagggaaaacgagggagacggaggagagatacagagggagaaccagatatatagaacaaatagtaagaagcgcggaaagttgattttgcaatgagtcttgccatcaaactcactcagttttgtaggcttgttttaagccacatgtcaaacttgtatcgttgacacttgaggaactgttgtttcggtgacacttgtagctaaggagtatatatttcattgcctgatggatattcaaaggctaaaaatgtaaactcctcccagctagaacattcatattaaattcgtttgccggttatgtaaacaaaatctgcttctcatgggtctggctgaggtgatgccacccgcacgtacaaagttacatttcct

SEQ ID NO: 3222 - DNA, 3264 bp, Zea Mays
ctggccctggatccgcctcccgtctctgacctcctcacatagccgccgccgccgatctccgtcatcggcccagcaatgcccgccgccacgccatagctcaccgcgcgatgcccgcgcccgcgcccaaggcgctgccccgtctcctcgccgccatatccaccgccgcctcctcggccactgacctccgtcgtctctccctcctcctcctctccccctccgctcctgtgccccccatccggtgcctcaacaccctcctcatggcgctcgcccgccacggcatgctctcggacatggagtcgctcgccgcccgcatgcctgtccgcaacctccacacctacaccaccctcatcaacgcctattgccacgctggcgacctccccgctgccaagcgccatctgtcctcgctcctgcgcgccggcctcgcaccggactcccacgcgtacacgtccttcgtcctcgggtactgccgcacggggctgttcgcgcacgcctgccgattgttcttgctaatgccgcagcgggggtgcgcgcgcaccccgttcacgtacgcagccctgctccaggggctatgtggcgctgggatggtgcgcgaggcgatggcggttttcgctgggatgtggcctgatggctgtgcccctgattcgcacgtctacagcataatggtgcacgggttatgtggggcaggacgagctggagaggcggttgcgctgctcacagacgcaatggggaagggatttgtgccgaatgttgctgtatacaatgctttgatcgatggctactgcagtactggggacttggagctcgcaattgacatcttcaaggggatgcagagtaaagggtgcttgccgaacgtccgcacatatactcagctgatatgtgggttttgcaagtcggggaaagtagagagggccatggtactatacagtcggatgattgaggcaggtttagctccaaatgtggtgacatacacaaccttaatccagggacagtgcagcgaggggcacttggaacatgcttttaggctgcttcattcaatggaggcttgtgggctggcccctaatgagtggacttgcttagtgctgattgatgctttgtgcaaacatgggagaattgaggaagctcagcagtttctcgggtctcttgttcagaagggaattaaggtgaatcaggttatctacaccagtatgatagatgcattgtgcaagtcgggaaagtttgatggtgctcataatctgatgcagaaaataatcacagaagggtttgtgccagacgcccacatgtacagttcgcttattgatggactatgcagggaaaacaagctgttggaagcaatatcactattgaatgatatgattgagagtggagtacaggccaatgctgttccatttaccattctaattgataaacatctcagggagtttagatctgattccccaaaaatgatatccgataggatggctgcggcaggtgttaagcctgatgtcgtcacttatacagtttttatacgctcctactgtcaagatggaaggatggaagatgccgaatccatgatgattcagatgatcgatcatggtgttcgtccaaatttaaccacatataacacattgattaaaggatatgcaaatcttggactagttagtcaagcattttcatctcttaagaacatgattgataatggatgcaagccaaatgacgagtcttacacagttctccttggacttctactaaagaaaaattcctaccatgacttagttgctgattctattagtttatggaaaatagttgacatgaaagttctcgaggaacttttggaggaagtgattaagcttcagtgcagctcagccagctatgtttacgattgttttattagatgtttgagcaaagtcgacagattggaggaagcaaaaagttttctcgtagggatgcagagtgctaacttaaccccaagtgaggatgtatatacttgtatgatagaatgttgctacagaatgaaattgctaaaagaagctttaaggtttcttgattcaatggtgaaaagaaactatttaccacgtttagaatcttataggtttattatttgtgctctttgtgaggaaggaagctttcatactgctaaaagcatttttggtgacatactatcaaaggaatacaaccgtgatgagattgcttggaagattttgattgatggcttattacaaaaaggaaacactgctgactgctcccgtctgctatcattcatggaggaacagaattgccgtcctggttctgcaatatattctaggcttacaggcgaaataacagttacaagtgaagctcaggaaattgctacatgaatacggacaaaccaaccaaccttagtgttggtgttgatggttccatgaatcagtacaagatgggcaaattgaaagctaaaaagactttggctgtttgacattagcagtgcccctgtaattgtgaggaaggatgtggcaacacaaataatccctgatataagcaggtggatgatcgggtgattctgactaggtggtccaaggcttgaggctctgcaaaaaggcaacatatattctagaatggaagaaaaaaactatggaatctaaatcttctgcctgggaagtaacacaaattgtgaagtgtatatcaaaattgaagtctcattttgaagcgaatccaagggacattgatttgctcaagcgtgataagttgataaacaacagggaaattcatgaactgatgcacacatgcgttatgttcctgactatctaattgaccctaaatcaaaagaagccattgtcaaactttccagggctcctatgggtatggacaagccccaaagacgaaaaagacacgggtttaagggaggatcagggagaagcagagatcctcttaaaactctctgctgagggaaaacgagggagacggaggagagatacagagggagaaccagatatatagaacaaatagtaagaagcgcggaaagttgattttgcaatgagtcttgccatcaaactcactcagttttgtaggcttgttttaagccacatgtcaaacttgtatcgttgacacttgaggaactgttgtttcggtgacacttgtagctaaggagtatatatttcattgcctgatggatattcaaaggctaaaaatgtaaactcctcccagctagaacattcatattaaattcgtttgccggttatgtaaacaaaatctgcttctcatgggtctggctgaggtgatgccacccgcacgtacaaagttacatttcct

SEQ ID NO: 3223 - DNA, 2160 bp, Zea Mays
agagagagagagagagagagcgcaacgcgaaaagccgaaaacccaaatcgagtttcctgccggcctgtccaatttctgtctaactcccagtcccagacccagacccagagaagatcagaagaagggggaagacagctcgtgcttcgacaggcgtcagccctagcgcagcttcccggcgacggcgatgagcctgggagctgaggtgatcgagctctccagcgacgaagacgaggagcctgtgcccagcactaccgctctcatccaccacgccccctcctcccctcccgacgtcaagccgcacctgctcgccgacgtcgatgtgaagccgctgcttcttctcccgccgccgctccaccccccgggctacggcgcgctcgtgcccgtgaagaccgaggagcccgtgcccgtggccaccgtctcgtcaccgcccagggcgctcccgccgccgcgcctctgccgccagttctggaagtccggcgactacgtcgtcgcgcgccgcaaccccgatgtggccggccccggtgggcggaaccggttgcggataaaccccaagtttctgcactccaatgcgacttcccacaagtgggcttttggcgccattgccgagctccttgacaatgcaatcgatgaggtgaacaatggggcaacatttgtccgtgttaataaatttaaaaacccacgagatgggaacccctcattgttggttcaagatgatggaggggggatggatcctgaggcactgagacgttgcatgagcttcggattttcagataaacagtctgatgctttcattgggcaatatggcaatggtttcaagactagtacgatgcggcttggagcagatgtgattgtttttacacaaaaccaaaataactgggtgccaactagaagtatcggccttctttcttacacatttttgatggaaacaggttgcgatgatgtgctggtgccaacggtagactatcagtatgatctaacaacaacttcatatgttcagatgttgcgtcatgatcagaagctcttctcttctaatttggcaatccttctcaaatggtcccctttttctactgaagctgagttgcttaaacaatttgatgatatgggagatcatggaacaaagataattgtattcaacctctggttcaatgatgatggggatatggagcttgatttcaactctgacaaaaaggatatcctcattactggggcccacaagaaggtgaaaacaaacagtttggacaagattgctgcacagaactacgtctcaactcggcttcgctattctcttagagcatatgcatctatcttgtatcttcatgtacctgatactttcagaattatcctgcggggatgtgatgtggaaccacataatgtagttaatgatttgatgtatcgggagtgcgtgttgtataaaccacaaattgctggacttacagagtcatcggtaatcacaaccattgggtttgttaaaggtgcaccagatatagatgtacaagggtttaatgtatatcacaaaaaccgtctaatattgcccttctggaaagttgcaaacaactcatacgggaaaggacgaggagttgttggcattctggaggccaactttatcaaacctacccatgacaagcaggattttgagaagtcagtcctttatcaaagacttgagttccgcttgaaagaaatgacttacgaatactgggaccttcattgccatcgtgttggatatgacaacaaaaaattacctaaagcaacccgtgctattaatcgtgccaatcatatgaacggtggcagttccccaacaagtgctccacctcggttgcttgcagttgatattccaacaagcagctctagtatacctagattatcagcctctgcagcaagagaaaagatcagtagtctcgattctcttcccaagagcatgattggattgaagaggaagtttaatcctttcggtgctgtggcggccagtgctgatcaggatggactacatcatatggataaaatagatgtttctcaacgaagacggtttaatgaatacaaaactttgaccctggagaatgacaagttgcgaaatgaatgcttacaatacgagggatcagagaaacaacttgtcctgaagccgtggcttgttgaaagattgaaatggcttgcttgtaagatagt

SEQ ID NO: 3224 - DNA, 2729 bp, Zea Mays
gagcgcaacgcgaaaagccgaaaacccaaatcgagtttcctgccggcctgtccaatttctgtctaactcccagtcccagacccagacccagagaagatcagaagaagggggaagacagctcgtgcttcgacaggcgtcagccctagcgcagcttcccggcgacggcgatgagcctgggagctgaggtgatcgagctctccagcgacgaagacgaggagcctgtgcccagcactaccgctctcatccaccacgccccctcctcccctcccgacgtcaagccgcacctgctcgccgacgtcgatgtgaagccgctgcttcttctcccgccgccgctccaccccccgggctacggcgcgctcgtgcccgtgaagaccgaggagcccgtgcccgtggccaccgtctcgtcaccgcccagggcgctcccgccgccgcgcctctgccgccagttctggaagtccggcgactacgtcgtcgcgcgccgcaaccccgatgtggccggccccggtgggcggaaccggttgcggataaaccccaagtttctgcactccaatgcgacttcccacaagtgggcttttggcgccattgccgagctccttgacaatgcaatcgatgaggtgaacaatggggcaacatttgtccgtgttaataaatttaaaaacccacgagatgggaacccctcattgttggttcaagatgatggaggggggatggatcctgaggcactgagacgttgcatgagcttcggattttcagataaacagtctgatgctttcattgggcaatatggcaatggtttcaagactagtacgatgcggcttggagcagatgtgattgtttttacacaaaaccaaaataactggttgcgatgatgtgctggtgccaacggtagactatcagtatgatctaacaacaacttcatatgttcagatgttgcgtcatgatcagaagctcttctcttctaatttggcaatccttctcaaatggtcccctttttctactgaagctgagttgcttaaacaatttgatgatatgggagatcatggaacaaagataattgtattcaacctctggttcaatgatgatggggatatggagcttgatttcaactctgacaaaaaggatatcctcattactggggcccacaagaaggtgaaaacaaacagtttggacaagattgctgcacagaactacgtctcaactcggcttcgctattctcttagagcatatgcatctatcttgtatcttcatgtacctgatactttcagaattatcctgcggggatgtgatgtggaaccacataatgtagttaatgatttgatgtatcgggagtgcgtgttgtataaaccacaaattgctggacttacagagtcatcggtaatcacaaccattgggtttgttaaaggtgcaccagatatagatgtacaagggtttaatgtatatcacaaaaaccgtctaatattgcccttctggaaagttgcaaacaactcatacgggaaaggacgaggagttgttggcattctggaggccaactttatcaaacctacccatgacaagcaggattttgagaagtcagtcctttatcaaagacttgagttccgcttgaaagaaatgacttacgaatactgggaccttcattgccatcgtgttggatatgacaacaaaaaattacctaaagcaacccgtgctattaatcgtgccaatcatatgaacggtggcagttccccaacaagtgctccacctcggttgcttgcagttgatattccaacaagcagctctagtatacctagattatcagcctctgcagcaagagaaaagatcagtagtctcgattctcttcccaagagcatgattggattgaagaggaagtttaatcctttcggtgctgtggcggccagtgctgatcaggatggactacatcatatggataaaatagatgtttctcaacgaagacggtttaatgaatacaaaactttgaccctggagaatgacaagttgcgaaatgaatgcttacaatacgagggatcagagaaacaacttgtcctgaaggaacaaaagctccgatctgaaattgctgaggtggaaaagaagtatcaggaattgttgggagagctcagatcattggatgtgaagaaagagaaacaatgaactctccacttcagcgcctgttgtacaattaattgctcttttttctttcctgacctgtgaagatgatgactggattacttcccgagacgtgcagggaactggtcccttggacaaatgttatctaccgattaccattcgcttggtagtttcgttggatagctgtagaggtgtaatttcgtttcactaatcttcctagggtcctgtgatggtggaagaaagtgagcatgtagtctgttgtaaaattatgcaacttgtatctgaatgtacagcagcggtttcaatgttaatggccctctgtttccagcagcacatctcggtcccgtgtcaaaagaggtggattttgatccggcactctggagtctggactctggagtggatacttagaattagacttcatatgttgtgcagtatgtaaaattacttttcgtactcgtgacagtcttaaactggtggttgtgttgtatttgagacgaggggggttagtcaagcctttgttcactccaacagtacattgtaactgtacatgagtgatggtgggtatcagctgtttggttgctgcattaatttattttccaaacctctta

SEQ ID NO: 3225 - DNA, 2773 bp, Zea Mays
agagagagagagagagagagagagagagagagagagagagagagcgcaacgcgaaaagccgaaaacccaaatcgagtttcctgccggcctgtccaatttctgtctaactcccagtcccagacccagacccagagaagatcagaagaagggggaagacagctcgtgcttcgacaggcgtcagccctagcgcagcttcccggcgacggcgatgagcctgggagctgaggtgatcgagctctccagcgacgaagacgaggagcctgtgcccagcactaccgctctcatccaccacgccccctcctcccctcccgacgtcaagccgcacctgctcgccgacgtcgatgtgaagccgctgcttcttctcccgccgccgctccaccccccgggctacggcgcgctcgtgcccgtgaagaccgaggagcccgtgcccgtggccaccgtctcgtcaccgcccagggcgctcccgccgccgcgcctctgccgccagttctggaagtccggcgactacgtcgtcgcgcgccgcaaccccgatgtggccggccccggtgggcggaaccggttgcggataaaccccaagtttctgcactccaatgcgacttcccacaagtgggcttttggcgccattgccgagctccttgacaatgcaatcgatgaggtgaacaatggggcaacatttgtccgtgttaataaatttaaaaacccacgagatgggaacccctcattgttggttcaagatgatggaggggggatggatcctgaggcactgagacgttgcatgagcttcggattttcagataaacagtctgatgctttcattgggcaatatggcaatggtttcaagactagtacgatgcggcttggagcagatgtgattgtttttacacaaaaccaaaataactggttgcgatgatgtgctggtgccaacggtagactatcagtatgatctaacaacaacttcatatgttcagatgttgcgtcatgatcagaagctcttctcttctaatttggcaatccttctcaaatggtcccctttttctactgaagctgagttgcttaaacaatttgatgatatgggagatcatggaacaaagataattgtattcaacctctggttcaatgatgatggggatatggagcttgatttcaactctgacaaaaaggatatcctcattactggggcccacaagaaggtgaaaacaaacagtttggacaagattgctgcacagaactacgtctcaactcggcttcgctattctcttagagcatatgcatctatcttgtatcttcatgtacctgatactttcagaattatcctgcggggatgtgatgtggaaccacataatgtagttaatgatttgatgtatcgggagtgcgtgttgtataaaccacaaattgctggacttacagagtcatcggtaatcacaaccattgggtttgttaaaggtgcaccagatatagatgtacaagggtttaatgtatatcacaaaaaccgtctaatattgcccttctggaaagttgcaaacaactcatacgggaaaggacgaggagttgttggcattctggaggccaactttatcaaacctacccatgacaagcaggattttgagaagtcagtcctttatcaaagacttgagttccgcttgaaagaaatgacttacgaatactgggaccttcattgccatcgtgttggatatgacaacaaaaaattacctaaagcaacccgtgctattaatcgtgccaatcatatgaacggtggcagttccccaacaagtgctccacctcggttgcttgcagttgatattccaacaagcagctctagtatacctagattatcagcctctgcagcaagagaaaagatcagtagtctcgattctcttcccaagagcacagtgattggattgaagaggaagtttaatcctttcggtgctgtggcggccagtgctgatcaggatggactacatcatatggataaaatagatgtttctcaacgaagacggtttaatgaatacaaaactttgaccctggagaatgacaagttgcgaaatgaatgcttacaatacgagggatcagagaaacaacttgtcctgaaggaacaaaagctccgatctgaaattgctgaggtggaaaagaagtatcaggaattgttgggagagctcagatcattggatgtgaagaaagagaaacaatgaactctccacttcagcgcctgttgtacaattaattgctcttttttctttcctgacctgtgaagatgatgactggattacttcccgagacgtgcagggaactggtcccttggacaaatgttatctaccgattaccattcgcttggtagtttcgttggatagctgtagaggtgtaatttcgtttcactaatcttcctagggtcctgtgatggtggaagaaagtgagcatgtagtctgttgtaaaattatgcaacttgtatctgaatgtacagcagcggtttcaatgttaatggccctctgtttccagcagcacatctcggtcccgtgtcaaaagaggtggattttgatccggcactctggagtctggactctggagtggatacttagaattagacttcatatgttgtgcagtatgtaaaattacttttcgtactcgtgacagtcttaaactggtggttgtgttgtatttgagacgaggggggttagtcaagcctttgttcactccaacagtacattgtaactgtacatgagtgatggtgggtatcagctgtttggttgctgcattaatttattttccaaacctctta

SEQ ID NO: 3226 - DNA, 3071 bp, Zea Mays
gagcgcaacgcgaaaagccgaaaacccaaatcgagtttcctgccggcctgtccaatttctgtctaactcccagtcccagacccagacccagagaagatcagaagaagggggaagacagctcgtgcttcgacaggcgtcagccctagcgcagcttcccggcgacggcgatgagcctgggagctgaggtgatcgagctctccagcgacgaagacgaggagcctgtgcccagcactaccgctctcatccaccacgccccctcctcccctcccgacgtcaagccgcacctgctcgccgacgtcgatgtgaagccgctgcttcttctcccgccgccgctccaccccccgggctacggcgcgctcgtgcccgtgaagaccgaggagcccgtgcccgtggccaccgtctcgtcaccgcccagggcgctcccgccgccgcgcctctgccgccagttctggaagtccggcgactacgtcgtcgcgcgccgcaaccccgatgtggccggccccggtgggcggaaccggttgcggataaaccccaagtttctgcactccaatgcgacttcccacaagtgggcttttggcgccattgccgagctccttgacaatgcaatcgatgaggtgaacaatggggcaacatttgtccgtgttaataaatttaaaaacccacgagatgggaacccctcattgttggttcaagatgatggaggggggatggatcctgaggcactgagacgttgcatgagcttcggattttcagataaacagtctgatgctttcattgggcaatatggcaatggtttcaagactagtacgatgcggcttggagcagatgtgattgtttttacacaaaaccaaaataactgggtgccaactagaagtatcggccttctttcttacacatttttgatggaaacaggttgcgatgatgtgctggtgccaacggtagactatcagtatgatctaacaacaacttcatatgttcagatgttgcgtcatgatcagaagctcttctcttctaatttggcaatccttctcaaatggtcccctttttctactgaagctgagttgcttaaacaatttgatgatatgggagatcatggaacaaagataattgtattcaacctctggttcaatgatgatggggatatggagcttgatttcaactctgacaaaaaggatatcctcattactggggcccacaagaaggtgaaaacaaacagtttggacaagattgctgcacagaactacgtctcaactcggcttcgctattctcttagagcatatgcatctatcttgtatcttcatgtacctgatactttcagaattatcctgcggggatgtgatgtggaaccacataatgtagttaatgatttgatgtatcgggagtgcgtgttgtataaaccacaaattgctggacttacagagtcatcggtaatcacaaccattgggtttgttaaaggtgcaccagatatagatgtacaagggtttaatgtatatcacaaaaaccgtctaatattgcccttctggaaagttgcaaacaactcatacgggaaaggacgaggagttgttggcattctggaggccaactttatcaaacctacccatgacaagcaggattttgagaagtcagtcctttatcaaagacttgagttccgcttgaaagaaatgacttacgaatactggagaactgtgcatcattatattaaggagaataagaatggtctaaggtagaccaaagtacaagctgccctagaaggcaggaagaggggggacacaaggaaacaccaaaactaaatagaagagagagacggggggcaccagttccaacaacattcaaattaaggccacagctgcctaagatcctttgcacccgccattctccaaagcttaacatcatcttgaattgttcttgttatgaggaatgcattaatgccataaacgaattcattcctgaactaattctttttgcagggaccttcattgccatcgtgttggatatgacaacaaaaaattacctaaagcaacccgtgctattaatcgtgccaatcatatgaacggtggcagttccccaacaagtgctccacctcggttgcttgcagttgatattccaacaagcagctctagtatacctagattatcagcctctgcagcaagagaaaagatcagtagtctcgattctcttcccaagagcatgattggattgaagaggaagtttaatcctttcggtgctgtggcggccagtgctgatcaggatggactacatcatatggataaaatagatgtttctcaacgaagacggtttaatgaatacaaaactttgaccctggagaatgacaagttgcgaaatgaatgcttacaatacgagggatcagagaaacaacttgtcctgaaggaacaaaagctccgatctgaaattgctgaggtggaaaagaagtatcaggaattgttgggagagctcagatcattggatgtgaagaaagagaaacaatgaactctccacttcagcgcctgttgtacaattaattgctcttttttctttcctgacctgtgaagatgatgactggattacttcccgagacgtgcagggaactggtcccttggacaaatgttatctaccgattaccattcgcttggtagtttcgttggatagctgtagaggtgtaatttcgtttcactaatcttcctagggtcctgtgatggtggaagaaagtgagcatgtagtctgttgtaaaattatgcaacttgtatctgaatgtacagcagcggtttcaatgttaatggccctctgtttccagcagcacatctcggtcccgtgtcaaaagaggtggattttgatccggcactctggagtctggactctggagtggatacttagaattagacttcatatgttgtgcagtatgtaaaattacttttcgtactcgtgacagtcttaaactggtggttgtgttgtatttgagacgaggggggttagtcaagcctttgttcactccaacagtacattgtaactgtacatgagtgatggtgggtatcagctgtttggttgctgcattaatttattttccaaacctctta

SEQ ID NO: 3227 - DNA, 3300 bp, Zea Mays
gagcgcaacgcgaaaagccgaaaacccaaatcgagtttcctgccggcctgtccaatttctgtctaactcccagtcccagacccagacccagagaagatcagaagaagggggaagacagctcgtgcttcgacaggcgtcagccctagcgcagcttcccggcgacggcgatgagcctgggagctgaggtgatcgagctctccagcgacgaagacgaggagcctgtgcccagcactaccgctctcatccaccacgccccctcctcccctcccgacgtcaagccgcacctgctcgccgacgtcgatgtgaagccgctgcttcttctcccgccgccgctccaccccccgggctacggcgcgctcgtgcccgtgaagaccgaggagcccgtgcccgtggccaccgtctcgtcaccgcccagggcgctcccgccgccgcgcctctgccgccagttctggaagtccggcgactacgtcgtcgcgcgccgcaaccccgatgtggccggccccggtgggcggaaccggttgcggataaaccccaagtttctgcactccaatgcgacttcccacaagtgggcttttggcgccattgccgagctccttgacaatgcaatcgatgaggtgaacaatggggcaacatttgtccgtgttaataaatttaaaaacccacgagatgggaacccctcattgttggttcaagatgatggaggggggatggatcctgaggcactgagacgttgcatgagcttcggattttcagataaacagtctgatgctttcattgggcaatatggcaatggtttcaagactagtacgatgcggcttggagcagatgtgattgtttttacacaaaaccaaaataactgggtgccaactagaagtatcggccttctttcttacacatttttgatggaaacaggttgcgatgatgtgctggtgccaacggtagactatcagtatgatctaacaacaacttcatatgttcagatgttgcgtcatgatcagaagctcttctcttctaatttggcaatccttctcaaatggtcccctttttctactgaagctgagttgcttaaacaatttgatgatatgggagatcatggaacaaagataattgtattcaacctctggttcaatgatgatggggatatggagcttgatttcaactctgacaaaaaggatatcctcattactggggcccacaagaaggtgaaaacaaacagtttggacaagattgctgcacagaactacgtctcaactcggcttcgctattctcttagagcatatgcatctatcttgtatcttcatgtacctgatactttcagaattatcctgcggggatgtgatgtggaaccacataatgtagttaatgatttgatgtatcgggagtgcgtgttgtataaaccacaaattgctggacttacagagtcatcggtaatcacaaccattgggtttgttaaaggtgcaccagatatagatgtacaagggtttaatgtatatcacaaaaaccgtctaatattgcccttctggaaagttgcaaacaactcatacgggaaaggacgaggagttgttggcattctggaggccaactttatcaaacctacccatgacaagcaggattttgagaagtcagtcctttatcaaagacttgagttccgcttgaaagaaatgacttacgaatactggagaactgtgcatcattatattaaggagaataagaatggtctaaggtagaccaaagtacaagctgccctagaaggcaggaagaggggggacacaaggaaacaccaaaactaaatagaagagagagacggggggcaccagttccaacaacattcaaattaaggccacagctgcctaagatcctttgcacccgccattctccaaagcttaacatcatcttgaattgttcttgttatgaggaatgcattaatgccataaacgaattcattcctgaactaattctttttgcagggaccttcattgccatcgtgttggatatgacaacaaaaaattacctaaagcaacccgtgctattaatcgtgccaatcatatgaacggtggcagttccccaacaagtgctccacctcggttgcttgcagttgatattccaacaagcagctctagtatacctagattatcagcctctgcagcaagagaaaagatcagtagtctcgattctcttcccaagagcagtgagtaatccactctttatgttcattttataaaatgtcactgtgtttatttatgcattgacctttagcagtgattggattgaagaggaagtttaatcctttcggtgctgtggcggccagtgctgatcaggatggactacatcatatggataaaatagaatagacttgcctccctccacggctttgaccatgtccataattaactttggctactttggtgacaaaaagtggtatcatcagcatgagctacttgtcggtttctacttcagtcgcagcatccgcatcacggcgccactacgactgggaaatggaaatgatgtttctcaacgaagacggtttaatgaatacaaaactttgaccctggagaatgacaagttgcgaaatgaatgcttacaatacgagggatcagagaaacaacttgtcctgaaggaacaaaagctccgatctgaaattgctgaggtggaaaagaagtatcaggaattgttgggagagctcagatcattggatgtgaagaaagagaaacaatgaactctccacttcagcgcctgttgtacaattaattgctcttttttctttcctgacctgtgaagatgatgactggattacttcccgagacgtgcagggaactggtcccttggacaaatgttatctaccgattaccattcgcttggtagtttcgttggatagctgtagaggtgtaatttcgtttcactaatcttcctagggtcctgtgatggtggaagaaagtgagcatgtagtctgttgtaaaattatgcaacttgtatctgaatgtacagcagcggtttcaatgttaatggccctctgtttccagcagcacatctcggtcccgtgtcaaaagaggtggattttgatccggcactctggagtctggactctggagtggatacttagaattagacttcatatgttgtgcagtatgtaaaattacttttcgtactcgtgacagtcttaaactggtggttgtgttgtatttgagacgaggggggttagtcaagcctttgttcactccaacagtacattgtaactgtacatgagtgatggtgggtatcagctgtttggttgctgcattaatttattttccaaacctctta

SEQ ID NO: 3228 - DNA, 811 bp, Zea Mays
caaagatcctaagaaacagtttctggtttttggagctagcagagccagaagttaaatcacgtcttgatacgtacaagcaaaattctgaagctattcttcctacatactctgatttgcttaataaggttcttgtgtattcctagtcatcaccagagcaacccaaagtatagattgaaagtaattctatgttgctatattgtgcaagaatatagattgatggaaactgcccagccgaagttgtttttcaggcgatagatttcctgttacagaagatctgtgagaacacttcagcgagcaagttgaccaaaacaaatggagtggcgtggaattccaacgaggttgaataacattccacattctagggaaattagggaatacttctacaacgacgtgttaaaagctacaaaacttgctattgaagataaaaagactcggttgcagatagatatcaatattcctgaacttaaccctgaaatggatgtttaccgcataggaaccctcatggaacttgtaagagaactttctctatcctttgcagatgatgggaaacgtgtcaaggtctgtgttcaaggctccatggggcaaggtgcatttgctggcatcccacttcaactggcaggaaccagaaaaattttggaattcatggactggggtgactatggggcgaagggcaccttcattaatattggagcagtaggtgtgtatgtgttgcccacttattctatacttcagacaatatcaattatcaaatgaaacgaagcatcgtagctttaggttgaatcatcatgcttgtgtacctaggtcgcctcca

SEQ ID NO: 3229 - DNA, 1180 bp, Zea Mays
aactacgtttcaggtctgggactaaggtgccaggccgcggaggaggcaccaccgccggcgcggggtaagacttcgctcaaggtgatgatttcgggagctcccgcctcgggaaaaggaacgcaatgccgcatgatcgtcgagaagaaattggcaagaaagcaaaagaatacatggacaatggaaagcttgtgccggaccaagttgtgacagatatggtggtatcacgactgtcacaaccggatatacaagaaagagggtggcttcttgatggttacccaaggagcttcagtcaagcacaacaccttgaaaatttgaaaataagaccgaatatattcattgtgctagaaatgtgttggaagacggctggatcctgtgactggcaagatttaccatttaaaaaactaccccccggagaatgaggagatttctgcccgacttattacacgttctgatgacacatttgagaaggttaaatcacgtcttgatacgtacaagcaaaattctgaagctattcttcctacatactctgatttgcttaataagattgatggaaactgcccagccgaagttgtttttcaggcgatagatttcctgttacagaagatctgtgagaacacttcagcgagcaagttgaccaaaacaaatggaaaacgaccagattctgcggatacaggttcaaaaaatgagtggcgtggaattccaacgaggttgaataacattccacattctagggaaattagggaatacttctacaacgacgtgttaaaagctacaaaacttgctattgaagataaaaagactcggttgcagatagatatcaatattcctgaacttaaccctgaaatggatgtttaccgcataggaaccctcatggaacttgtaagagaactttctctatcctttgcagatgatgggaaacgtgtcaaggtctgtgttcaaggctccatggggcaaggtgcatttgctggcatcccacttcaactggcaggaaccagaaaaattttggaattcatggactggggtgactatggggcgaagggcaccttcattaatattggagcagtaggtgtgtatgtgttgcccacttattctatacttcagacaatatcaattatcaaatgaaacgaagcatcgtagctttaggttgaatcatcatgcttgtgtacctaggtcgcctcca

SEQ ID NO: 3230 - DNA, 1506 bp, Zea Mays
ccgtccacacaacgcacgcgaggtccatcgctcctcctctccgtcaccgagaaaatgtcggtctcctccccggccatggcctcgccccctctcgccgcgcccggcactcaccgcggcccctgcttctcgaccctctgccgcttaccgtcgccttcctgctacccgcctctttcggcttcctcctcaccggctatctccaccgtctccgcattcgctgtcctcaaacacaagcccagaggtctgggactaaggtgccaggccgcggaggaggcaccaccgccggcgcggggtaagacttcgctcaaggtgatgatttcgggagctcccgcctcgggaaaaggaacgcaatgccgcatgatcgtcgagaagtatggtttagttcacatatcaactggtgatcttctgcgagctgaagtatcttctggcacagaaattggcaagaaagcaaaagaatacatggacaatggaaagcttgtgccggaccaagttgtgacagatatggtggtatcacgactgtcacaaccggatatacaagaaagagggtggcttcttgatggttacccaaggagcttcagtcaagcacaacaccttgaaaatttgaaaataagaccgaatatattcattgtgctagaagttcctgatgatgttctaatcgacagatgtgttggaagacggctggatcctgtgactggcaagatttaccatttaaaaaactaccccccggagaatgaggagatttctgcccgacttattacacgttctgatgacacatttgagaaggttaaatcacgtcttgatacgtacaagcaaaattctgaagctattcttcctacatactctgatttgcttaataagattgatggaaactgcccagccgaagttgtttttcaggcgatagatttcctgttacagaagatctgtgagaacacttcagcgagcaagttgaccaaaacaaatggaaaacgaccagattctgcggatacaggttcaaaaaatgagtggcgtggaattccaacgaggttgaataacattccacattctagggaaattagggaatacttctacaacgacgtgttaaaagctacaaaacttgctattgaagataaaaagactcggttgcagatagatatcaatattcctgaacttaaccctgaaatggatgtttaccgcataggaaccctcatggaacttgtaagagaactttctctatcctttgcagatgatgggaaacgtgtcaagccacttgataccaggtctgtgttcaaggctccatggggcaaggtgcatttgctggcatcccacttcaactggcaggaaccagaaaaattttggaattcatggactggggtgactatggggcgaagggcaccttcattaatattggagcagtaggtgtgtatgtgttgcccacttattctatacttcagacaatatcaattatcaaatgaaacgaagcatcgtagctttaggttgaatcatcatgcttgtgtacctaggtcgcctcca

SEQ ID NO: 3231 - DNA, 3043 bp, Zea Mays
cgccacgcaacccacactgtctctgtcctcgtctccctctcccctcctagctctagctggataggtgggctctggggaggaggaggagggtagctaggtagtagctgcctataggcctcggcccccattcatggccattaccacgatgtgtcaccccaccacaccgccctctccgatgctgcctccctcatgataaccctctccctggtggttgttctttgccttgttgccgtgcagcctccacccccaccctcctcattaatcacttgctagctccctgcctccctcccggctcccgctcccccttctcgtgcttcgcgcccccgcagcagccatggcggggatcgacctcaacgacaccgtggaggaggacgaggaggaggcggagcccggcaacgcctgctcccagcagagccggaccagctccgcggccacgttcccgccgccgccgccgaaccagccgaggccgagcgccgcggtgtgcctcgagctgtggcacgcctgcgccggccccgtcgcgccgctgccgaggaaagggagcgtcgtggtgtacctcccgcagggacacatcgagcacctcggcgacgccgcggccgccggcggaggcgcgccgccgcccgtcgccctgccgccccacgtcttctgccgcgtcgtcgacgtcactctccatgcggacgcgtccacggacgaggtgtacgcccagctcgccctcgtcgccgagaacgaggatgtcgcgaggcggctgcgcggacggtcggaggacggcagcgccgaggacggcgacgaaggggaaaccgtgaagcagcggttctcgcggatgccgcacatgttctgcaagacgctcacggcctccgacaccagcacgcacggcggcttctccgtgccacgccgcgccgccgaggactgcttcccgcctctggactacagccagcagcgaccgtcgcaggagcttgtggccaaggatttgcacggaaccgagtggaggttccgccacatttatcgagggcagccccgcagacaccttttaaccactggatggagtgcctttgtcaacaagaagaagcttgtctcaggggacgccgtactatttttgaggggtgataatggggagctaagacttggagtgcgccgtgcagctcagcttaaaaatggatctgcttttccagctctttataaccagtgcttaaatcttggttcactacctaatgttgcacatgctgtggccaccaaaagtgtgttccacatctactacaaccccagattaagccaatctgaattcattataccattttcgaagtttatcaagagcttcagtcaaccattttctgctggttcgaggttcaaagtgaaatatgagagtgatgatgcttctgaaagaagatgcacagggatcatagcaggaattggtgatgctgaccccatgtggcgtggttcgaaatggaaatgtttgatggttcgatgggatgacgatgtagattttcgtcaaccaaacaggatttctccttgggagattgagctgactagttcagtttcaggatctcacatgtctgcaccaaatgcaaagagactgaaaccatgtcttccccatgttaatccagactacctagttccaagtcttgcaaggtcaagaattactgggttatagaactcatgacaatgctgctgttgcaacttctcagccatgcgaagcaacgaacatgcagtacattgatgaacgaagttgctccaacgatgcgagtaacattatcccgggggttccaagaattggtgtcagaacaccactcggaagccctaggttttcctaccgttgctcaggctttggggagtctccaagattccaaaaggtcttgcaaggtcaagaagtatttcatccctacagaggaactctggtcgatgcaagcttgagtaatagtggcttccatcagcaagatggttctcatgtgcctactcaggccagcaagtggcacgcacagctacatggatgtgcttttcgtggccaacaagcaccagctgttccatctcaatcctcatccccaccatctgtcctgatgtttcaacgaggtgatccaaagatgtccccatttgaatttgggcatttccacgtgaataagaaagaggatagacgcgcaatgtttgtccatgctggaggcatcggaggaactgagcaaacgacgatgctccaggctcatcatgtttctggaggaacgggaaacagagatgtgaccgttgagaaatctcatcccgctgttgccgctgcttcagacaacagggaagttagcaaaaacagttgcaaaatatttggcatatctttgaccgagaaggttccagcaatgaaagaaaagggctgtggtgacatcaacaccaactatccatcccccttcctgtctttgaagcaacaagtgccgaaatcgctgggcaacagctgtgccaccgttcatgagcagaggcctgttgttgctagggtgattgacgtttcaacagtggatatgatgatctgatgtattggaaaactgtcctggaggctgtgttgcgtagtgtggacagtgtcggtttgatggttcggtatcgtgaagacgggatttgattgaggatctggccagatttgtatcctagttgtagctgttagagcactttgtatgacaaccgtgagtgctccgtgttatcagcactagttgctgctcacaacttgcctctatgttcataatctgtatgccatgtcagacccatttatagagggtttgtttgcttggcatagttctagacttaaagcattattatgagaacaaatttgctctgcaccgtatctttcttactttcaagttggcaacggattaacggtggaggagatgatctgagaggttagttgtgcgacgtattaatggtgttacatatattatgcttaggagcattctgccagctcatttatcatatacatgtcagcacttgatttgttaagtgtagttagtagccttgcactttggattggagctatcctcttagggtgtgtttggttggagagttaaataaaatgaatgaagtggtt

SEQ ID NO: 3232 - DNA, 4125 bp, Zea Mays
cgcccccaaacctccccgtcgcggcgccctccccgccttcccattcccggccccgcccgcccacatctagtctcccacctcgccctcgcggcgccggtgtagcagccatgctagtctccgtcgccgccgacgactccggctggcaggagtccccgtcgcaggccgtcctcttcgccgacgagatcgctgccgtccgcgctgtcctgggcgggaccctctccgaggccagcatcattgccgcgctctcccagtgcggtggcaacgctgagcgcgccatcaacgcgatcctcgacgacgccgaggtcgtttccgcccccaagcgggccaaggtcgagctcgacgtcggtggtgttccggtgcaggtgccggtagctgtcaaggtgaaggccgaatccatcgacgtcggggccgtggcgccggcagctgtcaaggtgaaggccgagcccattgacggcgatgtcgtggggagccaacaatccgatggctcctccgcgaaggccaccgccaagatgaagagcgagccggccgaatggtccgccaagacacccgaccgattcgtccccgacgcgcgcagtgtaggtgcgcctgtggcggtggcgagcgccggcgccggcataagcatcgtcccgcggcagaataagaggccgaggcaggaggtggggaccatcgaactcactaccacgcacccggtgccgtacctcaactcgcggcccatccgggcgctgccacccatgccacccatgggcggggacggggaggtgtacgacccgaagcctatccagatggtgccgcccctggaaatccagatgcacgatccgaggaccaccctacctgcgccgtcacccatcgacatcgagatgtaccaacaaccgccgcggccgccgcccgtggacgtcgagatgtgcgagcagaggtcgcggccccggccccggcccctcagggcggttgtgcctgcctcggtgacggacatgaggatggtggtggcgccaccggacggcgagtttggcgacttccctgtggagcgcgactggatgctcgtcggcaagtcctatgtgcccgggctgtccaccaaccgtgggaggaggaggttggacgctggggagattgtccatttcgccttcccttcgtacgagaagatctatggcgggttaaagatgactgccaagaaggcggcggctctggcacagattgttcgcttttccaccaaacgagccggagagattgggaagctgtccccagagtggacgcaatgccttgtcccgcttgtcaactcgtccaaggtgaagattcaggggaagctcgtgttcccaacaatggagctgaggctgatgcaggagatattgctctatgttagcttctacatccacaaatctgtgctagccgaaatggacaactcaccctgtgacatgctcgatcatgcaaatgttgatttcactcccagtcctctccataaattgcttagtttgctcaacctaaagccatccaacaaggatgctttctcccttgacgatctcaccactagaaagctgaagcaaattctaaggggtaacaataataatggtgatgattctactccggtgcttggccatacatttctcgagcaaggcgctgatgagcaggcgatttcagaggctgccttgaacaaacttgttggcactgctgaaacatttgacttagaggaagcagagcctcccactacccttgtctctgttctaaagccataccagaaacaagctctcttctggatgtctaaattggagaagggaattgatgctaatgaagagacaaaaactcttaatccgtgttggagtgcctacaatattgcagacaggagagctcctccagtctatgttaatctttttactggtcaagcaacaacacaatttccaagtatgactgagactgtaagaggagggatactagcagacgcaatgggtcttggcaaaactgtgatgaccattgctctgatactttccaatcctaggggggagttctctaactgtataaaaggagacacaaggtatctaggagatcgtgcgaccagaggatacacctcaacatcctctgtgagaggaggtacccttgttgtttgccctatgtcattattgggccaatggaaggatgagttggaggcacattcggcacaaggagctctttctgtgtttgtgcattatgctggtgataaaactagtagcctcatgctgatggctcaacatgatgtcgttttaacaacctatggtgtcctctcagctgcatgcaaaacggaatgcaacagcatttttcacaggatggattggtataggattgtgcttgatgaagctcacacaatcaaatctcctaaaactaaaagtgcccaagcagcttatagattaaagtcggaatgcagatggtgccttacaggcacaccattgcaaaataatttggaggacctctacagtcttctctgcttcctacatgttgaaccatggtgcaatgcaaaatggtggcagaggcttattcagaaaccttatgagaatggtgatgatagagggttgaaacttgttagagctattcttaggccactaatgctaaggaggaccaaggaaacaaaagacaagattggcaatcccatactggttctacctccagctcgtattgaagttgtagagtgcgaacaatctgaacatgaacgtgatttctatgaagcacttttcaggagatcaaagtttgacaaatttgtagcacaaggcagtgttctgaacaattacgctaatattctcgagttacttctccggctaaggcagtgctgcgatcacccttttctggttatcagccgagctgaccctaaaaagtatgctgacctcaaccagcttgcacagcaattccttgaaggggtgcagcagagttcgtctggaagacagaacgtagtgccttcactggcttatgtagaaggggtcgtcgaggaaattcgccagggtgctacgatggagtgccctatctgtctcgagtcagcttcggacgatccagtgctcacgccttgcgcacaccggatgtgtggcgaatgccttgtttctagctggaggactccagacggagggccatgcccactctgtagacgtcacatcagcaagtctgacctgatcatactgcctgctcagagtcgtttccaggtggatgccaagaacaactggaaggactcgtgcaaagtgaaaacgctcgtaacgatgctggagagccttcagaggaagcaggagaagagcatcgtgttcagccagtttacttccttcttcgatcttctggagatccgcttcacccagaagggtatcaagttcttgaggtttgatggcaagctgagccagaagcacaaagagaaagttctgaaggagttcagtgagagccaggacaagctggtgctaatgatgtcgctcaaggctggaggtgtagggctaaatctaactgctgcctccaacgtttttatgatggatccgtggtggaatccggctgtggaagagcaggctatcatgagaattcaccgcattgggcagaaaagagaggtccgagtcaaacgcttcatcgtcaagggtactgtcgaggagcggatgcagcaggtccagatgcgcaagcagaggatggtttctggggcgctcaccgacgaggagattcgtggcgctcgcattgagcatctcaagatgttgtttaaataaatgatcattgccgatgtgtatagctgacgctacgccgttgatactttggtagtgtcaagtaggttgtcgagggcatgtttggtaggagtaagatctgggtttagaccattgtagatggggatggccggatgggagtgggtggaaccttgcccttccgatatgacggtcttcctttctaacgtgaatcagactggcatagagaatgggcattttggaaaacatgactacgataaatcacttttctcttgagtcttggattgcaggtgttaatctgtcatgttgttcttgttttactccctaccctttctgtatgctgtgccttttgttctctccttcagacttcccaggaatactgattctagtatgtccactaaggtatcttttgatcttgaaacatcatccttcgtggctgttgatggcatataatagaaaagcttttggg

SEQ ID NO: 3233 - DNA, 1465 bp, Zea Mays
gtgtgatcttttaagatctggacacgaatagaactgatctggtcgttctcgtccaagacggaatcagacaagaatggaaccacagatcaggtcgagaagattgtcaaaaccctgaatgaaggacaggttcccccttcagatgttgtggaggtcgttgtcagccctccttatgtcttccttcctgtggtcaagagccagctgcgccaagagttccatgttgctgctcagaactgctgggtgaagaagggaggtgctttcactggtgaagtcagtgctgagatgctcgtcaaccttggtgttccctgggtcattcttggacactctgaaaggagagctctgctgggagaatcaaatgaatttgttggagacaaggttgcgtatgccctgtctcagggactaaaggtcattgcatgtgttggtgagacccttgagcagagggaggctgggtctaccatggatgttgttgctgcacaaacaaaagcaattgctgagaagatcaaggactggagcaacgtagttgttgcctatgaaccagtttgggctattggaactggtaaagttgccaccccagctcaggctcaggaagtgcacgcctccctgagggattggctaaagaccaatgccagccctgaggttgctgaatctactaggatcatctacggaggctctgtaactgctgcgaactgcaaagagctagcagcacagcctgatgtcgatggttttcttgtcggtggagcttctttgaagcctgagttcatcgacatcatcaacgcggccaccgtgaagtccgcttaagatgctacgctgaagacgaacatactttttttttgctcaactgtgctatgtaagctagtagcttttgcgcaggagcagagactgttttgcctgcccccaacttctagcttgagcttgctaataatgtttacctctggacgtatcaataatggtgcttatgtatccccttttttttgtgccgaattacggtggatccgtcatctgaaccatgggtttggtgtatgtaattgcgtcacccgatgcctagggtgtgagactgaagtttttggacatttgggacaaggtagccttgtgcccttgtgccccacattggtcgaatgctgccaaaactgtaccggtcatctgtgctccgtacggattagcctgatctgcgaatgcaacttgtcagctaatcgttgcacggaggcagccagacaattattgtacgatatatattcgatctccccaggcataggggattgaatatctattcttgtttttacaaatgaaatacggatccaaacaatgtccaaaactattgtttacttctttttttttaaaattaaatacacatacgtacaagaatgggcgtggcttaattagtgggatgaaacctgtcgattcaagataagtcggcatgggtggtctcgtattcctagaactagcaaagtatagatataaaccaaaaaga

SEQ ID NO: 3234 - DNA, 3730 bp, Zea Mays
gatttagtttaaatatgaactagcggacggcaaatattaaatatctggaaatggaggtcgtattaattaggtttaataatttcttctcgttgtttagtcttcatctatattattagttttataactaaactatatttaatatctatttaatatctgtaattgacattcaaaatttttatatgatccatactataaacttttagttagggaccaaacacacactttaaacaatacaaaaaaaaccccaaagtcggctctctcgagtctgctcgaatcttgatccaccacaacacgcggttccccgagtcgaaggctcgaagcagcagagccagcagcgagccgccgcccgccgccgatggcgtccccatcgccggcttccgcgcggccgcagcgctctcctgacgaggtggaggacatcatcctccgcaagatcctcctcgtctccctgacgcccccggccaaccccagcccagccgtcgcctacctcgagctcaccgccgccgagctcctctctgagtcgcgccctctcctcgccctgcgcgatgccgccgagcgcctcctcatcgaccgcctctcgctcccggacccgcccgccgggtccccgacccctttcgcctacctcgtctccgctttccgccgcgccgccgacgaggcgcgtaagatctccaccatccgcgacgccgctctccgggcgcgcctcgcagcctccatagcgcacctccgggccctcatcctctcctacgcgcgcatcgtcgccgggaatcccgacaccttccccaccccgcccggcgcgcaacaccccgcctccgacctcctcgtattcctcctcgctgaggcagccgacccgctcgaccccaccccggcccccggggcgccgccgccgccgggcttcattgatgagttcttaggcagcgcggactatgactccatcgagccggccatgggggagctatacgagctccttaggcagagtgtcgataaggtttcggccctcggtgactttcagcgcccattgcggttgctcaggcggcttgtggggatccccaattgtgccaaggccctggttaaccatcctaagtggataccaaagaatcagatcatgctcattggggaagggagggtcatggagctatacagtgtactcggggccttcttccatgtaagcgccatccgagaccgagagttcgctagcaagcctgatgtggggcaacagtgtttctcagaggcatcttcacgtcggccagctgacttgttgtcatctttcacaacaatcaagagtgttatgaatggcttgtatgatggccttaaagatgtccttttaatccttctaaaaaatttggatactcgagaaaaggttcttgagtatatagcagaagtgataaataaaaatgcatccagatctggcatgcaggtggacccattaaaatgtgcgagttcaggtatgtttgtgaatcttagcgctgtgatgctccgtctatgcgagccttttctggataacatggaagcaaagaaggataagattgatgtcaattacctcttctgcaacaatagaattgatttcaaagatttgacagctataaacgcgtcttcagaagaagtctcgtcttggatagagagcataaacaatgagcatgctcaaaataatgccagtggagaggctcgatttgcggaatcacaggaagccacaagctctggcaaaaatagtacggcctcacaacttaggtgctcaaagaaggagaatttctcatttatttgcgaatgtttcttcatgacctcaagagtacttaatctcgggttgatgaaagctgtatcggacttcaaacatatttctcagcaactttcaaggttcgaagatgatttggaatcaaacagagcagtgagagatcaaggagggggttcaccgcagcttgagcaagatataactcgcttggagaaaattgtcgaaattttatcacaggacaaattctgttatgaagctcagatactacgggatggtgcattccttcaacgagcattatctttctacaggttaatgatactctggtcagttaacctagttggcggatttaagatgcctttgccatcacaatgtcccaaggagtttgcttgcattccagaacattttcttgatgatgcaatggatttacttgttctaacctctagaattccaaaggctttggaaagctttgtattggatgactttctcagcttcatcattatgttcatgggaagcacatcttacattaagaatccttacctaagagcaaagatggttgaagttttgaattgctggatgccacaaagaagtggcttgaattctacagcctcattgtttgaggggcaccaactgtgtcttgactaccttgttggaaatcttctaaagctttatgtggatattgaattcactggctcccatacacaattttttgacaagtttaacattcgacataatattgctgagcttctggagtatttatgggatgttcctagtcaccgaaacgcatggagacaaatagctaaagaggaggagaagggtgtatacttaaattttcttaactttctcataaatgatagcatctatcttcttgacgagagtttgaacaaaattcttgaactgaaagaaatagaggctgaaatggctaacatagttgagtgggagcgcagacctgctcaagaaagagaggagcggctgcgtgtatttcatcagtgggaaaatattgttcgttttgacatgaggctagccaatgaggatgttgggatgcttgcattcacctctgaacaaattccagcacctttccttctccctgaaatggtggaaagggttgcgagcatgcttaattacttcctcttgcaacttgctggtccccagaggaaatctttgactgtaaaggatccggagaagtacgagttcaagccgaagcagcttttgaaacagattgccaccatctatgtccatatctcaaggggcgacaaggaatctgtcttctcagctgcaatctcgaaagatggcagagcatacaatgatcagttgttttctagtgcggctaatattctgtggaagattgggggtgatcccaaaatcatacaggagtttgtgcaacttgctggtagggcaaaagctgctgcttctgaagctatggatgctgaggcaatccttggggacataccagatgaattcctcgatccaattcagtatactctaatgaaagatcctgtgacactgccatcgtcaaaggtcacagtagaccggcccgtaattatcaggcatctgctgagtgattctatccatttaaccgctcccacctcactcaagacatgctgataccaaacacggagctcaagttgcagatcgaggagtttgtccggtcccagcagtcgagaaagcgaactgctgcggcgttgttggagattggcgaagcggagggtactgatgatatggccgaatgaattgtgccaggagcaggggatggacacattttttttgtggggaaagagtgatggttaattcacatgaaatgtatcggtccatctgtccgtataaagttggtttcccggcttgtgtccctgttgcctcgattctttgtaaatattgtaggtgcacacctgatacaaatgtagttatagaggaagcctgtcagcccgtctcatcaacaatgtgttttacgatatccccactacaactttttttaacacgatattatcactataacttgatatgtgtgttgggctg

SEQ ID NO: 3235 - DNA, 2426 bp, Zea Mays
ttctcaggtgaagacaaagccctagacctcctctccggctctccctcccctcttctcccttctctctctctctttctcgggatagccaagggaaagggagaacaaaatcacagtacaaaagcaggccacaaggacaagatcttcctctggactgggggattctcacacccatagaaactgaacctactacactgtcatatcacacaagaagagagcttcagcgtgtgagcaagagcaactctcagaaaagaaacaactagtcaagagtcaagactgcctgcggcctgcctgccctccaaggctccaactctccgaggctccaaagtccaagctacttcggcgtccctgactgggcttgtggtctcagtctcagcccttcgttgccgcagagaaccctcagtagttccggttgctaattaattaatcgacgagaagtaggagggagcgctgatcgtgtgtgtgcggcatcgcaggatgggggatactagtagttctagccattcaaggcaggatccttctcttcttggctatggcttccatggcgccatcgccaactccactcctcctgcaaacttctttgaccaaggaggaggaggcacctatttcggagagctggaagaagcgttcatgcatcaggtcgcctcgctcagaagaactcaacaggctgcaaccgtctctgcacctcatcatggagacaccaagccctttcccactgctgctggtgctacagctgcaacggctacggctacggctaggccacctcctacactggacatcttcccagcttggcctatgaggtctcgtcttcacacgcccaagacagcacagacgactcggagagcagcagcaagaaccacagcaaccactcctcagaccagctcggagcagcagcagcagcaaacatggcgagccagttcgagcaagcttcacagcagcagcttcagcacaaaaatatggctacaagttccactccaagaactggcaaggctcttgatccaaaggtaatcagaaggctggctcagaatcgtgaggctgcacgcaaaagccggctgcggaagaaggcgtacattcagcagctcgagagctgtaagctgaagctttctcagatggaacaggacatgcagcgagcccgtacccagggcctctttcttggaggagatccgggtgcaagcaccagttcaggtgccgccatgtttgacgtggagtacgcccggtggctggacaaccacagccggcgcctggccgagctgaacggagccctacacgcgcacctggcagacggtgacctcagagccatcgtcgacgacgccctcacccaccacgacgagctgttccagctcaaggccatggcggccaaatccgacgtgttccacctcatcactggggtgtggacgacccccgccgagcgctgcttcctctggatgggtggattcaggccctccgatctgctcaagacactgctgccccagctagatccactgacagagcagcaagtggtcggcatatgcagccttcagcagtcatcacagcaggcagaggaagctctctcgcagggcttggagcagctgcatcagtcgcttgctgacaccatggccggtgggtctctgactgacgacgccaacatgagcttcatgagccaaatggctcttgccctcggcaaactggccaaccttgaaggctttgtgatacaggccgataacttgaggcaacagactcttcatcagatgcaccggattctgacagttcggcaggcagctcgatgtctcttggcaattggcgagtaccacaaccgccttcgtgccttaagttccctctgggcttctagacctcgagagatactggtgaccgatgaaggcaattgtgagataagcatcgcagcacaaccatcccaaaaccaattttcaaccttctgactgacacatgttgtggaactaaccctcagcataggagcaagagaaaaatgactgggaagagaatgactgggaagagagattgtttggatgcacgtagcagatatctgagagctacagaggaaagctgggaaatagaagaagctctaaaacaaggagtgtttctggaaattctttagttttcaaaaaacactttctgaaaatgtgtgtacaagaaaattccaggaaggtgaaattgcttcattgactgcagtgggaaggggaaagagagaagctagaatctcatgtcgagtactccagtacaatgtgttcttttgtctggtctaaattcttgtaacagctcttcctatgatggaagaatccattcaacaattccacctatgattactggattgagtatgttgaataggttggttgaggctatctagtaatttttatgactatgtttatccattatctaggactatttggttactatattatataatctttatcatatatacatccatttagttc

SEQ ID NO: 3236 - DNA, 2833 bp, Zea Mays
ttctcaggtgaagacaaagccctagacctcctctccggctctccctcccctcttctcccttctctctctctctttctcgggatagccaagggaaagggagaacaaaatcacagtacaaaagcaggccacaaggacaagatcttcctctggactgggggattctcacacccatagaaactgaacctactacactgtcatatcacacaagaagagagcttcagcgtgtgagcaagagcaactctcagaaaagaaacaactagtcaagagtcaagactgcctgcggcctgcctgccctccaaggctccaactctccgaggctccaaagtccaagctacttcggcgtccctgactgggcttgtggtctcagtctcagcccttcgttgccgcagagaaccctcagtagttccgctgcaggttgctaattaattaatcgacgagaagtaggagggagcgctgatcgtgtgtgtgcggcatcgcaggatgggggatactagtagttctagccattcaaggcaggatccttctcttcttggctatggcttccatggcgccatcgccaactccactcctcctgcaaacttctttgaccaaggaggaggaggcacctatttcggagagctggaagaagcgttcatgcatcaggtcgcctcgctcagaagaactcaacaggctgcaaccgtctctgcacctcatcatggagacaccaagccctttcccactgctgctggtgctacagctgcaacggctacggctacggctaggccacctcctacactggacatcttcccagcttggcctatgaggtctcgtcttcacacgcccaaggagtgctcgaatgtgacagcagacagcacagacgactcggagagcagcagcaagaaccacagcaaccactcctcagaccagctcggagcagcagcagcagcaaacatggcgagccagttcgagcaagcttcacagcagcagcttcagcacaaaaatatggctacaagttccactccaagaactggcaaggctcttgatccaaaggtaatcagaaggctggctcagaatcgtgaggctgcacgcaaaagccggctgcggaagaaggcgtacattcagcagctcgagagctgtaagctgaagctttctcagatggaacaggacatgcagcgagcccgtacccaggttcacttcctagttcctaccccttcagctttgtttgggtactctagtattgacctcaatccacatgtattgagctaaattgagatttcacttaaattaatttacatcctaatctacctcaacacacatatggattgaggatttgaggtcaatattagagtaaccaaacaaaaccttctgtttccctgttagcttctgactgaacatctcaaattctgcaccgatggaaatatgaagttctgtgtgtcctgtcctaaacctttcagggcctctttcttggaggagatccgggtgcaagcaccagttcaggtgcctcatctgatgatacatttctcggcgttctcttcagctgtgtacataccaactgccacggtatgccatttctctctgactgacgagtgacgagtggtgtacgtgtccaggtgccgccatgtttgacgtggagtacgcccggtggctggacaaccacagccggcgcctggccgagctgaacggagccctacacgcgcacctggcagacggtgacctcagagccatcgtcgacgacgccctcacccaccacgacgagctgttccagctcaaggccatggcggccaaatccgacgtgttccacctcatcactggggtgtggacgacccccgccgagcgctgcttcctctggatgggtggattcaggccctccgatctgctcaagacactgctgccccagctagatccactgacagagcagcaagtggtcggcatatgcagccttcagcagtcatcacagcaggcagaggaagctctctcgcagggcttggagcagctgcatcagtcgcttgctgacaccatggccggtgggtctctgactgacgacgccaacatgagcttcatgagccaaatggctcttgccctcggcaaactggccaaccttgaaggctttgtgatacaggccgataacttgaggcaacagactcttcatcagatgcaccggattctgacagttcggcaggcagctcgatgtctcttggcaattggcgagtaccacaaccgccttcgtgccttaagttccctctgggcttctagacctcgagagatactggtgaccgatgaaggcaattgtgagataagcatcgcagcacaaccatcccaaaaccaattttcaaccttctgactgacacatgttgtggaactaaccctcagcataggagcaagagaaaaatgactgggaagagaatgactgggaagagagattgtttggatgcacgtagcagatatctgagagctacagaggaaagctgggaaatagaagaagctctaaaacaaggagtgtttctggaaattctttagttttcaaaaaacactttctgaaaatgtgtgtacaagaaaattccaggaaggtgaaattgcttcattgactgcagtgggaaggggaaagagagaagctagaatctcatgtcgagtactccagtacaatgtgttcttttgtctggtctaaattcttgtaacagctcttcctatgatggaagaatccattcaacaattccacctatgattactggattgagtatgttgaataggttggttgaggctatctagtaatttttatgactatgtttatccattatctaggactatttggttactatattatataatctttatcatatatacatccatttagttc

SEQ ID NO: 3237 - DNA, 854 bp, Zea Mays
caaagctattgcccagccctggagtctgacgacctcgtttccctgctgtctcgcctctctttcggttctcacggcgacgactgggcgagcgccgcctcccctccctcgctccgtgaggtcctcgccggcgacgagtgccgccgcccgtttccatgttttttccgccgattagtgtccaccaggggaatatagacacagaattttttgaacattgatctgtagccagtgctgcaatggctacaaagcttgtggttctcggtatcccctgggatgttgacactgaagggttacgagagtacatggccaagtttggacccctagatgattgtgtcgtcatgaaggagcggtcttctgggcgatctcgtgggtttggctatgtaacattcgcatcagccgacgatgcaaagaatgttcttgattgcgagcatgttcttgggagccgtacattagaagtgaagatagctactccaaaggaagaaatgaaatcacaaggaacaaagaaagctacaaggatatttgttgctcgaattccacagtcagtggacgagtcgatgtttcgtaggcattttgaagcttttggagaaattcttgatctttacatgccaaaggaacatggttcaaaggggcatcgtggaatctatcattttgtttcatgttgtgattttggatttgtcgtgattcacattattgacaagatgaaggcagtccttgtagttactgtatggaagtgctgtatgtgtaataaaaaagtatcatttgcgaaaaaagttataacgccatcagacgaggtgcctgcacgtttatatacactcgctctgttccagtatactgttacttctacttctttatttttg

SEQ ID NO: 3238 - DNA, 2570 bp, Zea Mays
cgcgattctattctacgccgctataatcagtcgtgcggcgtcgtcggcgaccttgccgcctgcggcgcggaccacgcggttattatacagctaaccggggctttgagctacagccttctcttgtggggaggcatccccgtcctctacttcgtcgctgccctctgctgcgcctggactggcgtggagtggagatccatccacccgcacttgccacgatctcttccttctcgtagttggttgcggatttgcttactttggtgcgccgcccggcaatccaaacaatcctgcttgggttcgattcgcttcgccttcgtcttcagcgctcaagatcagtttagccgaggtgccgggcgcggtttggctgtccggaggcttttagagttactggaaccccgatgccccaagtgaagtccagctacgatggcgccggcggggactacattaagtggatgtgcggcgccggcggccgcccgggcggcgccatggccagcctccaccgcggggtgggctcccttgttcgtgacatcagcgacccctgcctcaatccctccccagttaagggaaacagaatgctgaaaccagaaagatggcacgcgtgttttgacagtgacgggaaggctatatgtttccgtaaagcccttaagttcattgtcttaggaggtgtggatccttctattcgagcggaagtttgggaatttcttattggctgctacaccttaagtactacagcggaatataggggaaaactaagagctgctcgaagggagaaatatcgttatttaattaagcaatgccagagcatgcatacaagcattggtacaggtgagcttgcatatgctgttggatcaaagctgatggatgtcaggaccttgcccaaagaaactgaaggtggagaagtcagcacaagtcagcaagctgaacatgaagtgccttgcagtttagcagaaaattcgaatttgatttatggttctggttgcacaacgcggccccataaaaggaaaatttgtagtaaatcagctgaaacagttggtttcaatcaacataatgataactctagaggttctggagattgtgatgtcattggtgaaccaaggtatgacagtgatgccttcatcgattttccttccctaactggtacaaacttggtcgcaaatggtgacggggatagcaatggagttgaagaaaatccttgcaatttcttggtctctgaacatagagtaaggccccatgatgaacacatgcacagcttccagatcaataataacatagatctcataatagagtcaaatacattctccaatgatatatttcgacctagcagtagtgactcagccatctttcactcagatgcgtacaagcatgatagatggttagacgatactggctatagtgaagaaattatagattccttgaggatatctgatgcaccagaatcagatttagttgatggaatgaaatcaaatggttcaatagctgacaaagatagagtctctgaatggctttggacactgcatcgaattgtggttgatgtggtgagaacagatagccaccttgatttctatggagaatcaaggaatatggctagaatgtctgatatacttgctgtttatgcatgggttgatccttccactggatactgtcaaggtatgagtgatctgctgtcaccttttgttgtcatatatgaggatgatgcagatgccttttggtgctttgagatgctactgagaaggatgcgtgaaaatttccagatggagggaccaacaggagttatgaagcaattgcaagcattgtggaagataatggaactgacagatgctgaattatttgaacatttttcggcaattggtgctgaaagccttcattttgcttttcggatgctgctagtcctttttcgtcgagagctgtcctttgaggaatcacttatcatgtgggagatgatgtgggctgctgattttgatgaagaagcagtcaggcatttagaagagaactgcctagaaccattgctagtagatctgagcaatggcttatcatctgaagtcaaagaagtgcatcggatcaacagttccacaagaagaaaacccagaaccaggaaatgccatagtagaaatggtgaaatctgtggagcttgccaccctggaatgaaatctagtacaagaaatcatctctgtggcttgtccggtgctacaatatgggcaagacctcagcagatgccacatccaagtgcaagtgtgctagcaaagggtggagattatgaacttcctatattctgtgtggcggctatcttgataattaaccgccagaagataataagagggactcactcaatagatgatgcgatcaagatgttcaatgataatgtgctcaaaataaatgtaaaaagatgtgtacgcttggcaatcaagctaaggaagaagtacttgtacaaggtgtgctggatcagtattgacctgaagtatggtacatgtccaagatccggcattattcaggattgcaagatgaagctgtggaattaaagaaaagaaatcaagtccactgaatggttgtatttctggtggtgtcattgttttttt

SEQ ID NO: 3239 - DNA, 1423 bp, Zea Mays
gcaagggctgtcctgcccttcttcccacggttcacggctgattgagtcggccactgcccacgccacccaaaaactcatggccagcgctgtctgcggcgtcaccgcgcgcgcccacctgccttccgccgtccctgcagccgcaagaaagctcttcttccgctgcagggccgcgtccaccatgaacgaggcatcggcgagctcgccggacgccgaggagaagaagacgacgactgtcttcgtggccggctcgacggggcgcaccggcaagctcgttgtggagaagctgctggccaagggattcggcgtcgtcgccggtacgacggacgtgagcagggcccgcggcagcctgccccaggaccccaaccttcagctcgtcagggctgacgttacggagggcgtcgacaagctggtggaggccgtgcgcggcgtcgatgctgtcgtctgcgcgacgggattccggcggtcctttgacccttttgctccgtggaaggtagacaactttggcacagtgaacctggttgaagcatgcagaaaggctggcgtagcaagattcgtactcgtcagctccattttagtaaatggggccgccatgggtcaacttctgaatccagcctacattgtgctcaatctacttggcttaacactggtcgcaaagctacaggcagagaatcacatcaggaaatcaggaatagattacactatcgtaaggcctggagggctgacagatcaacccccaacagggaatatagtcatggaacctgaggacactctttattcgggatccatatctcggagccaggttgctgaagtagcggttgaagcactggtgtgtccagagtcttcctacaaagttgttgagattatcgcccgtactgatgctccaaatcgctctctgaaggatatgtacgctgcaattaagcaaaattgactgctctatttttttgacaggatggttagtttgttatacaaccatgaatcaatgaagaacacttatagtctatgtatttggcattcgacagtatatttttgactcgcgaaaatctcctgaagccttcagtctaggccggctagttcacctctaaaaccggtcagaccgggtgtccaacatcagctagactggccaaaacatcaacagacttttctatgactacgggggaaagaagagcaagatctaatctgctagcaacaagtcaggttttgagaacactaaggggaaggaggatcacatcgacccttcaatccaaagaacaccaaccatcctacattgatagaagttcttgatgatcttcatcagaagattgaagccaagtctactgccaatctaaaggctttcttaaagagttaatgattagtgagacaaggttactcaattcgtgagcctaacttcaataattctattgtttctacatctgctataccagag

SEQ ID NO: 3240 - DNA, 972 bp, Zea Mays
ggccgatatagtgcctagcgtcgacagtcgacgcgtacaggaagcgctagaacaacgcgaccgccgccgccgacgacgacgactcagctactcgcctggtgatgggggtcgaactggcgcaaccgaccgccgccgcggctgcggtgaccaccgctgagcaggctcaggatctcatcgacgccgctaggtacgacgacttggaggacgtcgtcgccctgttctccgctggtgtctcgctggactccacagattcgcaaggccgcacagaatgttaatgccaccaacatggagaagaacacaccactccactgggcatgccttaatggacgtatagaggtaatcagggctttgatctcagcgggggctagcgtgagtgctctgaacagccacgagaaaacgccaatggacgaagcggtgaccacaggcaagatggacgtgatcgacgcgatcggtgcggcagtagctcaagccgagctcgacgccgttactgtctcctaaaaggacctgatgagtacctggagctttgaatgacttgcagccttgttcttatctcccagcggttctgtctgtatcactcgcgaacctggatcccccgacgggccagtatccgggcaatatctatactgacggcaatcgcctgttagtgtcattggcacgaggacccgacctgtcgttgtaaaccagatgtgcagatgtcaaagatcaggattttctcctacaaatgttgtagggccgttgcttgttctcccaggcaaccttcgttttcctttgggttcccttggctccaagtagcagcgaaacgggatccgcacctccaccctctgtgtttttttttcttctcgaaattcagcttttgttgcctttaaaattggaatgcaatgtcgtgtccctgtttgagggttgtttttattgatgaaacgctgcaatcaaggattctctccacttggttagtgctactgtattggtctactg

SEQ ID NO: 3241 - DNA, 2719 bp, Zea Mays
gactgacaaaccgcacctacgtccataaaccccagaagtcgactcctgcccctgcctcgccgccgccgttgcttaccaacctcccgccatggcgacatcgccgttgccgacggcgaccgcctctgcctcgaagaagcggcgttccagaggcgggacgctagccctagatgaggtgaagaagctgggaaccgagctcctttcctctcgctcccacctcaaccacgcccccgccctcctcgctctcctctctcccaccgcgccgctcgacctcgctctcgaggcgctcatttcgctccagtccttcttcgtaccactcatcccctccatcccctccgcctccgcggcagccaacgcgggggatgcgggcagtgaccccgagctcgtgtttggagcctggctgcggcagcggttcgacgagctcgtcgccgcgctggtggagctcagcgtgtctccacacagcgacgacgcaatcagggatgtagcactggatgctctcatggatttcgtgaagctggggaaggatgggaagttccattcggcaatttaccacaagtttctctacgctgtcgttcatgctgctgatcccgtcgatatgttgttagagttgcttgtatcaaagtacttcaaatacactgatattcgttacttcacttacactagcttagacaagattgccaacagtctgggcagtaaaaccactggctctggaaaagatgctttgcaaaatggaagtgacgagtcaaaaaacaggagtagtatttttatacacaacatatacaatcttttggcacatgttcctttgatggattttcaaaaggaatcaacatttgatatgtggagtactgttggtctatcttctaaaggagaaaatgactcttccaaggacacttctacgtacatcaataagaaactaaaattgaagttcaccaaagcatggctgtcttttctcaagttaccactaccacttgatgtgtacaaggaggtccttgcttcaattcatcaaaatgtcattccttcaatgtcaaacccttccatcttatgtgatttcttgactagatcatatgatattggtggtgttatcagtgtgatggccttaagtggccttttcattcttatgacacaacacggtctggagtatccaaaattttatgaaaagctttatgcactactgactccggctgttttcatggcaaaacaccgatcagtgtttttgcaacttcttgacacatgcctgaaatcttcttatcttcctgcctatcttgctgctgcgtttgcaaaaagattgagtagacttgctctttcagttcctccagctggagctcttattattattgctttaattcataatctgctgaggagacacccctcagttaattttttggtccattgggaggttgatgagagtgatagcaatgccacaagagaagctagtcaatctaagaagattggttctgatccttttaaccagaatgatgcagaccctgcgaagtctggtgcaatgcgcagttctttgtgggaaatagacacgcttcgtcatcattactcttctgcagtttctagatttgttgtgtcacttgaggaggatctcactgtccgggccaaaactactgagatgaaaataacggacttcagttcaggttcctatgcaacagttttcagggacgaggtacgtcggcggttaaaacaggtcccccttgcattctacagaaccacaccaacctcgttatttctaggatcagattttcctggatggacctttggggaccaacacaatagcaccgtagaaactactgtagaaggcaacggaaaagtcgaggcagtaggggctagcgacagcacaccttccaaaaggttgcggatggagacctgagaaggaaacaccgcgaatctccaagaattaggccggcttgttggggtagcattgggtggttgtgtgcctctcatttggagtttggtttcccagtgttgtctccaggattgtctgggtgttgtagcttcaattttgagcagaatgggttacgtgaggaaacacttctttcggttacgactaatataagttgtaagcttaattgccaattacagaggaaatgtaccgattttttttttcacagaagcgaaggggacgcggacgcggaggcggtggagtgcgccatctgcctggcggagttcgaggagggcgagcccacgcgcgtgctgccccagtgcggccacgccttccacgccgcctgcgtcgacgagtggctgcgcggccactcgtcctgcccctcctgccgccggctcctgtcccaccagctgccgcccggagagcggtgccgccgctgcggcgcgcggccccacgacgccggcgccgctgggcccgcgtggaagccgacctactacagcgccatgccgccgttcctggcgtaggcagcagagcaagtctccggtccgaaaagcaaatctcacagctactaaatttctcgtctgctccatagattttcagtagtgcttgcctgtggttggttggtagtgatctgggatttgcgggatcaatccacggcttacagtcgtttgttgcagctgaaacactgcagtctgcagcatactagtaccgtccgtaccggctctgactgtacagtttgtaaatactcgagtaattaacatcgtcgccgcagcattaattgtgttctgggtaaatcatgcaatcagatctcagctagctcgcctgggacgtgaatgc

SEQ ID NO: 3242 - DNA, 415 bp, Zea Mays
tcagcatcaacctaggtgagcgattgagcccttgggtatcagtcgggtgcttggctatgggaatatccactattttcttctaaggccgaagttttaatctccacaaatttagtctaggacgcagcaccttgtttcacttgtagagaaaaaaaaaactattgtaagcattttgcttcagtttttaatggtgggcactgtaagatctgtatctgcactgagatttctgatattaacaaaaatgttttctcataagatttctgagaaaaaaaaaactttgtagaccttgtagctgtttgaagagtggtaattgatgaactgctgagagaaaaatttgatgttccagtagtgtggccgtgagtgatcagatccattaaactgtaacatttgttgttcggttctctcgagttcaatccca

SEQ ID NO: 3243 - DNA, 430 bp, Zea Mays
ttaaagtgctagtgctgcagcacattgatggtgagcgattgagcccttgggtatcagtcgggtgcttggctatgggaatatccactattttcttctaaggccgaagttttaatctccacaaatttagtctaggacgcagcaccttgtttcacttgtagagaaaaaaaaaactattgtaagcattttgcttcagtttttaatggtgggcactgtaagatctgtatctgcactgagatttctgatattaacaaaaatgttttctcataagatttctgagaaaaaaaaaactttgtagaccttgtagctgtttgaagagtggtaattgatgaactgctgagagaaaaatttgatgttccagtagtgtggccgtgagtgatcagatccattaaactgtaacatttgttgttcggttctctcgagttcaatccca

SEQ ID NO: 3244 - DNA, 624 bp, Zea Mays
acatcacagcagcaacagccgaaacagcaacagcctacctcttcgtgaatcgtgtcccttcccttggctgcagctgcaggatccaagcaacgcggaaggagggaggtgagcaccatgtcggcgctgttcaacttcaactccttcctgaccgtggtgttgctggtgatctgcacctgctcctacatcaagatgcagttcccggcaatcctcaacgaccgcaccgggtgagcgattgagcccttgggtatcagtcgggtgcttggctatgggaatatccactattttcttctaaggccgaagttttaatctccacaaatttagtctaggacgcagcaccttgtttcacttgtagagaaaaaaaaaactattgtaagcattttgcttcagtttttaatggtgggcactgtaagatctgtatctgcactgagatttctgatattaacaaaaatgttttctcataagatttctgagaaaaaaaaaactttgtagaccttgtagctgtttgaagagtggtaattgatgaactgctgagagaaaaatttgatgttccagtagtgtggccgtgagtgatcagatccattaaactgtaacatttgttgttcggttctctcgagttcaatccca

SEQ ID NO: 3245 - DNA, 1444 bp, Zea Mays
gcacatttctcttctggaacataagtagcgtgcaaacttcgaccgggaccggcgatatccgccatggccaccaccactgccgccgctcgctggagcttccccgcccgtctccagctcctcaccagccgccgcttttgcttccccgcctcctctgccgcgccgcccagttctgtagcggggttcagttgggccgacgccctccgcgtcgctggggacggcgggcgcggcgacgagtccgacctctccgggtacttccggaaggtcaagagctgcaaccgcggaatggataaaaaagggcagttcgtgaagttctctgtggaggatcaggtcgtggggtacatccacaagggatttatcgaacacatcagagactttcatgatgtttttaccattgtcatggatgacaatggcagcaacactgtggagcatgtgtctctccagtcatcactaaggactccagaagaccgaacacatgctattggaagtgtcattaaaagccttggagaattgattccaggtattcgaaatgaggcttatggagttcatatgaatgggtatgttgagaaggatggtcagaaatttctttggattggtaaacggagtgatgtgaagcaaacatatccaggaatgcttgatcatcttgttgcgggtggcctgccatacggaatgtcctgcaaagagaatatcatcaaggaatgtgaggaggaagctggaatcacaagatccatatcaacaaatgctacttctgttggagcggtttcttatatggatattgaaggctttagatacaaaagggatgttctcttctgctatgacctccaacttcctgctgattttgttcctaataatgaagatggtgaggttgatagcttcagactagtccctgttatacatgctgcaaacattataaggaggacagattttttcaagccgaactgcaaccttgtgatcatcgacttcctcttccgtcatgggtacataaacccagattctcgttgttacttagatctgctgcaaagcttgaggagtggtgattgttcctaactctcttttgctgtccacatttataatcattgttcaatttaatgaaacaaaaaaaaaatcatggagtagtctggtattatggttgatcataatcataattatgcctgggactccattgtcattttagtatgaacagagcattcacgtgcggttggggattatgcctgggactccattcatcgagttccgttggttggggaagcttctccttcccaaagcatgacgcaagtgctcatcatgtgcggttgctggaggtgccatttctgttcttggattcagccctttgcttgcattggttgttctggttgagagcaaacttgttgcttgcattgacgtatgatcgtgaagtacaaagataggcaatcaaaggacatgaatgattatagaaatttaaaaataa

SEQ ID NO: 3246 - DNA, 1919 bp, Zea Mays
tctctcttccctccttttccacccagcgacggcgagcgggaaatgccgggccccaaaagaggccgcatccttggtgctttctgaaccttctttactttgtccccaaatggcctcctcgccctcttcacgtttcccttcaccataagcacaggcaccactccccccctgcaagctcctccctctctcggctcttggttcttgcattactctgtcagcccagaggcagagcaagtaagcaaatggttgctatggcggcgccagggcgagtggcgctcctggccgccgcactcctgttcggcgccttcttcccatccgcgttcgccacgtcctcgtaccccgcaaggcttgcgggcaggctcctgtccaccacggcgtcggcggtggccaagcagctgtggtcgctcaaatcggccgccaccaagacggcgacggcgtccgtggcggggcggtccatggtgcggtacgagggcgggtacgcggtggacacggtgttcgacggcagcaagctggggatcgagccgcacgccgcccagatcaaccgcgccggcgacctcctcctgctcgactccatcaacagcaacatctacagggtccagctgccgttgtcaccataccaaagctccttgctggttctccagaaggtttatctggccatgttgatggaagactgcgagaagcgaggatgaaccatcctaaggggttcactgtggatgataggggcaacatttatgttgcagatgctatgaacatggcaataagaaagatcagtgacacaggggttacaaccattgctggggggaaatcaattagaggagggtacatagatgagcccagtgtcagtgatgatgcaaaattctcaaccgattttgaagtccaatacatcagcagtacctgctctctcttggtcattgatagaggaaaccaagcaattcgagaaattccactgaacgatgatgactgtgcatatcagtatgaagctggttttccactagggtttgcattgctttgtgctgctggtttctttggttatatgcttgcattgctccaacaccggcttttaggaatgccgtcaacaatcaataaacctcaagcgcctccaagacccagcattgcaagtatccctccataccagaaacctttaaacccttatgttcgtcaaccattcatcccaagagaagaaactgcaagacaggaacctgaagaggggttcttcacctcagctggaaaacttgttggaggggcaaaatcatctgtggctgaggtatttggtttcaagaagaagagcctgagcaacccataccatcagcagcaacgaagagctaacccttggccggtgcaagaaagctatgccatcccacacgacgaaccacctccggcgctggacacgagagcaccagcccctcagaagaactacagctccgagaagatccactacgtccgccatgggcacccgtatttcaacagctgggacggtcaccgtctccctcagcagcagccggaccagcagctgtatcaccagcagcagcagcagcacctgcagcagcacaggcagtgctctgcaggcccccagacgttttacgagcagagttgtgaggctacaaacgaggtcgtctttggtgcggtccaggaggtggacagcaagcggcgaatggtcgagatcaaggctgtcaactacggagacacattctatgaacagtacgggatgcggtaccgcaacaatttcatcggctacaacaacactaacaactattgaacagcctgtctatttctttgacttccctgtctctcttttcctttctttttttccatcttagttacgagttatttgctttatagtatttatttaaagtggcttttctataatagtattaatagattaggtttctctataatagtatttacaagtgagcaacttctct

SEQ ID NO: 3247 - DNA, 2671 bp, Zea Mays
ttgtcaaaaaaaaatatgttcaagacaaaaaatatctcaggttcagttaaaaatttccacatgctgaagaaaagattgtttctaactcaagcgaaaagtgacatagctttatgcgaaagatgcaccaggttattctaagttcaattgaaaaaggtcctctagcttttccttcaatggggaaaatgtttgacctcaataaaatataaaaataataaatttgctcattttgtaatgtaatgttaatatcattattgtctcactcatttttcatttgaaattaaaatgttccactaggcagtgtccaggaatccaggatgtgaggctaaatacaaaatcaagaagaataaatataaataaaaataaaacgagagagagagaaagaaacacataagttaaggaggtgtggaaaaaacggcccagcagaaggcccgtgttgctgccctcccctgggccgacaaaccccggacgggcctaccgccgtcagccgcatccgtgattccgttcaccttcacggcttcaccagcctgcgctctctcctctcagcgcgacgactgggtgggcggggctaccgccgccgccgccgcccgacaccaggtgccgaggttttcgtcggtctcttcgccggcgacgagctccaaccaggtgctagcgcggtacaattttcgagaatttgtggtgttgaactgaacctccatgacacaagctaaacctgcccctagtggcaagaggaactggagcagtggcgggactgccgctggaaggaagaacaaggaaagaggagatgacaaagcaaaaggaatcagggttgctggttggaacaagggcgacaagaagaaagaagacaaagggcgccaagtaagtgcgggatcgaagaggcggtggagtgagggagtgccccgggttggtgtgaagagggctgtgtctgggtttgacaggaggaagaggaagatcgatgatgactcgtgggatgatgacggtggcaaggatgtttcatcttccaaatcaaagtttaccagaaagtgttcttccacaataagccgtcgaaaggtttctcctggaaaaggtgacagattgaagtctcaaacgttgtatgaggatgactaccgtgcagggaaaaggagtattagcaaagtttctgatgttagtagaggggtcaagaatcgactggtgaattctgtagcatccaaagggaagaagcttggtgcatccgaaggagtcatacgaacaaagaagggtggtgctaaagaagttgatttggatgaggaggctgttaatagcaagaagtcagatgacttggatcttattattgaagaagagaagcctcgccctcgccttactcgagtactggaccagactggtaagaaaataaagcccgctaagaaggttgtagttcctgacaatgaggaacgtgctcctcctaagaagagaaagcgaatgaagctagatccttatgacacttcaaacaaacggattgaagattcttctatccaagatggtcgtaggcgcttaattgagataaaaaatgctggctacaatgtcaagatttctgctcctctggataacgttcccttctcaaccagcacagaacgtgaacgcatagaagacattgcgttcagaaataagctggaattctttgctgctgcaaagatctcttcctcattccccactccaacactcccagagatagcatttgcaggtgtatcgaatgttggtaaatcctcactcctaaattcacttacaagacaatggggtgttgtgcgaacatcagataagcctggacttactcagacaataaatttctttcaacttgcttcaaagttatgtcttgttgatttacctggatatggttttgcttatgcaaaggacgaagttaaggaatcgtgggaggaacttgtgaaagagtatgtttcgaccagagttggcctagaaagggtgtgccttcttgtgcacactaaacgaggaatgaaaccgttggactatgagcttgtagacttaatggaaaggcacaagacgccataccagattgtactgacaaaaactgatttagttttcccaattgatgttgctcgccgtgccatggaaatccaagagagcctgaagaggaataagtcagtggtaaacccagtgatgatggtgagctctaaaacaggagctggcatacgcaacctgagaggcgtgcttggaaagttagctcgcttcatcaaaccgtagcaaagctgcagccaatttcggagtctgcgtctgcgtcggtcgagaccgtgagaggaaactcacaccaggctgtcttaggcaggtgccgcgctacgtcaacgctctaaccagtccaccgccacaagctttgtctgcatcagtttagactatcgaacacttgcagcaagcgttcctagttaggttatgctttggagcctagctgtatcacaggccattccggtaggattgaactgttcaacttttgagtggattatgcgatgctcagattaatccatgaaatatttgagtttccccatttggatatacggaatcgtacatccttaaaaactattatgcatcgttccttgatgtacaatactttttcagtgatgattcatcactcatcagtcattgatgttttatgtgttcttcacgaaaaaggtatgccgctggccgtgtaaattttgctgtattctcctgg

SEQ ID NO: 3248 - DNA, 2793 bp, Zea Mays
ttgtcaaaaaaaaatatgttcaagacaaaaaatatctcaggttcagttaaaaatttccacatgctgaagaaaagattgtttctaactcaagcgaaaagtgacatagctttatgcgaaagatgcaccaggttattctaagttcaattgaaaaaggtcctctagcttttccttcaatggggaaaatgtttgacctcaataaaatataaaaataataaatttgctcattttgtaatgtaatgttaatatcattattgtctcactcatttttcatttgaaattaaaatgttccactaggcagtgtccaggaatccaggatgtgaggctaaatacaaaatcaagaagaataaatataaataaaaataaaacgagagagagagaaagaaacacataagttaaggaggtgtggaaaaaacggcccagcagaaggcccgtgttgctgccctcccctgggccgacaaaccccggacgggcctaccgccgtcagccgcatccgtgattccgttcaccttcacggcttcaccagcctgcgctctctcctctcagcgcgacgactgggtgggcggggctaccgccgccgccgccgcccgacaccaggtgccgaggttttcgtcggtctcttcgccggcgacgagctccaaccaggtgctagcgcggtacaattttcgagaatttgtggtgttgaactgaacctccatgacacaagctaaacctgcccctagtggcaagaggaactggagcagtggcgggactgccgctggaaggaagaacaaggaaagaggagatgacaaagcaaaaggaatcagggttgctggttggaacaagggcgacaagaagaaagaagacaaagggcgccaagtaagtgcgggatcgaagaggcggtggagtgagggagtgccccgggttggtgtgaagagggctgtgtctgggtttgacaggaggaagaggaagatcgatgatgactcgtgggatgatgacggtggcaaggatgtttcatcttccaaatcaaagtttaccagaaagtgttcttccacaataagccgtcgaaaggtttctcctggaaaaggtgacagattgaagtctcaaacgttgtatgaggatgactaccgtgcagggaaaaggagtattagcaaagtttctgatgttagtagaggggtcaagaatcgactggtgaattctgtagcatccaaagggaagaagcttggtgcatccgaaggagtcatacgaacaaagaagggtggtgctaaagaagttgatttggatgaggaggctgttaatagcaagaagtcagatgacttggatcttattattgaagaagagaagcctcgccctcgccttactcgagtactggaccagactggtaagaaaataaagcccgctaagaaggttgtagttcctgacaatgaggaacgtgctcctcctaagaagagaaagcgaatgaagctagatccttatgacacttcaaacaaacggattgaagattcttctatccaagatgtgcagagaaggttctcgtgaattgtacacctgaagaagagactgaaatgtcaataaatgcaaaatttcgtgctatacagccaagttcttcaatcctttcatatgtggaagataatttactaggtcgtaggcgcttaattgagataaaaaatgctggctacaatgtcaagatttctgctcctctggataacgttcccttctcaaccagcacagaacgtgaacgcatagaagacattgcgttcagaaataagctggaattctttgctgctgcaaagatctcttcctcattccccactccaacactcccagagatagcatttgcaggtgtatcgaatgttggtaaatcctcactcctaaattcacttacaagacaatggggtgttgtgcgaacatcagataagcctggacttactcagacaataaatttctttcaacttgcttcaaagttatgtcttgttgatttacctggatatggttttgcttatgcaaaggacgaagttaaggaatcgtgggaggaacttgtgaaagagtatgtttcgaccagagttggcctagaaagggtgtgccttcttgtgcacactaaacgaggaatgaaaccgttggactatgagcttgtagacttaatggaaaggcacaagacgccataccagattgtactgacaaaaactgatttagttttcccaattgatgttgctcgccgtgccatggaaatccaagagagcctgaagaggaataagtcagtggtaaacccagtgatgatggtgagctctaaaacaggagctggcatacgcaacctgagaggcgtgcttggaaagttagctcgcttcatcaaaccgtagcaaagctgcagccaatttcggagtctgcgtctgcgtcggtcgagaccgtgagaggaaactcacaccaggctgtcttaggcaggtgccgcgctacgtcaacgctctaaccagtccaccgccacaagctttgtctgcatcagtttagactatcgaacacttgcagcaagcgttcctagttaggttatgctttggagcctagctgtatcacaggccattccggtaggattgaactgttcaacttttgagtggattatgcgatgctcagattaatccatgaaatatttgagtttccccatttggatatacggaatcgtacatccttaaaaactattatgcatcgttccttgatgtacaatactttttcagtgatgattcatcactcatcagtcattgatgttttatgtgttcttcacgaaaaaggtatgccgctggccgtgtaaattttgctgtattctcctgg

SEQ ID NO: 3249 - DNA, 2369 bp, Zea Mays
ctacatagggacttggtggcgaacaattttgcgacgaataggttagctcatattctgatgtcacctcaagttctcaagtacattttgttctctcagcatatagattggattcatagtgtcaatgttttacatctgtagcggaccttgggggctgccgtgtcttcagagagacacaccctgtttccttggctctccacaatctgcctctcttgctgtggactgtgggagcagtagatctatatctggctctgataagtccatgtatcaacgtgatgatgccaatcttggagctgcatcctattatgttacaggagcacagacatggggtgttagcaatgtgggcaagttcacggaggcagtatacgaaagttacataatctccagctcacgccaattctacaatactctagatccagaactattccagacagcaaggatgtcggcatcatctttgagatactatggtattggactccagaacggaaattataccgtcgcacttcaatttgcagattttgactttgaagattcacagacttggcagagtgttgggagaaggatttttgatatctatctccagggtgagcgtaaggagaagaactttgacataatgaaggcagcagggggaaaatcttacactgctgttgagaagcagtatattgttcctgtcactagaaacttccttgagattcatcttttctgggccggcaagggcacttgttgcattccctttcgaggctactatgggcctgcaatctcagctttcagtgtaacgccaatgcagaccagtaggaaaacaggtataattgttggagtcgtggttggtgcagcagttttgggagtactagcacttgctggactctgtatgaggaggcagaaaaggagaaaattattattggagcaacaggaactttacagtattgttggaagacctaatgtattcacttatggtgaactaaggacgtctactgaaaattttagttccaataaccttctgggtgaaggaggatatgggtcagtttataagggtaaattagctgaaggaagggtggtggctgtaaaacagttatctgaaacatctcatcaaggaaaacaacaatttgctgccgaaataggaactatttctcgagtgcaacaccgtaatcttgtgaagttgtacggttgctgccttgagggaaataaaccactgttggtttatgagtatctggagaatggaagccttgataaagcattatttggaagtgggagactgaacctagactggccaacacgctttgagatatgtttgggcattgcaagaggcatcgcttatctccatgaagagtctagcatccgtattgtgcatagggacataaaggctagcaatatcttgcttgacgcaaatttcaaccctaagatctcagattttgggctcgccaaactttatgacgacaagaagactcatgtcagcacaaaagttgcgggtacatttggttatcttgcacctgagtacgccatgagaggtcatatgaccgagaaagttgatgtgtttgcatttggcatggtcatattggagaccttagccggaagaccaaattttgacaatatgctagatgaaattaaggtttatatattagaatgggtctggcaactgtacgaagataagcaccctctggacatggtcgaccccaagctcgaagaattcaacagtggcgaggtgatccgtgccatccacgtggccctcctctgcacccagggctcgccacaccagcgtccttccatgtcacgagcggtgtcgatgctggcgggagacgtggaggtgggcgaggtggtgaacaaacccagttacatcacggagtggcagatcaagggtggcaacaccagcagcttcatgagcaacaatgtcagtggacagtcgagcatggcaccaaggtcgtcagcctcgcacacctcgtcgccgttcttgaactctgtcatcgaagaaggctggtgattattaccaagttctgtcaagcgaacggactgctgcttataaatgcacgctacagaatgctctctggtctctgcctctgcacatatgctgtgtaggttctatgttccattttttatacaaatgatagatatattgattgctaggtccatttgcaagaactaaggtggtgtttgtttaaggttataatttgtcaatattatataatccaacaacttttaaactaaagattagttcaaaagttgttgaattatataatctagacagattataatctaaaacaaacacccctaagtcacgttagatatataattttccgctatatcaaacagatccttacgttgtctccattggctttctattttctattccatcttctaattcaaacttcactttatgc

SEQ ID NO: 3250 - DNA, 2342 bp, Zea Mays
ctgcctgctccctacgcagctacgctttactcccttcccctgcttcgtcctcgtttctcctcgaacccacccagcagcgccttcttccttcttcccgcccaacctcggccatgcccgtagcggcgctccgtcctcccccggtcgctgtcggcgcgggacgccgcagcgcccgactccaggcgcggttcgccctccgcgcgagctccctcgaggcgtcggcggcagtgacggtgacagtgaacgggtctgcagaggccgcggtggagaggaaggagaaggtgcaggaggataaggacaacgagggactgccggtgaaggaggagcaggagagggggctggaggtcctctacgacgacggcttcggctccgtgaccgtcaaggactacttcgcggcggccaaggtcctgtgccgggacgacggtgggccgccgcgctggttctctcccgtcgagtgcggccacccggccgtggaccaagcgccgctgctgctcttcttgccaggaatggatggcgtcggcacgggactcatcctgcaccacaagtctttgggcaaagtgttcgaggttcggtgcttgcatataccagtcaatgatcgtacaccatttgaaggactagtacaaatcgttgaaaatttgatcaagcacgagcatgatttatccccggacagaccgatatatcttgtcggagattcatttggcggatccctggcactggcagtggcagctcgtaatccgcagattgatttggttctcatactagtaaacccagctacatcatttgcaaagactccattgcagccagtattgcctctactggaatcagtgccaagcgagtttcatgctacagtgccgtatcttctcagttttgtcatgggtgacccactgaagatggctgcagttagcattgaaaacaacctatctcctccagaaactctgcagaaattgtcagacagtctcacatcaatgcttcctttgctttcagaactgtctgatattataccaagggatactcttctatggaagctcaaacttctcaaggcaggagcagcctatgcaaattctcgtctccatgccgtgcaagccgaggttctacttcttgccagtggtaaggacaatcttctaccaagcggagaagaagcggatcgactcttcaaggcactgaaaaactgcagagttcgatacttcaaggacaatggccatacactactgctggaggatggcgtcaacctgttaactgtcataaaaggagcgaacatgtatcggcgtggaaggcaaagggattctgtaaccgattatctcccgcctactctaagtgaattcaggcaaacatttgatgtggatcacaggctgttccaccttgcactgagcccagtcatgatgtccaccctgaaggatgggaaaatcgtccgcgggcttgccggtgtccctgacaaaggcccagtcttgttcgtgggctaccacgcgctcatgggcattgagctgagtcctctgtacgaggagttcctgagggagaagaggacagtcgtccgcggcatggcgcacccgttcctgtttgggaaaaagttgttccagaggaaccaatttgttctgctctaccccggcggcgttcgggaagctctgcacaggaagggtgaagagtataagttgttctggccagatcagccagaattcgtaaggatggcggcgcgctttggtgtaactatcataccctttgggtgtgttggagaagacgacgttctcgagttggttctggactacaacgatcagaagaacattcccgggctccgggaatggatacagtcgatcaacaaagaagccgagagagtgagcgtaaaaggagaggatgggaaccaggacatgtacctgccagctcttctcccaaaagtgcctggccgattctactacctgttcgggcagccgattgagatgaaagggatgggcaaccttgtcagagataggaagagcgcgaacgaggtgtatctacgcatcaaatcgcaggtggaggagatcatgtcgtatctcaagaggaagagggaggaagacccttacaggagcctaccgcagcgtgcactgtaccaggcaacatggggcgcctccgctcaggtccccacttttgagccatgaagattgggagtagggaagggcgtctgcgagcggactgcaattctttgacaagatgcaatgcgttctcatttctgaggagatctccctccctcatacgctgattacatatacggactacggactagtataccgcaaatattgtacatttttaggaaaaatatgaaatgatgtttttaaacaaaaaaaacgcactcagcacattatcttaaaacagatgcg

SEQ ID NO: 3251 - DNA, 758 bp, Zea Mays
cgccaacccagtaacggcccgcttggcgtgcgtcgccgtccaccgccgcgacctcgaggtgtagggccgggttgctgaccgcatcgcccggcgtgtcgctcggcgtcggttcgggcaggccgcggccgcgcgcgtgatcgatggggaagagaccgccgaccgatccgaagcgcttcggggatacgtcgaatgcaggttcatcgtctggatggaccgatgagaagcacatgctctacattacctttttggaggaatcatttgttaaccaattgtacagtagtaagggggaaatgaattcggcagaatcattctatgcaactccaggtgcatggcaaaaatcttcttatagtggaaatggtagaaacacaaaatatgatgagggacatggatattgggggactgtcgaggttgacggagatggagctgattatatggatgatgatgcatcaactaatggtccaagacaagagagagatactagttaccatgcaaggcaaaggaattccagggggtcagctgctttccgtttgcgccagcatgggcattcgttttcttggagagaatcatcagaccagaacttcttggatggggagactcaaggtagcaaggaacaaggaagagggtctagcaaaaaccagcaaaagcatgctgatacgaccaaggttgccaaattctctatttccctctcagtcagcatgtcgtgattgcttcagatgccatctacgatcgcatcaagtctagaaagaaacaggtgcgct

SEQ ID NO: 3252 - DNA, 995 bp, Zea Mays
cagtaacggcccgcttggcgtgcgtcgccgtccaccgccgcgacctcgaggtgtagggccgggttgctgaccgcatcgcccggcgtgtcgctcggcgtcggttcgggcaggccgcggccgcgcgcgtgatcgatggggaagagaccgccgaccgatccgaagcgcttcggggatacgtcgaatgcaggttcatcgtctggatggaccgatgagaagcacatgctctacattacctttttggaggaatcatttgttaaccaattgtacagtagtaagggggaaatgaattcggcagaatcattctatgcaactccaggtgcatggcaaaaatcttcttatagtggaaatggtagaaacacaaaatatgatgagggacatggatattgggggactgtcgaggttgacggagatggagctgattatatggatgatgatgcatcaactaatggtccaagacaagagagagatactagttaccatgcaaggcaaaggaattccagggggtcagctgctttccgtttgcgccagcatgggcattcgttttcttggagagaatcatcagaccagaacttcttggatggggagactcaaggtagcaaggaacaaggaagagggtctagcaaaaaccagcaaaagcatgctgatacgaccaaggagatcagtcatcctcatggggaagcttaggggccaatgggattggttcatgcaagctaataagtttgtaagaatagcagtgatggaggtgggcagatgtatataaatctgttcattcatctccagatagccaaaagataggtgtttcctgttggtagtgtatctattaggaatgtcgtagattgctaatgacttcctgtaaaatcgtccaggaaggtttcagatattgaggtggaccagctgggtaactgttgttgtgtcccgtaatgtacaagtacagatgtctgcaatgttcatttgacttgttgacaaaatggaattttatgatatttgaaaccccg

SEQ ID NO: 3253 - DNA, 3643 bp, Zea Mays
tgagaacccaaagccagcaaagccagagcgagcgagggagcaaggaggaagacgcaccaggacattgacgagccgcggtccgcagcagcagctcccagcttcatcccccgacccggagccccagcactggtgcagcaggctcgctcgccgccgccgccgccgcgtgaagtgaggcgcgcccccccgcggacgctgacgctgggacccgcgcctgctgggagtgggcccgccccattgatgggcgccggcaggcgccggcggcgagggaaagcgtgaggacgaggagggccggcgggctccgcacgaagcaggccgggcgagcctgccgccgcgccgcctagggagggcgccgcccgtctttgcttgtttgctcgcaccgtcgcacgtcctgttccagtaccaggccagagagaaggggggcgggactgcaggcggcgggccgcggaggagctagggttctctctgttctcactctccctgcgtcgccgggatggcggttggggacgcgctgcgccggctctgcgaggaggtcggctggtcctacgccgtcttctggaaggccatcggcgccgccgaccctgtgcatttggtgtgggaggacggttgctgcggccacgtgtcatgctccgccgggtctgaggctcctgaagctgggtgcgagctgggcaccagtgtgtgcacgcttgttaggaaggtcatgacctcgcaaattcatgttgttgtaccattggccgtgctgctttcaccggaaatcatcaatggattgtccatgatcctgccaatgatcacaatctcagacccgaggtttctgctgagatgaatcatcagtttgcagctggcattcagactattgcaattattcccgtgttaccacgaggtgtactgcagctaggtgcgacaagtgtggtaatggaaaataccaaccttgtgctccagtataagaacctgtgttctcagctaaacaatcggtcgagtatggcttcatcgtcatctgttaaaaatgatttgaaccagaaaattcagtcacgccctttgaatggcctcacgagtatacaccctgcagatacacgctcaaagttttttagtggacccccattgacatatcaacaatgttatggtcctgatggcagaactgtgtctagtagtacattggcaaacatgggcagtaatgcttcaatgcttatggttgcacaaagaaatggccaagtgggtaaagaacacattgtatatgctcctgacatgaggttcagaccacaaaacccttactgtgacaggagagttgggagtaacacccaaaatagtgttgtgagctctggttttatctcgtctatctcagcatcaatggaaaggcatccattaatgaccaacaatcgacagttagaacaaggaaacactggagaaccatcagattccagaagtgttctcttgaaatctctcgcataccataaccctttagtgcatgaaaacacaaacatgactttgttgcatggaagaggccaggtgccaggctttgttaatggtcatgggggttttgattttctcccagaaggtactagagtagtcaagagtaacctgtatggcagcacaacaaatcaaattttagatcaaatatgcagttctacttctgggatgaaagggcacggaccaactatttcatataaaatcccccaacctacccaatttgttggaaaaacggagagttccaagagagagacatgtcaagcttctgttgctctgttgtctgactctgatattcaggtttctagtgtcttgaaaacagccatttcccaagagaatcagacgagtagatctgatcttattggctcaaaaaaggctaatgaagtgcatgatcctactgatgcaattgttcaagctgtcaagaatatggatcgccgcagactcccagacatatctaacgagagatcacccccattccttatggatcctgctgcagaaagtgatttgtttgacatgtttggttctgaatttcatcatttgtgtcacaatgtggataatgatcttacctggaaagctgcaaaacctgagaattcaaatagagatgtacctgaattctctgatcatcttggttcctctccagccttcaattcagtggatgacgagttcccttattctgggatcttctcactaactgataccgaccaactgttggatgcggttgtctctaatgccaatcctggtggcaagcagatatctggtgacagcgcttcttgcaagacttcagtgacagatattcctagcacttcgtattgtcgcttaaaagagccaaagcagtctgaatcatctgctcctcctttgctaatcaagaatgagttagctgtttcaaattttgttaaacatccatctttcccagaaaaggcagcggatggctgtctttctcaaaataatgcaatacagaaatctcagatacgcctctggattgagagcggacagaacttgaaatgtgaaagtgcctcagcctcaaacagcaagggcgttgatacatcaagcaaggctagtcgaaagaggtctcgaccaggagagaatcctaagccacgaccaaaggaccgccagcttattcaggatcgtataaaggagctccgggaactcgtacctaatggggcaaagcattgatgccttgttggagaagaccattaagcacatggttttcttgcaaagtgtgacaaagcatgcagataacctcaaggactcaaatgaatctaagattcttggtggtgagaatggtccattaaaagactacttcgaaggtggtgcgacttgggcctttgatgttggtagtcaatctatgacgtgtccaatcattgttgaggatcttgatcggcctcgtcagatgcttgtggagatgctttgtgaggatagaggtatcttcttggagatagctgactttattaaaggactcggattaaccatcttaaggggcgtcatggaagcacgcaaaaataaaatctgggcacggttcactgttgaggccaacagggatgtgactagaatggaaatcttcctttccctaatgcgcttgctggaaccgagttatgatggcggtggagcaggagagaatcctaataacaacataaaaatgccccttggaattgtgcagtatcccgttatccctgtgtcaggtcatcttaggtgagccagctgcccagccagcacaaagatcacaggacaggaggcatctttgaaatgctaagagcgggaggtcgacccacttctgccatgactagcattatcaacccaggacgagcgggaatctcgtggcatgcagtgcatcgtccctgcagtgtgcattcggaaagcctaacagtagaggggaatggagacatggatagttggttcggcgggtgatcattagacgatcgatgttttgactgtataatcttaactgttgctgatgcttttgccttttgttcttctgcatattagtgaattttgttatgttcttctgctgaatggaaattctgagttgaattgtagaccttgttcagttgtttctggtactagctcgaagtcggagctctctttttcttaccgttcctgtgtgattactaatgagaaactagttttactgtttacagttaaggttctctttgttctcccaaattatcgtggacctattgaaagcatc

SEQ ID NO: 3254 - DNA, 4127 bp, Zea Mays
taaatgggcaagcttggtgccaagctgaccaagctcaccaagtctcaggccgactacatcagcgtgccgatcgatcgagggtccctacaagcctgcccactaccggtactaggcagccagcacagcacacggcttgcagctcactcgggccgttgtgtgctatgaagttcgctacacactggcctgtcagttatcttttgcatgcatatgcgttatcatatacgcagtcgcgtagcaggttttcttatggttatcgcttgagctgaggcctgaggggggagggaaggcgctgtttgcttttgctgaagaataatggtgtagtcggctggggtaaggcgatgtgcgttgccagatacagttttgtcttgttgactctacttatctgattatcatttgtaagcgatttgctcaaaaaaaaaaacgtaaaagggcgagcacagcaaagcaacaagaaagagaaagccaaaacacactatagaccccccccaaacccgagaagagaagtgagaacccaaagccagcaaagccagagcgagcgagggagcaaggaggaagacgcaccaggacattgacgagccgcggtccgcagcagcagctcccagcttcatcccccgacccggagccccagcactggtgcagcaggctcgctcgccgccgccgccgccgcgtgaagtgaggcgcgcccccccgcggacgctgacgctgggacccgcgcctgctgggagtgggcccgccccattgatgggcgccggcaggcgccggcggcgagggaaagcgtgaggacgaggagggccggcgggctccgcacgaagcaggccgggcgagcctgccgccgcgccgcctagggagggcgccgcccgtctttgctttaccaggccagagagaaggggggcgggactgcaggcggcgggccgcggaggagctagggttctctctgttctcactctccctgcgtcgccgggatggcggttggggacgcgctgcgccggctctgcgaggaggtcggctggtcctacgccgtcttctggaaggccatcggcgccgccgaccctgtgcatttggtgtgggaggacggttgctgcggccacgtgtcatgctccgccgggtctgaggctcctgaagctgggtgcgagctgggcaccagtgtgtgcacgcttgttaggaaggtcatgacctcgcaaattcatgttgttggtgagggtaccattggccgtgctgctttcaccggaaatcatcaatggattgtccatgatcctgccaatgatcacaatctcagacccgaggtttctgctgagatgaatcatcagtttgcagctggcattcagactattgcaattattcccgtgttaccacgaggtgtactgcagctaggtgcgacaagtgtggtaatggaaaataccaaccttgtgctccagtataagaacctgtgttctcagctaaacaatcggtcgagtatggcttcatcgtcatctgttaaaaatgatttgaaccagaaaattcagtcacgccctttgaatggcctcacgagtatacaccctgcagatacacgctcaaagttttttagtggacccccattgacatatcaacaatgttatggtcctgatggcagaactgtgtctagtagtacattggcaaacatgggcagtaatgcttcaatgcttatggttgcacaaagaaatggccaagtgggtaaagaacacattgtatatgctcctgacatgaggttcagaccacaaaacccttactgtgacaggagagttgggagtaacacccaaaatagtgttgtgagctctggttttatctcgtctatctcagcatcaatggaaaggcatccattaatgaccaacaatcgacagttagaacaaggaaacactggagaaccatcagattccagaagtgttctcttgaaatctctcgcataccataaccctttagtgcatgaaaacacaaacatgactttgttgcatggaagaggccaggtgccaggctttgttaatggtcatgggggttttgattttctcccagaaggtactagagtagtcaagagtaacctgtatggcagcacaacaaatcaaattttagatcaaatatgcagttctacttctgggatgaaagggcacggaccaactatttcatataaaatcccccaacctacccaatttgttggaaaaacggagagttccaagagagagacatgtcaagcttctgttgctctgttgtctgactctgatattcaggtttctagtgtcttgaaaacagccatttcccaagagaatcagacgagtagatctgatcttattggctcaaaaaaggctaatgaagtgcatgatcctactgatgcaattgttcaagctgtcaagaatatggatcgccgcagactcccagacatatctaacgagagatcacccccattccttatggatcctgctgcagaaagtgatttgtttgacatgtttggttctgaatttcatcatttgtgtcacaatgtggataatgatcttacctggaaagctgcaaaacctgagaattcaaatagagatgtacctgaattctctgatcatcttggttcctctccagccttcaattcagtggatgacgagttcccttattctgggatcttctcactaactgataccgaccaactgttggatgcggttgtctctaatgccaatcctggtggcaagcagatatctggtgacagcgcttcttgcaagacttcagtgacagatattcctagcacttcgtattgtcgcttaaaagagccaaagcagtctgaatcatctgctcctcctttgctaatcaagaatgagttagctgtttcaaattttgttaaacatccatctttcccagaaaaggcagcggatggctgtctttctcaaaataatgcaatacagaaatctcagatacgcctctggattgagagcggacagaacttgaaatgtgaaagtgcctcagcctcaaacagcaagggcgttgatacatcaagcaaggctagtcgaaagaggtctcgaccaggagagaatcctaagccacgaccaaaggaccgccagcttattcaggatcgtataaaggagctccgggaactcgtacctaatggggcaaagtgtagcattgatgccttgttggagaagaccattaagcacatggttttcttgcaaagtgtgacaaagcatgcagataacctcaaggactcaaatgaatctaagattcttggtggtgagaatggtccattaaaagactacttcgaaggtggtgcgacttgggcctttgatgttggtagtcaatctatgacgtgtccaatcattgttgaggatcttgatcggcctcgtcagatgcttgtggagatgctttgtgaggatagaggtatcttcttggagatagctgactttattaaaggactcggattaaccatcttaaggggcgtcatggaagcacgcaaaaataaaatctgggcacggttcactgttgaggccaacagggatgtgactagaatggaaatcttcctttccctaatgcgcttgctggaaccgagttatgatggcggtggagcaggagagaatcctaataacaacataaaaatgccccttggaattgtgcagtatcccgttatccctgtgtcaggtcatcttaggtgagccagctgcccagccagcacaaagatcacaggacaggaggcatctttgaaatgctaagagcgggaggtcgacccacttctgccatgactagcattatcaacccaggacgagcgggaatctcgtggcatgcagtgcatcgtccctgcagtgtgcattcggaaagcctaacagtagaggggaatggagacatggatagttggttcggcgggtgatcattagacgatcgatgttttgactgtataatcttaactgttgctgatgcttttgccttttgttcttctgcatattagtgaattttgttatgttcttctgctgaatggaaattctgagttgaattgtagaccttgttcagttgtttctggtactagctcgaagtcggagctctctttttcttaccgttcctgtgtgattactaatgagaaactagttttactgtttacagttaaggttctctttgttctcccaaattatcgtggacctattgaaagcatc

SEQ ID NO: 3255 - DNA, 2386 bp, Zea Mays
tggaacatgtgtggtccaggctcaggcctaaagatttgtggatttttctaatgctgtcgcatgattcctcaagcaagaggaacaacatcacgcgggccgaacctgcaatttcacgcagagacgtgtcatcttctcctccgttacgaacccgtgggatctcaagtccgtttcacacttggctccctcgctcgctcgctcgctcgcactgacaacctgggtggccggctggccgccaccgcacacctctgctgtggtctaccgcccctcttcgctcccgctcccgtcgtcggtgagccgcgcccgtccaccctctcaccgatggcttcggcggccgcgaggggcgccgcggtgcgctcccctctcctcgtccaccaccgcgtccccctggtacatcccagcgggggaggctcgctccgggtcggctggcccggaattgggcccggacgggaggggcggcggcggggcgccccggttggggctagggttttcgcgcgctactcccaggcccaggacttctccacacgcctccaagatagagctggtgagctgcctaagttagtcgaggaccttatccagacatcgattagcacagggcctcgaggtgctttcaggatggcccaagggatccaagctgtgcttggggttggtggggagtggctgaatgacctctcaaagacagccaacacatcagcaggaattccatctcagatgcagcttggtttgctttctccactttaccttcgaaggctttttgagcgcatgggtgccacttatatcaagttaggccagtttgtagcatctgcgccaactttgtttcctgcagaatatgttgaggaattccagaaatgctttgaccaagcaccagctgtcccatatgacgtgattgaatcaatattacgtgaggagctgcagcggccattagatagtgtgtatgaatacattgatccggtgccaatagcctctgcctcaatagcacaggttcatggggctaggttgaagagctctcagaaagatgtggtgattaaagttctaaagcctggcattgtaaaggatataaaggaatcaatgcttgaggaagttgactttagaaaagaggctgcaaatattcaggcatttcagggatacattgatgcaatggggtttgacaggcaggcaaaagccccatttgtgtatcagcactgtagtacaaaacgtgtattgactatggaaagattgtatggagttccgcttactgatcttgattctataagatctcttgttcctgatcctgagttgactttagtcactgcccttaatgtctggtttggaagcttaatttcatgtgaatccttccatgctgatgtacatgctggaaacctatggttgctccgtgatgggcgaattggttttattgattttgggattgttggtcgaatatctccaagaacttgggcagctatggaggtctttttggcttcttttgcaactgaggattatgatgctatggcctctgccctctctgaaatgggtgctacagggaatgatataaatactaatgaatttgcaaaggacctgcgaaagatattctcatcgatacaggacctggatactgaaatcatagtggcaacagcaaggacccctgatgctacagcagtatctgctaatgttgtccttgatgagaggcagatgaatgctctttttcttgatctggtcagggtgagcgagtcttacgggctgaaatttcctcgggagtttgctcttctcatgaagcagctgctgtattttgatcgctacacaagactgctggctcccagcatgaacatgctgcgagacgagaggatcaacatctccaccaatcgacaaccaagaagaactgatagatttcagtgaagccacgtcgttagtcaccggccacgtactagaggagtcgtgatgggcgataatagcaagctcatgtgacccaatactgtatatagttttgccagaccagcatagaaatgaaccacacgctagaaattgtacactccgtcgtattctgggattgagcgttatatcgtactagtaggtaacatgtaaaggctgtatcccacgaccaaagtaaatttcagatgaactgcttttgtctcatcttttttctggtactagtagcgtgaatctggttaagatgcaactgcactacacttcagctgccatcagaaaaaagtgatcttgcagcagcttaacgaggtgctgaacaaaactggctagagagatggttgcattctctcgtggtcaccacgaacttgtagagttacgggattccactatatggcggcatttcagctttcattactcgttggagcttacacaacagggttcatagtggatattaacttggaaaatatcccgcagctcaggttcgtgtgcg

SEQ ID NO: 3256 - DNA, 2239 bp, Zea Mays
aagcaagcagcgactccgtccgcgcacggcaccttcccctcccccgcacggccgcacacaccagacaccaccaccactcgcaagtctcttcgccgtctcgccgagttattagaaggcggggaaaaaaatcaactcgaacgggcgggtggcaaccaaccaccaagcggcgagggcgatggcggcgtcctcgccgcggaagcggctccctgctgcgcgcctcatcttcgccctcctcctgatgtcctccgtgctgccgcgggacgccggggcggtggaactggggctgaagctgcccttcagtccgggggacgtgctccccgtcctgccgcggcaggtggcgtggcccgtcatgaacacgctccacagcgccgtcgacctactgccgtccttcgtcgccgccgtggcgcccggggcgccggcgccggcggcctggaaaggcgcgtgcttctcggagaacgaggccgctatcgagctcacgcccggggaccgcaacgggaccgacgtcggcggtgccgtactgcgcctcaagactgcttcagctcatagttgggcatgcatggatctctacgtttttgcaacaccatataggataacatgggactattattttgctgctcgggagcacactttggagattaaatcatgggaggaagaagcggaattgaaatatgtgaaggagcatggcatttctatttttctcatgccatctggaatgctcggaactttgctatctttgattgatgtcctgcctttgttttcaaacactgcctggggccaacattccaacctagcctttttagagaagcatatgggagcctcatttgagaaacgaacccaaccttgggttgctaacattagaaaggaggatatacaatctggtgactttttggctttatcaaagattcgaggacgatggggtgggtttgagacattagagaaatgggtgactggtgcatttgctgggcatacctcggtttgcttaaaagacgagaagggtgatctttgggttgcagagtcaggctatgaaaacgagaagggagaagaaatcattgctatagttccttgggatgaatggtgggccatggctctcaaggatgaatcaaatcctcagatagccctgcttcctttgcaccctgatgtgcgtgccagattcaacgaaagtgctgcatgggaatatgcccggagcatggttggaaatccttatggctaccataacatgatatttagctggatcgatacaataggagataattatccacctcctcttgatgctaacctggtaatggcagttatgtcaatgtggactagattgcagccagtttatgctgcaaacatgtggaatgaagccctaaacaaacgacttggcactgaggttgtagattactgttaatacttattctccctcattgggtattgggcattcacaagattattttgattcaagctagtgtaaggatttcgaccttcaggggatcattatggagattgaaagacgtggaatgtcttttgatcagttgctcaccatacccgagcaagacgaatgggtgtacagtgatggtaaatcaactacttgtgtcgccttcattcttgcaatgtacaaggaggctggaatattcacccctttctcggagtcgatccaggtcaccgagttcactattcgtgacgcatacatgctcaagatatttgaagacaacccggcaaggcttccaggttggtgcaacgcaggcacggacaagcttcccttttgccagattctcggagagtacagaatggagctaccagagtacaacacgattgaaccttatgcgaaaatgaacgagaactgtccgtccttgcccccaacgtacaaacgacccgcacgctgctgactacgagattgtctactatgtatctttctgcagctgctgcctttacacagtggcattagagtgttgttgctatgttctgtaaataaaagacactatatatataggtgcttggtagatggtagttcttaccagtaatgtagctgcgatgtattcaggttcacggttttcagtcgatcagttctgaagccacggcgtcggcgaccaatatgaaggttaggatttgtcagctccggaaagttgcttatatgtatcaatgtatgtatgtaggcaacattatggcttggtcataaattgtgaactccgtcaagaaataaatctataatgcaacgtcaggtgattctgatatgtgattaagaaaataaaaaaacaaa

SEQ ID NO: 3257 - DNA, 2008 bp, Zea Mays
agtctggtaccgccggcaaagcagtcgttttcgtcctcttccttgattaaaccttccgtacccatatccacctgctgctccgaccttccagtcttctccgtaggggcttcgctccatagatttcgccgcaaggggcaacggcacacccaccaactgacctgacccacgagggatccgcagatgaagatcattccggtcccttgcctggatgacaactatgcctacttaatcgtggacgagagcaccaagaaggcagcggccgttgaccctgtggaaccggagaaggttctcaaggcggccggcgaggtcggcgcctacgtcgactgcgttctcaccacccatcaccactgggatcatgctggtggcaatgagaagatgaggctgcaggtgccagggataaaggtatttggaggatccctggacaatgtgaaaggctgcactgatcaggtggagaatggaatgaagttgtcacttgggaaggacattgagatactatgcctacacacgccttgccacactaaaggtcatatcagctactatgttactagtaaggagggtgaagatccagcggtcttcaccggagataccttgttcattgctgggtgtgggaagttttttgagggttctgcagagcaaatgtatcagtcccttattgttacactgggttcgctgccaaagtcaacccgagtttactgtgggcatgaggtacaatctcttttttcagtttcattaaggaggaacctgaatgctagtggaccattgaacctgtatggtggatgtatataaagtaactgtgtctccctttgtcttgtaggatgtaaatattgtattgcatcttctaagaaaatttatattatcaatgactaaaggacatatgtacaaatctactttcttctgtttcatgttctcaggaataggcagtttccatattgattgactgtttattgaatttcttttgtagcagattctaaattctgtgatttgttgcatgtcttattttaatacatttatgctggttggaatgttatccaacagcaaggagttaatatagagatatgatgctcacatgtgcctccttttgttgctagctaatagagtttatggaattgtatatatgtggcatgcatgtttgttagttactaggctcgtcgtctttccattcatgctatagttttggtaacaggtgcttgagctgttcatgatcttttagtttgcttggttgaattttagctctcgagttgtaaaagatgatgtcaattttgattttgccaacaagaaagaaccagtaacatttggttgttttgtttatctttccttaatatggtatactaatcgtgctggcagaggcatactgtgctctttatggccttacctcaccttttgcttgttgagttgcagtacactgtgaagaacctaaaattcatgctgacactggagccagagaatgagaagacgaaacagaaactggaatgggctgaaaagcagcgcgaagcgaatcagccaacagtgccctcgactataggagatgagtttgagataaatactttcatgcgtgttgatctaccagaaatacaggcgaaattcagtgtcaactctccagttgaagcaatgagagaggtcaggaagaccaaggataattggagaggttgaggacacccatggccgccactagtgggaatgaggtttactgccgtgcaatgctttgagaaatgtgttgttgtgaaggagaagactcctacaataagctccgcgttaatgagtagtaacaatacgctccttgtaacttgtggtctgtttgccaataataatgtacgaactgtagtgcctatcttgaaaatatgaagagctataatgggtataacctgcctgcattttatatttattcagggatcatcagtatatggattatgatcgatggatacagatgataaagatggatgagctgctatgctttcactgaagtttcttcttgccggaatcatttgacgccgaaggcttggagttcagc

SEQ ID NO: 3258 - DNA, 2509 bp, Zea Mays
caaggaccgtgctacaaagactgttttttttcttcttcgtcgaccagcgagcgagtgcaagaagctcctgttcgatcgatctcgggagctccgatactgcgcgcaatcccaaatttgacacagagtcacagcaatgtcagtgagccatgccgacgagcacgagatatctctgtgcgaccccagctccgaggacgaccggcggcgccggaagatcgggtccctgccgctcaaggctatccacgcgctacggaagaagcgcgcccggcgtcgcgtcactgacttccggttccccgcggccatctccatcgaggacgtccgcgacgccgaagaggagcgcgccgtcgccgccttccgcgaccgtctcgccgcgcaccgcctcctccccgacaagcacgacgactaccacatgatgctgaggtttcttaaagcaaggaagttcgattccgacaaggcaatgcaaatgtggtcagagatgctgaggtggaggaaagagtttggtaccgacacaatcttggaggactttgagttcgacgagctcaacgatgtactccactactatcctcagggctaccatggcgtcgaccgtgaaggccggcccgtgtacattgagaggctcggcaaagttgatccgaacaagctcatgcagatcacctcggtggatcgctacatcaagtaccatgtgcaggagttcgagagggccttcagggagaggttccctgcctgcacactgtcagccaagaggcacattgactccactaccactatactggacgtccatggggttcaagaatttctcaaagaccgcaagggagcttgtccaacgtatgcagagaatagacagtgactactaccctgagacgctacatcagatgtatgttgtgaatgcaggcagtgggtttaagttgatctggaacagtgttaagggattcctagacccaaaaacttcttccaagatccatgttcttggttccaactaccagagcagacttatcgaagttattgactcaagtgaattgccaaaatttcttggcggatcatgcacatgcagtgagaagggtggttgcctcaggtctaacaggggtccatggaatgaccctgtcatcatgaagctaatacacagtatggaaggtggtagtactagagaaataaagcaagtttctgacggggacgaaagaagtggctcttccctaagggcagaaaacctgaagggcatgcttagtgacatatcaaatgctgaatctgagtcggatgttgatgacgttggtttaacagttgtccaaaagagtacggaccacagtttactaaccccagttcatgaagaagtcaaggggtcagatacttcgatattttgtagttctagcagtaagcatctcctagatacaactcctggagctcctcaggccacccctcaaatggagatgcccattcagttgacttgccgtaaatattttcctacctttgggtggctaaataatttagggaatgcttacattagtttgcatggtacatccgctggaaggactctggaaaaccttgctaccggactgatcacactcttgatcaggatatcatctttcttccacctttccgtctaccggcaagaaagatttatagaaaccgtccaaccctgtgccgcggcacaggaaccagaacctcaaagggaagaggacatgagtgcttgtttacgacgcctcaagaagctcgagtcactgtgtgatcacctcatgagcaaacctccggatatgccgaaggagaaagaacttgtattgatgcagtccttcgatcggataaaatccctcgaggctgaactggaggcgacgaaaaacgcgctgcaggctgcggtggaaaagcagatggaactggtggagacggtagaagctctgcagcaccaatcgaccagcgttaggaggagattttgctgttcataggagtagggttgtcgtcgtcgcgccgaagctgtctgggttagcaaataatgaacctgacgctgcccttggcatcttgtttttgctcgacttctgaagcgtcatgacgccaaacctgtcgctggctcggcacactgtatgcgcggatgcgtgtgaaatcgatcattttttttgtagctacactctggcttctgtgatctccagagcttgcaaaatgtcaaagctttcgctgccctactgctgcgtattgttgagccgtgtcatttgcccttggcatttcgaaccatccatagcgctagctatttttgaccgctcccctcccatttgagttcttgatcgactcccgcccgcgtgcaccggcgccaacctctgcccacgcggccgcgcccctccgcctccgcgtgtcactcccgcacgtttctgctcgcctggtagtaacccgaacgcgcattgccgcgccgtcaagggtcgatccgatcggggaggaggcgtgacaagagatgggtccccacggaggcattgcgctccgcgcagccgtactcgccgccgtccgcttcgccgccgccgggttcatctcaagtcag

SEQ ID NO: 3259 - DNA, 2048 bp, Zea Mays
cccgtttaacggcggcacgacaagcaagcggtcacgtgagagctgatttttctcgcagcgggtagcggtagccctgtccctgacctgatcctgacccgtgcgggcgtgcggctcctcgcggacagctccagactccagagccgcctcttcgccctctcgccatcggcaggctacggtggctgcttccccgagcctgcaggtagaccaccttgtgttgattcctcgagtcttcacctggtgcttccgtttgcagcttcatttttaactaagatgtcacaagccaaggaagtgaggtacactgcacggtctattacacctcctgctgatagaaatggcacttcaaggtcgcctcctccaaagagacgcagcccttcaaggtcacctccaccaaagagtgcttcacggtccccacgtccaaggagtccaaagagacgcagcacttcaaggtctcctcctaggagacgtggtagatcaaggtcaagggataggagtcggtccagaaatccagggaataacctttatgtaactggattgtctactcgtgtaacggaagatgatcttgagaagttctttagtaaagaaggaaaggttaagaactgtcatgttgttcttgatcctaggacaaaagaatcccgtggctttgccttcgtgactatggatactcttgaaggtgcaagacgctccatcaagtatctgcaccgcactgtacttgaaggtcgcctggtcactgtagagaagtttaacatggtgctgggctgcctctacgtcaacctggttggtccaggctgtgcagtctccaaccatggttgtctccaaaggatgtgcagctgacgtgatggtgcttatcaccacaccctcagagctcatcaccacttgccgtcttcacctcgctcaccgacaatgcatacatgctacatcaacacgacggctgtcgccatagagcgatcttggagtcttgttgtgcatcgcgtcaccaccatcgccaccgcaacttctaccacaaccgccatcgtcaacatcacgctcgtgatccaacaggctctacgatttgtctgcttcgactaagcttacatggtgcatgctgctgccatgtcacgacaccaaccaccaagtctgatgcgaacttcatcgaccagtatcttgatttgatggacatcacgagaggcataatctggcgcttccttggaccatggctacaccgaccacggaacaagtgcacaaaagtcatctttggtttagttggcatgcaacgtaaagtttaatctacctatatcacaagattttgatcaagagttgacaagcttaatggaccatgactatttttcaccaaaagggcaaagctaaaagaactcgtgaaaggacccctactcctggaaaatactgtggtcgaagaggaggatctcaaaggagcccatcaccttaccgccctcgcagaagggagcgttcgcgctcaagggaacgcagaagggagcgttcgcgttcaagggatcgaagggagcggtctcgctcaagggatcgaagggagcggtctcgctcaagggaacgccgaagggagcggtctcgttcaagggaccgcagggagaggtctcgctcaagggaccgccggagggagcgctcacgctcaagggaccgcagaagggagcgctcacgctcaagggaccggaggggcagttcaccccatggcagaaggcatagagatcggtccaggtcacccaccagcaatgggaaccataaggcagactaggaagcgcttttatggacttgtcgttgattgcgtgaacaaaggaacttgtaacactacctataaactggtcagactgagacggttagcatggatttttagtagtgttgctgtattttgttgtttcatacaagtactctattctgttagctttcggatcgaaatgtcggatgatgatggttgttattgttctggaaatcgtagacatgtcctccagaatacctatgaaactatggcatactcgtgtgtttgcttaaggttgctgtggtatgttctgatcttaagattgacacgttgcacggtagat

SEQ ID NO: 3260 - DNA, 2786 bp, Zea Mays
cccgtttaacggcggcacgacaagcaagcggtcacgtgagagctgatttttctcgcagcgggtagcggtagccctgtccctgacctgatcctgacccgtgcgggcgtgcggctcctcgcggacagctccagactccagagccgcctcttcgccctctcgccatcggcaggctacggtggctgcttccccgagcctgcaggtagaccaccttgtgttgattcctcgagtcttcacctggtgcttccgtttgcagcttcatttttaactaagatgtcacaagccaaggaagtgaggtacactgcacggtctattacacctcctgctgatagaaatggcacttcaaggtcgcctcctccaaagagacgcagcccttcaaggtcacctccaccaaagagtgcttcacggtccccacgtccaaggagtccaaagagacgcagcacttcaaggtctcctcctaggagacgtggtagatcaaggtcaagggataggagtcggtccaggagcccagatgatagaaatccagggaataacctttatgtaactggattgtctactcgtgtaacggaagatgatcttgagaagttctttagtaaagaaggaaaggttaagaactgtcatgttgttcttgatcctaggacaaaagaatcccgtggctttgccttcgtgactatggatactcttgaaggtgcaagacgctccatcaagtatctgcaccgcactgtacttgaaggtcgcctggtcactgtagagaaggttagatgctgactgtactgattcattccattatgcatttttctattgtattttttgttgaatagtgctagttttgtcatgttatcgttgtatagtaatgtcaagtagtctaatactagcagtagtacagttaaaaatttaaagctactatacggtcatgcatgttttttgtcttatgcttgtccctccccttcccactttagccttgaaatcactgatgtcttagtaacataaatgcattaatcttgtgcactggaaattatattccattacattaaggggcttcaatgatgctatgctctgttcagtttaaaactctggtgaaggtccttgaggtgaggtatgttatgacttatgagtagaagattacaaatatgctctttccctatgatggaagagtatattctgtaacagacaagcctggaaaccccactcaggtgaaatgtgccagagtaaattgaaaggggatcatttatgatgtgttctgatgcaatcctaatgtggtgaatggggaaaacctcttctgtggctcttcaactggggtcttaactctcatctcgtgctgacttcctgaccttccagtttaacatggtgctgggctgcctctacgtcaacctggttggtccaggctgtgcagtctccaaccatggttgtctccaaaggatgtgcagctgacgtgatggtgcttatcaccacaccctcagagctcatcaccacttgccgtcttcacctcgctcaccgacaatgcatacatgctacatcaacacgacggctgtcgccatagagcgatcttggagtcttgttgtgcatcgcgtcaccaccatcgccaccgcaacttctaccacaaccgccatcgtcaacatcacgctcgtgatccaacaggctctacgatttgtctgcttcgactaagcttacatggtgcatgctgctgccatgtcacgacaccaaccaccaagtctgatgcgaacttcatcgaccagtatcttgatttgatggacatcacgagaggcataatctggcgcttccttggaccatggctacaccgaccacggaacaagtgcacaaaagtcatctttggtttagttggcatgcaacgtaaagtttaatctacctatatcacaagattttgatcaagagttgacaagcttaatggaccatgactatttttcaccaaaagggcaaagtttagtttcattatcaattatattaaccactctgttcaaatttaagatcgaattgggttcttcctttatttagcatacttgaagttcattgcttgtttcattcgtaccaactaatacatttgttcacgattttattccaggctaaaagaactcgtgaaaggacccctactcctggaaaatactgtggtcgaagaggaggatctcaaaggagcccatcaccttaccgccctcgcagaagggagcgttcgcgctcaagggaacgcagaagggagcgttcgcgttcaagggatcgaagggagcggtctcgctcaagggatcgaagggagcggtctcgctcaagggaacgccgaagggagcggtctcgttcaagggaccgcagggagaggtctcgctcaagggaccgccggagggagcgctcacgctcaagggaccgcagaagggagcgctcacgctcaagggaccggaggggcagttcaccccatggcagaaggcatagagatcggtccaggtcacccaccagcaatgggaaccataaggcagactaggaagcgcttttatggacttgtcgttgattgcgtgaacaaaggaacttgtaacactacctataaactggtcagactgagacggttagcatggatttttagtagtgttgctgtattttgttgtttcatacaagtactctattctgttagctttcggatcgaaatgtcggatgatgatggttgttattgttctggaaatcgtagacatgtcctccagaatacctatgaaactatggcatactcgtgtgtttgcttaaggttgctgtggtatgttctgatcttaagattgacacgttgcacggtagat

SEQ ID NO: 3261 - DNA, 2074 bp, Zea Mays
atggggcagtgctacgcgaggaacgtgcacggcgtcgacgcggacggcggcggcgtggaggcgaccaccatcacggtctcggcggcgggcgggccggaggatgcggcgtcggtagggggagggcgaggaggaggagggaggcggagcgcgcggccgtcgccggccgggacgccgcgcgggggcagggccggggcgactccggcgcggtcgtcggcggcgggcagcccctggacggggagcccgctcggcctccccgacggcatcgcgccgtcgcccgcgacctcggcgtccacgccgcgccggttcttccgccgccccttcccgccgccttccccggccaagcacatcaaggcgtccctcgctcgccggctcggccatcgctcgccggcctccgcgtcgcaggtgcccaggccgcccgtcgaggtcccgatcccggagcaaggggccggcggcgctggggaggtggagcgggagcttgacaagagcttcggctacgaccgccacttcgccgccaagtacgagctggggaaggaggtgggccgcggccatttcggccacacctgcctcgcgcgcgcccgcaagggagacatgagaggccaggtcctggctgtcaaggtcatctccaaagccaagatgacaacagcaatatctattgaggatgtgcgcagagaggtgaaaattttgaaggcgttatctggacattccaaccttgtcaagttttatgatgcttgtgaggacgcccttaatgtctacataatcatggagctttgtgaaggtggagaactactggatagaatcttgtccagaggtggaagatacaatgaaggggatgcaaaaattattgttgaacagatattaaaagtagttgccttttgccatcttcagggtgttgttcaccgtgatctgaagccagagaatttcttattcagcactagggaagagcattctcctatgaagataattgattttggtctctcagattttataagaccagatgaaaggcttaatgacattgttggaagtgcatactatgttgctccagaagtcttgcatagtgctgagagctgatcctaattttgacgactcaccatggcaatcagtatcgcctgaagctaaagattttgtcaaaagacttcttaacaaggattacagaaaaagaatgactgctgcacaggcactctctcacccctggctgcgagatgaacaccgacaaatacctttggatatgctagtattcaagttggttaaagcataccttcgatcgacgcctctcaaacgggcggcattgaaggccttgtcaagagcaataacagaagatgagcttatctacatcagggcacaatacaacttgttagaaccagacagcggagatggtagaatatgtattgataatttcaggatggctcttttacagaactgtactgatgctatgaaagaatctagaacacttgagatcttgaatgcgctggagccactcgcgtataggagaatggactttgaggagttccgtgcagctacaataagcccttaccagcttgaggctgtgccgcgctgggaagaaatcgccagtactgcattcgagtactttgagcaggaaggcaaccgtgctatcacaatcgaggagcttgctcaggagatgaatctttctgcagcagcgtattccatcgtccgtgactggatcagaccgttggacggcaagcttagctttgtaggctacaccaagtttttgcatggactaacgatgcgaagcggcaacacaaggcggcaccattgattcccttgctgccgcggtggttgcttgaattggttccattggttttgttgatggggatttggagagatggtgttttgtccctcttcttttcttgccttagctttttgtagaatgcttgtagagagagagagaaagggtaaaaggaaaaaaagaaacggaaagtgatagctcaaaattgagttgtagaagaaaaggtcattttttttttgccttggttctggtacattgtttgctttcggctatgatgaatggcattgtacagttgtcagttggcacatgctacatggtgctgtgtcgaac

SEQ ID NO: 3262 - DNA, 2340 bp, Zea Mays
cctgcctgtaatctcgtcgcccccctcgtccactgcattaatactgccactccccggcccccgttcccctcccctcgcacgcttccagagctataaatctcggcgtccctccccgctctcggacccgcattcccgtgcgcgagctccggtgatcgccgggaccgaccggcggccatggggcagtgctacgcgaggaacgtgcacggcgtcgacgcggacggcggcggcgtggaggcgaccaccatcacggtctcggcggcgggcgggccggaggatgcggcgtcggtagggggagggcgaggaggaggagggaggcggagcgcgcggccgtcgccggccgggacgccgcgcgggggcagggccggggcgactccggcgcggtcgtcggcggcgggcagcccctggacggggagcccgctcggcctccccgacggcatcgcgccgtcgcccgcgacctcggcgtccacgccgcgccggttcttccgccgccccttcccgccgccttccccggccaagcacatcaaggcgtccctcgctcgccggctcggccatcgctcgccggcctccgcgtcgcaggtgcccaggccgcccgtcgaggtcccgatcccggagcaaggggccggcggcgctggggaggtggagcgggagcttgacaagagcttcggctacgaccgccacttcgccgccaagtacgagctggggaaggaggtgggccgcggccatttcggccacacctgcctcgcgcgcgcccgcaagggagacatgagaggccaggtcctggctgtcaagatgacaacagcaatatctattgaggatgtgcgcagagaggtgaaaattttgaaggcgttatctggacattccaaccttgtcaagttttatgatgcttgtgaggacgcccttaatgtctacataatcatggagctttgtgaaggtggagaactactggatagaatcttgtccagaggtggaagatacaatgaaggggatgcaaaaattattgttgaacagatattaaaagtagttgccttttgccatcttcagggtgttgttcaccgtgatctgaagccagagaatttcttattcagcactagggaagagcattctcctatgaagataattgattttggtctctcagattttataagaccagatgaaaggcttaatgacattgttggaagtgcatactatgttgctccagaagtcttgcataggtcatatagcacagaagcagacatgtggagcattggtgttatcacttatatattgctgtgtggtagcaggccattctgggcacgaactgaatcaggtatttttcgctcagtgctgagagctgatcctaattttgacgactcaccatggcaatcagtatcgcctgaagctaaagattttgtcaaaagacttcttaacaaggattacagaaaaagaatgactgctgcacaggcactctctcacccctggctgcgagatgaacaccgacaaatacctttggatatgctagtattcaagttggttaaagcataccttcgatcgacgcctctcaaacgggcggcattgaaggccttgtcaagagcaataacagaagatgagcttatctacatcagggcacaatacaacttgttagaaccagacagcggagatggtagaatatgtattgataatttcaggatggctcttttacagaactgtactgatgctatgaaagaatctagaacacttgagatcttgaatgcgctggagccactcgcgtataggagaatggactttgaggagttccgtgcagctacaataagcccttaccagcttgaggctgtgccgcgctgggaagaaatcgccagtactgcattcgagtactttgagcaggaaggcaaccgtgctatcacaatcgaggagcttgctcaggagatgaatctttctgcagcagcgtattccatcgtccgtgactggatcagaccgttggacggcaagcttagctttgtaggctacaccaagtttttgcatggactaacgatgcgaagcggcaacacaaggcggcaccattgattcccttgctgccgcggtggttgcttgaattggttccattggttttgttgatggggatttggagagatggtgttttgtccctcttcttttcttgccttagctttttgtagaatgcttgtagagagagagagaaagggtaaaaggaaaaaaagaaacggaaagtgatagctcaaaattgagttgtagaagaaaaggtcattttttttttgccttggttctggtacattgtttgctttcggctatgatgaatggcattgtacagttgtcagttggcacatgctacatggtgctgtgtcgaac

SEQ ID NO: 3263 - DNA, 752 bp, Zea Mays
ccccgtcgctttatccgcggctcgtgtctgatgtggagccatgccatccggatagggatagcctcgcccatagcagctgcctgaaagttctctctgtttcctttgtcttctccagttgcccggcttcgtctccggtaacgccgcagcagcaccggcagagttcacgcagatggaagccgcgcgccagtccctcatcgcgatctcccagtcggtcccggaggtcggggcgcccgtcgtcagcccgcccagcggcggccgaggcatggatgagaatgggcacgaggacgtcgcggagcggaggtacagggcgaagcttatctccatctccaaccagtcgcccgacgcgcggcctacgacgtgccctcgcaacaacggcgccgcctaaagagccgcgtttgtgtattgtaacgtcgccgcatgtacgtgtacgtgtactggacacctaggtgtgtccgtgtgtgttctgcagttctgctaataatactcgtagcccaagaacaagaaccaggatatgggccttaataatcaccttgaactgccaaagggaacgcctgtgtggctgtgtgcaagcgtgctaaaggccacttagaaaagtctcattagcatctgagttgagttccagttccactcttatgttttcaacagtagacaatgttcctgttcgtgagttgtctgtgtgattttcttctaaatttttttatggactaaaaaaaggctacggtgattttagagagaatatttaatgctagact

SEQ ID NO: 3264 - DNA, 2441 bp, Zea Mays
cctgtttcgctctcccgcgagctcttgatgcatttggatcctggttgagcaatccaagctgagatggaaggccatgtagcaatggggtggaaggatcctaatccaggccaagaatcttccatggtcttccaatccagagctgttcggccagacaccgtagaggggcacagcaacgaggacgttgaagccggatttgagaagcatggcttgtcagccgccttaaactcgcctcagcacgaaggccgatcactgccactgaccccacagtttggccagaactccagtcctggaagcagcctcgccgagaggatgcaggcaagagccggattcaaggtgccgaagctgaacatgcctttcagcacggtagctggagatgatagttcagtgccaggagctccatcgccctacctcacgatcccgcctggcttgagcccagcaacgctgctggagtcacctgtcttcatttcgaatgccctgggacaagcctcaccaaccacggggaagctattcttgtttggtagcacaaatgacaacgatcctattcgacctggaggccctccagttggagatggcactgatgctttttctttcaagcccttagatctgaaatcctcacactacactgctgaagtaatgaaggaacaaaatacgcagtcttctgtgaagactgaagctaagactcaggcagtccaagaggctaatttgctgggccaactgaaccagcagaatcacgatgggcagacaaacatgaatagtgacggtgctcgtgactccaagctcagccgtcttgcgtctggcaccggtgcaggcaatgaacacgcatcacccccggattacggccagagagccgaggaagctgatgcgagggaagactacccggcggcaatggccgttacagcgccagcggaggacgggtacagctggaggaagtacgggcagaagcaggtgaagcacagcgagtacccgcgcagctacttcaagtgcacgcatcccaactgcctggtgaagaagaaggttgagcgctcgcacgaggggcacgtcacggagatcatctacaagggaacgcacaaccacccgaagcccacgcagagccgccggccaggcgcaggcgcgcacccgttgggcggcggtgcgcaggcggacgcagccgacaacctgcaggggtcacaggcaaacgcggcggaagccaaccaggcgtggcgtgcgggtgtccaggatggcgtggacgcgacgtcgcccccgtcggttcccggtgagctctgtgactcggcggcgtcgatgcaggtcgactgcgcggcccggtttgggtcccccgagggcgcggacgtgacgtctgccgtgtctgacgaggtggacggggacgacagggtgactctgactcatggcggtgccaacgcggcggagggcgacgaactggaatctaaacgaagagctgaccgtctgtctggttatttcaggaagctggagtcatacgccattgacatgagcactgcgtcgagagctgttcgcgagcctcgagtggtgatccaaacgacgagcgaggtggacatcctcgatgacggctaccgctggcgcaagtacgggcagaaggtcgtcaagggcaacccgaatccaaggagctactacaagtgcacgcaaccgggctgcacggtgcggaagcacgtggagcgcgcgtcgcacgacctcaaggccgtgatcaccacgtacgagggcaagcacaaccacgaggttcccgccgcgaggaacagcggccacccgagcgccgcggcggcgccaggcgcgggtggcccgcgcaggcaggagcacccgtccgtgcacgacggcctgatgagacagcacctgggcggctgcggcgtgccgttcggcctgccgccgccgccgccgccgccaagggacccgctggcgccgatgcgcaactacccgacgtacggcttcactgcccttggcgccggctccacgtcactgccgagcctgccgatgctcccggtgttggcgccgtcctccctgcaccagcacccgctgctgaggcaccggcaggcggtgcaggctgccggtctcgcgtggcgcccaaggccgacgtgaaggtagagggcagcgttgccggcggcgggatcccgtcggtgtaccagcagatgatccgctgcgggctgcgtctgccccaccagatgtagatacttaaaagtggagaggattagagtgattctcaagttcgtttcttaccattcctgttagtatgagttcgtgataagtattatagcgtggaaactgacgcccgctgcattcgttttttttcacccttctgttccacttcattttttcccgtatttatttatttactacccttcctcaatgatattcggttcttcttgttcagcaagacagcaactggcatcagttaatgttcatttgagaaatgaccaacagtttctgggctggcaact

SEQ ID NO: 3265 - DNA, 1414 bp, Zea Mays
aaggacaagcccctctccacacattccgtgatcaccctgggcccttgtaaattgccccttcaactgcacatctcctctccatcgtctccttgaggcttattatatgcatgcatcatccctgatctctttcatctcttccttgctagctacttctctagttatagctctctctctctctctctctctctctctctctctctctctctctagctctcttctctctcgtagtacatgtctaccgtcttcatgacccaactgccgcgtactctccgtctaatggagggagagcaggatcagggactctttccggcgtcgaccttccatgtcgcaaaggaccctccaatcttgttcccgttcatgatcaccagccccgtccatgtagatcagctccaagggcaaagcagctatggtgatcagcacttggggcagcatgtcttgtctgaatctactcaacagtctctctgcaacgcatgtggcataaggcaaaggaaggcgaggcgggcgatggtggccgcggccgcggcagctgctgccagcaacggaggcgcgcctccacaagcggtgagcggcgttgccacccagcagcagccgaagccgaagccggccaggaaggagaagaggtcggacgccgccgaccggtcgctgccgttcaagaagcggtgcaagatggtggttgtcgatcacgctgccggtgcagcggcagccacggcgacgccagaggccgcagctgctcggagtaccaaggatcaagcggatcacgtctccggcgacaagcaggttgttgcccctgccgccgcgatgaggagtctggatcagagcgagatcgccactcctcctccctcggcggtgtcgtcgtttcatgctgctttcccggccgacgagatcaccgacgccgccatgctgctcatgaccctgtcctgtggtctcgtccgcagctagctatatatggctagcttctacctgctgagaaatccgtcgctagcaagtgcaacctgattctgcacctaaaaagtaccctagctacatctaccatatcttaatatcgcttgtgttcttttgtttgattttgtgttgagaccggaagaggaaggagatcgccaggagatatatagagtgatcacatgtccaaggcggacgacaataattatgcgaaaaactctcgctagccaggaattagtcattttctaccataagagtgagccttttaatttcaccctttttcagttcttcggctaattatatattcaagtccactatatgctatgtaactttctttgttccataatttgtattacttatatatgttgtactggatcatcggagctaaataaaaatattgaggatatacagtgatcgaggggtgttgcatggttgtggcgttttttcactgttacatttgtgtagtgtatgtcag

SEQ ID NO: 3266 - DNA, 1991 bp, Zea Mays
ggcaagggcgcctgcgggcgggagaggaagaaaagcgaagctgctgcgccctcccctcccccatctgcgccctccgctccccccatcccggtcatggtatggagccgtcccgtggcgccgctggcggcgcgcggcggtggggggaggcggagaccgagggcgatgcggcggaggaagggagacgagcggaggacggcggcgaggtgagcctacgggagtggctggaccgaccaggccgggcggtggaggcggcggagtgcttgcacgtgttcaggcaggtggcggaggcggtggccgtcgcgcacgcaccgggggtggtcgtgggcagcgcgcggccgtcgtgcttcgtcgtgtcgccgcccttcgcgcgcgtcgccttcatcgagtccgccttcggctccgatgcctcgggttcgtgctcgggctccgacgccgacccagatgcctcgcctccgcggcgaggggacggcgccggacgcggcgaggagcgcgcggggaagtccttcccgctcaagagcgtgctggccatggagctcaactggtacaccagtcccgaggaggcggacgacagcgccgctaccttcgcctctgatgtctatagactgggtgtgctcttgttcgagctgttctgcacattcgaaacgatggaggacaagatgcgggcaatggcgaccgcgaatctgaggcaccgggtgttgccgccacagttgctgctcaaatggcccaaggaagcatctttctgccagttgctaatgcaccctgtgccagaaaccagaccgaagatgagttatatgaagagccatatagcatctagagattttgagggtatagtgcaggtttgggatgttactaggagtcaagtttttgttgagatgagggagcatgagtgacgtgtgtggtcggtggacttctcaattgtggacccaacaaaattggtcagtgggagtgatgatggatctgtgaagctatgggatatgaatcaggctgggagtattggcactattaaaacaagggaaaatgtgtgttctgtgcaatttcaacctgatactgctcgctccattgccatcggctctgctgaccacaaaatttactgctatgatctacgtcacatacgagctccttattgtacactagttgggcacacaaagactgtaagctatgttaagtatctggatgcatcgacaatagtatctgcatctactgacaactcattgaagctttgggacttatcgatgagtccaggaaggataattgacagtccagttcaaacatttaaggggcatacaaatacaaaggttggataaaacttccacatgtacttgttctcttttcataatattcgtctacaagtggttagtgtctggttttatcttttttaagtgtaactagtagaatgtctgatgaaaagaatatggtagtttaattttgaaagttgtactgttgcaatgaaacactagggtacggttggttacttcacttgctttgctcaccttgtctcgtccagcaaggtcactggagttgacgaagctaaagctgaacttgaggaaattgttcactacctacgagatcctaaggccgcacttgaagaaatcttatatcagtttgaggaaaaactccaagctgaaagagaggaagctgctaggaagcaggaagagttgcaagcacaagtacaagctcaacaggccgcatttgaagaaaaccaaagtttgctgcgccaggccaagcacaactaccttgctagaacatatctgtggttagaactttgtcagaactacgtgcaatctgtttgaatgcttcaaacctttgtggtggaacctttgtatgtttgaacctctgttgtggaagaactagtgtgctggaattgtgtatgacttgtgatgagtatgttgtgtatgatggcttttctgtgtattatgattctgtgagctatcatgagagctcagtgtgtcgtcactgtatggtcactgtatgtgggtgccataagtgacgat

SEQ ID NO: 3267 - DNA, 3184 bp, Zea Mays
aatccaacaatccaaaccacccacaccacaccaccctgctcttcacgagctcctccactctgttcttccccgccgctccactgcgcccttcctcccgccgggatcctaaaccctagcccctagggagcgggagaggctgctgctgctgctgctaccgcggcggcgccggaggggatgggcaccgggggagacgggagcaaggcgggcccggcgctgccgctcgaggcgctgctggcgctcggcctcgaccagcgcaccgccgagaacgcgctcgtcaacgccaaggtcaccgccaacctcgcctccgtcatagccgaggctggtataaaggaatgcgacaagtcagtcggcaatcttctgtatgcagtcgccaccaagtacccaactaatgcacttgttcaccgtcctgtccttattagctatgtcttgtcaacaaagataaagaaccccgcacagctagatgctgctctgtcatttcttactaatactggtcctgattctctagatgtggtcaaatttgaagaagcatgtggtgtaggtgtggttgtttctattgaggaaattaaatctactgttactgatgtgcttgaggagaatatggaagctataaaggagcagcgatatcacataaatgttggtacactatgcggacaggtcaggaagagacacccctggggtgatgctaaggcgataaaggaggaaattgacaagaggcttgcagaaatcctaggtcccaagacagaagctgacaatataaaaccagtgaaaaagaagaaggaaaaaccagcaaaagttgaggagaaaaaagttgcagttgccactgctgccccaccatctgaggaggaattgaacccgtacactatatttccccaaccagaggaaaacttcaagaaatatttttcagtgatgggaacatatggagagcgcataacacaaaggaaattttagaaaaacatcttaaagcaactggaggaaaagtgatgacccgttttccaccagaacctaatggatatcttcatattggtcatgccaaggctatgtttattgattttggtctggctaaggagcgaaatggccattgctaccttagatttgatgacacaaatccagaagctgaaaagaaagaatacatagatcacattcaggaaatcgtccattggatgggatgggagccctacaaagtaacatacacgagtgactatttccaagctttgtatgaacatgccgttgagttaatacagaaagggctagcatatgtggatcaccagactgcagaagaaatcaaggaatacagggaaaagaagatggatagtccatggaggggtaggccaattgaagagtctctgaaattatttgaagacatgaggcgtgggttgattgcagagggtgcagcaactctccgtatgaagcaggatatgcaaaatgagaacaaaaatatgtctgacttaatagcatatagaataaaattcaccccccatccacatgctggcgacaagtggtgtgtctatccgagctatgactacgctcattgcatggtggattctcttgaaaacatcacacattcgctgtgcacacttgagtttgacatacgtcgcccttcatactactggctacttgttgccttgggcctttatcaaccatatgtgtgggaatattcgaggctaaacatatcaaatactgtgatgtctaaaagaaagttgaatcgacttgtgacagagaagtgggtagatgggtgggatgatccccgcttgttgacactggctggtctccggcgacggggagtatcatcaactgcaataaattcctttattcgtggaatcgggataacgagaagtgacaatagcttaattcgtgttgatcgtctagaatatcacatcagggaggagcttaacaaaacagcccctcgaaccatggttgttttgcgacctctaaaggtggtaataactaacttggaagaaggaaaagtactagaccttgatggcaaaatgtggcctgatgcttctgatactgatgcttcctcccactataaggttccgttctcaagaactgtctacattgagaaaactgattttcgcctaaaggactcaaaagactactatgggctagcccctggtaaatctgtcatgctaaggtatgcgttccccataaaatgcacagatgttatctctggtgatagtcctgatgatattgttgaaattcgagctgaatatgatcctttgaagacttctaaactgaagggtgttcttcactggattgctgagccagcacctggtgtagagccattgaaggtggaagtaagattattcgagaaattgttcatgtcagagaatcctgctgaattggaagattggcttggcgatcttaacccacactcgaaagaggtgataaaggatgcttatgctgtaccatcacttgccactgcggttctgggtgacaagttccagtttgagcggcttggttacttcgccgtggatactgactccacacctgagaaactcgtgttcaacagaactgttaccctccgtgattcgttcgggaaagctggacccaagtgactgttcagtgtaatttagggagggcgctggttttgatcggttgcagaggcgcacctgaactatacagtttgtgaagaaaatggtcgtctaatacagaacagtttaaaggccttactctttataaaatttagggttttttaatctggtgccctcagttttggtgatgtgttcatttgtaccccttgtttacttcgaatcagattttgtatgatagtgttagtgtcccgattctaccgtctgtaaccgaaaggtcccgggttcgagccccagcctctgcatattatgcgggtaaggcttggcgcttaaagatacaattcccaagaccccgcacagtgcgggaagcctacagcactgggtacgcctagtgttagtgtcccgattcccattctgtttgatgtcatactattgtgatgggagttctgttttcccctgcgtcctcttttttttgcaaatccttactgtgatactactccctttaattttcaaattataagccattttgatttccttggagagtcacatcacaagtctattaaaattataaagaaaacgaagatttatcaaaattataaagaacaaatatttataacataaaatagatatagtataaaaatattataaaaacataa

SEQ ID NO: 3268 - DNA, 4602 bp, Zea Mays
catctatagattacgttggtcgtactccagtcgtacggtgaccgcatacatctggtttggagtctggcttctgcggctaagcaagattcatttggccgagcaggattgatgactcttgcatcctgtgttgcttcatgcacacgtcagtcagagacaaatgatgtgccatgtgctatatctgggaaagcagtgaccaaatgtgatggatgtgtacctacagaagttaggccaacagatttgttagatgtcttatggattctcagtgagaggagtaaacaacactttaatccaaagtatcgtctgaaagtttgtgaacaggttatccaagttgcaacatcactgataaatgccactgaaattccacttaaccagcttctgcatttcattgccacaattcctcgagagttcactgattatattggaccattgagagtagtagttcaaaaatggttttttcagaaggaagaatgttctcctggtgacactttgttgagtaagctgatcgatttctctgccaccttcgtaagtcaaaaacggaatgaaggttcgaatgtttttgatgacgaggatgtggatgcatgggaagctgaagcaaggaggtgggctagaacccttcttcttgtaaccgaggaggaggaacatttgaaacgaatcttcaggtttttggaggcatatggctacaagctctctgagcaatgtcccagtggagatttcatacccataaaattttttatcattgttttaagcttcattgaggaacttgagctgagacagagaaagcttgtttgccggagtaatacaatcttaagaggttcagatacattaaatggattagtgctcgatgatctcaacaaaatgttcacagaatcacttttgctaattttggaaaatatggtggcattcagtaaactgtcttgctccattttctggttagatgtggacaacaaggatttacccccttctatcaaaggaaagcttggaggcccaagccagcgtcgtttggctacctccattacttcttcagtattacagggtatttggtcaatgcgatgtgttagttctgttgcctcatggtgtaatccttacaactccgatgattctgtttcttctgcattttccgtgctatgggacttctatttgaatgttacccatcactccactattgccaatgagatcggagctgaacttcacctggcagcttatgaagctcttgcctatgttctggcagttctatctactgcttccagtactcagtttttggattttgtggaagcgaagcagacagatcaagcccacaagttttcattggacattttggtcaccactttccttgacaacatcaaccatcttcttacagagggaactctgacgcgaagcagaagagctgttttgatgacttggaagtggctttgtatggattctcttctatctatttcaagctgctatagtgacaatgaatctcaaatgaagaggttggaacctttattttctgattcaaccctccgatgcatttttcttgatattatcgaaagccttgaaaacactggtgaaaattctgtcttatctatcttgagatgtgtgagatctgttttgagattgctacacctgaatgagggcaacacaattttttcctctttaggcatcagctatgagatgatgatgcaattagcaaagtcttcctggatcttgcaccttaactgcaacaaacgccgagtggctcccattgctgcactactatctgcagtattgcacccagcaatattttgtaatttggaaatgcaccagacaaatgaaaaagggccaggccctttaaaatggtggcattcgacgaagattttgaagctgaactctctgaaaaccatgaagcaagatttgaggtttccatgctagcacaaagtcctgatcgtgaattcacagaggtgttcattaatacagaattatatgctcgtgtttcggttgctgttctctttcatcagctttggaaacaaatcaaagaacatagtatattggaaactgaagaagctcttgaatgcggcaaactatttctactagaacttctggactcagcggtgaacagcaaagatctttcaaaagaactctacaagaaatatagcagtgtacataggcgtaaagttcgtgtgtggcaaatgatatgtgttctatcacactatgtagaagatgatattgttggagaagtgacatctagcattcacatctgtctttatagaaataatttgccagctgtccggcagtacttggagacgtttgctatactcttatacttaaaatttccaaccttgaggagcaacttattcctatttttcatgacaaagggatgcgacaacaggcactatcttcatatgtttttatagcagcaaacgtcatacttcactcaagacagtccgtccagatataccacctgaatcaattgcttcctccaatactgccgtttttaacatcccatcatcacagtttacgtggttttactcagcttcttgtccattcagtgctatcgaggttgtggcctactctgcatcccgaaacttcagaagatgcagtctttgagaggaggtgctttcaagaattgaaagattatttggcagaaaattctgactgtgttaggtgtctgacttcgaatgtgttccggtgtcagtgatggagcgtgtgattgagttcctgaacgatgtgagggaggacttgagacaagctatagcaaatgatacagtaacaatcaagaatgaggatctcgcggtgggagagcatcacaagagtgacgagagcgtgtctgagatggtaaaaactggtcaagaggtacttgatttccagaagaaaataacaccccataggggggactccgagcaagcattgaacttgaacaccagaggtcattcaggcgttggtgacgaatacatttcaagaataatttcagagatggaggaagatgaccaagttttcgacctagcgctagaagcaagattgcatgctgcggaaacgatcaagcagagccggcaagaactgatcgtggttgcgtcattggtggaacgcataccaaatcttgcggggctgacgagaacgtgcgaggtcttcagagcagccggtctggttgttgccgacaagagcgttcttcaggataagcagttccggctgatcagtgtgaccgctgagaaatggctgcctgtgacggaggtccccgtggacagcgtgaaggcttacttggagaggaagcggggcgatggttactcggtgattgggctggagcagacggccaacagcatgcctctggaccggttcgggttcccggaccggacggttctggtgctggggcgggagaaggaaggcatccccgtcgacatcatccacattctggacgcgtgcgtggagatcccgcagctggggcgtggtgaggtcgctcaatgtccatgtcagcggcgccatagccgtctgggagtacacgcgtcaacaacgcaatcagcgttagcttgttgcttgtttttgctccattgaccattgacgacgaagactactactactacctgggagggagagtagaaatcaacatgcagcactcacaggaaggagagaaagacctgggctgggctgggccgacagtaatgaacgctagcccaccttcctttcccaccaccaagacgtacaagtcagactatattacttcatttatttgtgctaatatcgtaacgttttattgtgtaagcaatttggtacttgaagcctgcctgcatttggatttggagcggcatcagaagttttttaaagtatttattcgtagaggggtcgatcgagctcgcccttttattgctgcaaatatataatacacattattactgctgcaaacataagattacgttacattacattaaatgaaaagctatattacctcccgttctcgttatcccgctagttcatttttaacgaaacagtgacaaatatgaactaaacagcaacaaataaaaagaaacggaggggtactacgcttttttttatttcagtgcgcgcgtgtctgctccagacggtgctgctgcgcccagtccttgacgatgtgcggctgctgacccgacgacgaggtcgtggtctgaaggtagcggtacacccacgccagcacagccaccgcagccacgccgaaccctcccgacgaaacgatgcctaccgtgagcagcgccaccgtgatggccgccggcaccagcacggggctgaagatcaccatcaatggcgtcgccacgatgagcgccagcaccgtgcccgtcaccgccagccccgacaacaacaacatggagaaggctgccgtggctgtggctaacgccttggccaccgccatgggcgcgggcggcggccgctgctgctgctggtgaccgtagtgggtggcgttgtagtcatcgtcgccgtagaggcccctcatgtagttctctccgacggcctcgcttcttctccctgcacgatggtcatccgcatgatgagcagtggccatacaagctctggctagctagctagctagtatacaatgattcaaaagaaatagatgagtggagcagctagtaggttcttgcataatatatatatagatagatagataggataaggactgga

SEQ ID NO: 3269 - DNA, 1994 bp, Zea Mays
cagtagtctagaattctcaccaggtcctgccttgatgaaaataaggcttttctatcgaccgcagattctgctgtgcaattactcacagaagccaccaaaccagtttcaggatggaaggggattgagtatcgagcagcatttcctctacataagcctcccggtgctaacttctatcctcctgacatggacaaagcggagtttgaactttggaagagtaaactgacagataaagaacaaaatgatgccactgggtttttcaccgtcataaaacgacatgactctctgtcttcatcgtcattaacacaatcagatggatcggatcagaccaagactaaagatgatctttttattgttccatactccaaggagtatagaccattcctagagaaagcagctgagcttcttgagaaagcatcagcgtgctctgattctccaagcctcaagaatttgctgagaaccaaggcgaatgctttcctttcaaatgattactatgaatccgatatagcttggatggaattggcaacttttgaagcatttgtcggaatacgtgatgacacagcaacttctcaagttaaactctttggtgatcagctccaggatttggagaaaaaccttccaatggacaatattttcaaatcagatagtatatctgctgctcctattcgtgtgatcaatcttctctacaatgctggggatgtgaagggtccacaaaccattgctttcaatttgcccaatgatgaaaggattgtgaatgaacgaggaacttccatggttatgctcaaaaacatttcagaagccaagttcaagcatatcttaaagcctatagctgatgcctgcatcagagaggaacaaaaggaatatgttgatttcgagccatattatacacatatagtctgtcatgaatgctgccatggaattggacctcattctatcacccttccaagtggaacttcaagaattccattcagcattggaggaggcaaaagctgatatagttggtctctgggcactgaatttccttattaagaagggattgcttcctaagagcctgtcacaatctatgtatgtctctttcctggctggctgcttccggtcaatccgctttgggctggaagaagctcacggaaaaggacaagctctgcagtttaactggttgtatgagaaaggggcttttgtgttgcagtctgacggaaaattctcagttgattttacaatggttgaggatgctgtagaaagcctgagcagggagatactgacaatacaggcaaagggcgataagccttctgcccaatctcttctccagtcccgtgcaacattgacacaaccattgagaatggcattggagaggatagagcacatgcaggtacctgttgacatagccccggtattcagcacggcaaacaagctatttgcagacatttaactatttgggctcagaatcgttgtgctttagtaccgcccacaatacctggacgaaaccaggaattgctcaagaataaggcggcactaggaattgctcaagaataaggaagcgccccatgttaagcaaagctgataaaaccatggcgatatgtgagtgacctttttatcggaaggaaaattgtttgcatgcttatgtattgacctcaatttttacgtattggagtgatttgatgtgaaatttaaccaaattccacgtccagtacatggccatccaaacatggcctaaagtggtgtttgatcagtgagaattggaataaacccagctttgcctgaacagttgcgaagtactgagttacatcaatgcatattttgtaacaccaaaaaaagatgtattatcctaatggatgattgaacgaaggcattgtatatcgatccccaatggcccaatctttatgcacattctggcttgatcagatctagtttattagttaggcatatgacatctttaactcttaattttctaatgaacttgtcgaagttccatactagttttacattgactaacagataaa

SEQ ID NO: 3270 - DNA, 898 bp, Zea Mays
ctgttccgcagaatccgagtccaatagctctcctccccagggctttcaacttctccaaaccccatctcgccgccgaggccgagcgagcagagcagaacaccacgtcggcggcttttccctgtctctccgctggatactacacccgccgccgcagcgccgatcctgtccgagtcaagcggagcgggggatcggattggttgcttccttccctccatctcatgttggtgaatatgatgaagaaaatccccgttctataactaaatgcgagcatcatttccatctttgctgcattctcgaatggatggagcgaaaagatacttgcccagtttgtgaccagattactttggtggatgagatgttcgaataggtttggtaaccttggtggatcatcactcgaagctgttcgttactgagaaagtgcagcaactaatttacttttgatattgatccattccgggtggctcgcatggtaatgaattgagggggcaaaaattgaaaggatgaatgtcatgaaatgtatttacaacgcctcctttgtcatgcgttgtgtcatgctatatatatgccggcttgcgggttcattcagttcaaagtccaggactatccttttgcttttctgaattcagagtttcagacatctgctggttcttccaggttccggtcagctgtgtatatcatatattaggtggttgcaggtaaaaatggtctagagggtgggggttgctttgtacaatccacatggtatttaagcttcatgtatataatcttttctgtttctcttcgttttgttctgctgaatacttgcagatccttactgttctgataaaacttactgactcccaaatctgtgccagacaaaacgtgtttcaggaacataatacatctgatagcacttgtt

SEQ ID NO: 3271 - DNA, 1382 bp, Zea Mays
ctgtgcctctctctcgtagtcgtatctgcgttgcgccgctgcttaaacaaacgccggacaggggagggccgcggcacgcgtctccagtctccaccctccacggctccacccatctcaaaaccctagcaaccgcgcctccatcggtccatccctaccccaaatcccaatccaagttcggtccccaggcggcgaggaccctcccgcgccgactcgtccccgcagatcggcgggcggggcagattcagattcgggtccgtggttcgctcggctagcctcgccggggtcccaccgcggcggtcggggagcatggtgggaggggggaggcggggaggagcggcggcggaggaggtgaagctcaacaccggcaacgtgttcgcggcgctcgagtccctcaagaagaagaagaagggcgacaagggcagggcggccgggccgtcctccaggaagaagcacggcgcgggggccgcgcagcagcagcaggagccgccgcagaaggatgtcttctgggctcccgcgccgctcaccaccaagtcctgggcagacgtcgaggacgacgacgacgacgactacttcgccaccaccgcgccgccgcgccccgtatgggccgccgccgccgccgccgagcccgccaaggaggaggaggacgtcgaggatgctgtccgcgccgcccttcaggaggacgttgagagtgacgacgaggaccttgatgacgaggaccttgatgatggagctgagcatgaagtggaagatgccccagccgaacttgctgtcaaaacagttgaagccctggctgcgccacccaaagatacagaaaggcagctgtctaaaaaggagttgaaaaagagggaactagcagaacttgatgcagtattggctgagctgggactttctgggaactcaaccagcgctgcacaggatgctgagaaggaaggtgccaaccaagctggtgatgcagagaaaaaggaagatgctactgtcccctcagagagcaagacctccaagaagaagaaaaagaaggacaagagttcaaaggagggaagaaaagaaacacaagaagcagccgaggggtcagaggagactgccagtgcaggacctgatgaagaagataccactgctgtggacgtgaaggagcgtttgaagaagatggcttcaatgaagaagaagagatcgagcaaagagacggacaccggtgccaaaatcgccgctgccgaggccacagcaaggagcgcaaggcttgcggcggccaagaagaaagagaagagtcattacaaccagcagcctgtgcgcgaaaacttcatggacaacacgaccaattagggctactccggcaccgcctgtgttttgcattgctgcggcctgcggtggctacacctgcgaaatta

SEQ ID NO: 3272 - DNA, 2371 bp, Zea Mays
ctgccattcccctgcggccctgccccatactcccgtgtcttcccggccttcttcggatggccagacccctccttctccaaaaatcccagaataccttgggctcccgagcaggagagagcaatgcaacgagccatccggatagccgcggctgcgacaaggcgagcgctgtcgtcgtcggcggcgagggcatcaccccctcctccccgcggacccctggctcctggctggggcgccactaggtggctctgcagcgggcgggaggcgctgagctacgacgtggtgatcgtgggcgcagggcccgcggggctcgccgcggcgatccggctgaagcagctctgccgcgctgctgacaccgacctctccgtatgcgtcctggagaagggctccgaagtcggtgctcatgtgctgtcggggaatgtgtttgagccccgagccttggacgagctcattcccaagtggaggcaagaggattctccaatcagagttcctgtttcatctgacaagttctggctgttaacgaagaaccaagcttggacactaccatctccatttgacaacaaaggaaactacgtgatcagcttgagccaattggtgcgttggatggccacaaaagctgaagagttgggtgttgaagtgtatccagatactttatgatgaaaatcaaatagttacaggagtcgcaaccaatgatgttggtattgctaaggatggtaccaaaagggaaacttttcaacctggtgtagaactaagagggcgaataacactgcttgctgagggttgccgcggttcgttatcagagaaaataataagaaatcacaagctcagagagagagggcaagggcaacatcagacatatgctcttggaattaaggaggtttgggagattgaagaaggaaagcacaatccaggttctgttattcatactgttggatggcctttggatactaaaacatatggaggatcattcctgtaccaccttgatgatagacagttggcaattggtctggttgttgcgttgaattatcgaaatccgtttctgagtccctatgatgaattccagaaatttaagcagcaccctgctgttagaaaacttttggaaggtggaacagctattcagtatggtgcacgtactctcaatgaaggtggtttccagtcaataccatatccaattttccctggaggtgcaattattggatgctctgcaggatttctaaatgttcccaaaataaaaggaacccatacagctatgaaatcaggtatgcttgcggcggaagcaactttcaagtccctcgttgaaggatcttcgatggaactgtactgggagaacctcaagaagtcatggatatgggaagaacttcataaagctaggaattatagaccagcatttgaatacggattaattccgggtatggttttgtctgcactggaacgctacatattcaaagggaagtcaccttatacattgaagcatgggagacccgatcatgaagcaacagacacggccaatctgcatgcgcctattcaatatcctaaaccagatggacatataacatttgatgtcccaacatctttatacaggagcaatacaaaccatgagcatgatcagccgcctcatctccgcttgagggatcctacagtacccgaacgagtaaatgttgcactgtatgcagcgccagaatcacgctattgcccagcccgggtttacgaatatatctctgatgagaaaggtgacccaaagcttcatataaatgcacagaattgtcttcattgcaaggcttgcgacatcaaagatccaaagcagaacatcgagtggacagttccagaaggtggaggtggtcctggttacacagtaatgtagaatgctcaatgatgaaaatatgttgccttcaaaaataataacggctcattcaccactggtgtcaaactggaccaaatccctggctaattgggttggaagttacaccagacatctagcaatgagcaacttccttaaagcagtagacaggatgtcaggatgttcctagagctatgtaccgatcaggatcagtcagggaaagaagcgtgcatcacatggatgtggtgactgtaaaactattgggaagatgcaatttgtcgaccaataacaggcgctgtaagagagatctgtcccaaacgaaagatcgtaaggtgagatggagaatggcccagagctgggaatgtattaaaatagacagagtagataggccaagccccttatatatgggtatataggtaaatacatgaggactaatccaaaaccctagcgaggttgctaacacgccgtaatcttcaactttaacctgtacagacaacaaaaacaatcgacgatagccctttggtgaagatgtctgtg

SEQ ID NO: 3273 - DNA, 2382 bp, Zea Mays
ctgccattcccctgcggccctgccccatactcccgtgtcttcccggccttcttcggatggccagacccctccttctccaaaaatcccagaataccttgggctcccgagcaggagagagcaatgcaacgagccatccggatagccgcggctgcgacaaggcgagcgctgtcgtcgtcggcggcgagggcatcaccccctcctccccgcggacccctggctcctggctggggcgccactaggtggctctgcagcgggcgggaggcgctgagctacgacgtggtgatcgtgggcgcagggcccgcggggctcgccgcggcgatccggctgaagcagctctgccgcgctgctgacaccgacctctccgtatgcgtcctggagaagggctccgaagtcggtgctcatgtgctgtcggggaatgtgtttgagccccgagccttggacgagctcattcccaagtggaggcaagaggattctccaatcagagttcctgtttcatctgacaagttctggctgttaacgaagaaccaagcttggacactaccatctccatttgacaacaaaggaaactacgtgatcagcttgagccaattggtgcgttggatggccacaaaagctgaagagttgggtgttgaagtgtatccaggttttgctgctagtgagttacaggagtcgcaaccaatgatgttggtattgctaaggatggtaccaaaagggaaacttttcaacctggtgtagaactaagagggcgaataacactgcttgctgagggttgccgcggttcgttatcagagaaaataataagaaatcacaagctcagagagagagggcaagggcaacatcagacatatgctcttggaattaaggaggtttgggagattgaagaaggaaagcacaatccaggttctgttattcatactgttggatggcctttggatactaaaacatatggaggatcattcctgtaccaccttgatgatagacagttggcaattggtctggttgttgcgttgaattatcgaaatccgtttctgagtccctatgatgaattccagaaatttaagcagcaccctgctgttagaaaacttttggaaggtggaacagctattcagtatggtgcacgtactctcaatgaaggtggtttccagtcaataccatatccaattttccctggaggtgcaattattggatgctctgcaggatttctaaatgttcccaaaataaaaggaacccatacagctatgaaatcagggatgaatgtgtaaaaaaggtatgcttgcggcggaagcaactttcaagtccctcgttgaaggatcttcgatggaactgtactgggagaacctcaagaagtcatggatatgggaagaacttcataaagctaggaattatagaccagcatttgaatacggattaattccgggtatggttttgtctgcactggaacgctacatattcaaagggaagtcaccttatacattgaagcatgggagacccgatcatgaagcaacagacacggccaatctgcatgcgcctattcaatatcctaaaccagatggacatataacatttgatgtcccaacatctttatacaggagcaatacaaaccatgagcatgatcagccgcctcatctccgcttgagggatcctacagtacccgaacgagtaaatgttgcactgtatgcagcgccagaatcacgctattgcccagcccgggtttacgaatatatctctgatgagaaaggtgacccaaagcttcatataaatgcacagaattgtcttcattgcaaggcttgcgacatcaaagatccaaagcagaacatcgagtggacagttccagaaggtggaggtggtcctggttacacagtaatgtagaatgctcaatgatgaaaatatgttgccttcaaaaataataacggctcattcaccactggtgtcaaactggaccaaatccctggctaattgggttggaagttacaccagacatctagcaatgagcaacttccttaaagcagtagacaggatgtcaggatgttcctagagctatgtaccgatcaggatcagtcagggaaagaagcgtgcatcacatggatgtggtgactgtaaaactattgggaagatgcaatttgtcgaccaataacaggcgctgtaagagagatctgtcccaaacgaaagatcgtaaggtgagatggagaatggcccagagctgggaatgtattaaaatagacagagtagataggccaagccccttatatatgggtatataggtaaatacatgaggactaatccaaaaccctagcgaggttgctaacacgccgtaatcttcaactttaacctgtacagacaacaaaaacaatcgacgatagccctttggtgaagatgtctgtg

SEQ ID NO: 3274 - DNA, 1712 bp, Zea Mays
aaagcacacgcacaccaaactaccaaaccaacagagcaacatcaatgcgccttccgccgccatcaaccaccgcggccgcagccgctgccaccgtcggggccgtactcgccgcagtcgccctccgccgctacctgtccgcttctcgccaccgcgaacccgcccgcgtgcccatgtccgcggccgccggagccaccacgcttgtggtgtacggcaaatcggcgcaggagcaggagctgctggcctccgcggccggttccgtcgtcctcggtgagggcgatccgtccggtgatgtcgccatcgcgctcgcctacgagagcgcgggcttcgacgccgccgcgtacatgagcgcgctccgggcgcgccggttcgggaggtggatgctctggacgcccaggattggttccacgcaggatctcatcacgcggaactttgcaaagctaccggtgggcgttgtgtgcgttgccgacgtgcagttcaaagggagagatgcaggatgcacggaagttgccccttatgcaatatgttgtctgcctttcgataactgaagctatcaaggagctgtgccgtgccaagggactaccagaacttgatgtgagaataaaatggcctaatgatctctatctgaaaggattaaaagttggtggcattctatgtacctcatcttatgaacccaaagtgtacaatatttgtactggtgttggtttgaatgttgacaatgagaagcctaccacatgcttgaatgctgcacttcaagaggcaaatcatacatcacccatattgaaacgagaagacatattggcatacttcttcaataaatttgaaaaccttttcgagatcttcatgaaccatggatttcaggttcttgaggagcaatactataactcatggcttcatagtggccagagagttgtcgtacatgatgcacatgaaaacaagtcaggcagtgtcgtcaccatccaggggttaacaccaactgggtacttacatgctattggtgaggataacaaaagctatgagttgcacccagatggcaacagctttgatttcttcactggattggtgaggaggaagatggaagcttagggtatcaatacaatgggatacatggatagattcaacagactgtacaaatgaatggaatgagaacatgatttaagcatcagccccctccatctgtattcaaaccttgtgcttggaataaatagaaggaatgctcttatcacaatcctgaacggccgctttgagacctcaaaccttaacaagtgccccaccctcgcaattccatttgcgacagctcagcataaacaattaagaagacaatcaaccgtgactgaagcccaggcatgagttcagatctcaggtgaagaaatcgcagtgactgaagaccgtttacttgaatgattcatatttcataggaagaatgcatgaaaattatgaagcacatctgctccattgatgggcggacagcttcttcggcagtgtttggggctcatgtttgcatcaggttctgtataactgcagtgttttttctattagtgaactaagttggaaatctgctgcaactgcaagatttgtagcggtgatgtatgagttggtaacttgtatttgcacagatgcttaactgaaaggacatgttatatattatccatgctgtcgttgttggcttgtgcaagtcgtctgggtaactgcatatgcatcattgcgtgtgttcc

SEQ ID NO: 3275 - DNA, 2050 bp, Zea Mays
aaagcacacgcacaccaaactaccaaaccaacagagcaacatcaatgcgccttccgccgccatcaaccaccgcggccgcagccgctgccaccgtcggggccgtactcgccgcagtcgccctccgccgctacctgtccgcttctcgccaccgcgaacccgcccgcgtgcccatgtccgcggccgccggagccaccacgcttgtggtgtacggcaaatcggcgcaggagcaggagctgctggcctccgcggccggttccgtcgtcctcggtgagggcgatccgtccggtgatgtcgccatcgcgctcgcctacgagagcgcgggcttcgacgccgccgcgtacatgagcgcgctccgggcgcgccggttcgggaggtggatgctctggacgcccaggattggttccacgcaggatctcatcacgcggaactttgcaaagctaccggtgggcgttgtgtgcgttgccgacgtgcagttcaaagggagagatgcaggatgcacggaagttgccccttatgcaatatgttgtctgcctttcgataactgaagctatcaaggagctgtgccgtgccaagggactaccagaacttgatgtgagaataaaatggcctaatgatctctatctgaaaggattaaaagttggtggcattctatgtacctcatcttatgaacccaaagtgtacaatatttgtactggtgttggtttgaatgttgacaatgagaagcctaccacatgcttgaatgctgcacttcaagaggcaaatcatacatcacccatattgaaacgagaagacatattggcatacttcttcaataaatttgaaaaccttttcgagatcttcatgaaccatggtactcggattccatttccccccatttttgcagtacataaccacatgctcattagaaccgtggctgttgatgtgtatgcagagctggttcctttactgacaatgcattaaatgataattttgttttgctgtagagacttactgttttcctatagctgatttagatgctgacaaaaaatgttttgaagttaactacaatttttttgaactctagtctacccctaaaaggcttttgtttgtttgttgtttttgtctagcctaccccaaatttcttgggactaaaaggctttgttgctgttggtagaattgtgtacttaacatcctcaaatttctctgcaggatttcaggttcttgaggagcaatactataactcatggcttcatagtggccagagagttgtcgtacatgatgcacatgaaaacaagtcaggcagtgtcgtcaccatccaggggttaacaccaactgggtacttacatgctattggtgaggataacaaaagctatgagttgcacccagatggcaacagctttgatttcttcactggattggtgaggaggaagatggaagcttagggtatcaatacaatgggatacatggatagattcaacagactgtacaaatgaatggaatgagaacatgatttaagcatcagccccctccatctgtattcaaaccttgtgcttggaataaatagaaggaatgctcttatcacaatcctgaacggccgctttgagacctcaaaccttaacaagtgccccaccctcgcaattccatttgcgacagctcagcataaacaattaagaagacaatcaaccgtgactgaagcccaggcatgagttcagatctcaggtgaagaaatcgcagtgactgaagaccgtttacttgaatgattcatatttcataggaagaatgcatgaaaattatgaagcacatctgctccattgatgggcggacagcttcttcggcagtgtttggggctcatgtttgcatcaggttctgtataactgcagtgttttttctattagtgaactaagttggaaatctgctgcaactgcaagatttgtagcggtgatgtatgagttggtaacttgtatttgcacagatgcttaactgaaaggacatgttatatattatccatgctgtcgttgttggcttgtgcaagtcgtctgggtaactgcatatgcatcattgcgtgtgttcc

SEQ ID NO: 3276 - DNA, 1186 bp, Zea Mays
gccttttttttccctacagactccagtccactgcgcaaactccaccagttgctttgctcgaaaggcggatgcgcgctatgcgcgcggaggccaccgagagcagcgccttaaccgccggggctgcgcatttgctctgctttgcaggcctcgctgccgcccacaccctcgctggccgcggcgcgctcgtctcagaccccgcgctcgccctccgccttctcgtggtctgtgaagcgcccatagtcatcgccgtgttcagctacctccggcgtgatgccaaaagctgctcgattttcaaagctgttgcgagaggattgatctgcttgcccgtgggagcattccttaatgcatttggagcaatcgttcttggtgcacctgttggaatcaaatactggatacctactatatattggtcactcctcatgtccctgttcacgtttgttccagcagcatgtgtctttggagcatccaagattgattggcaaaatgtgctttctcactccatttatttcatgccaaatgatgttgagaactacatgatctctgcaccttgtcatggagctgtgctaggagcatggctcggtggttggcctatgccccttgactgggagaggccctggcaggaatggccaatctgtgtctcttatggtgccgttgctgggtatttggttggaatggcagtgtcagtggtcctagtagctgttcacaatagaagggttcgtgcaaaagctgactagcctgtggtcctgtggatgatgagtgcagctgtcctaatagctgttcacaagaacaatgtatttgctgataacctatcttgttagtggacggacaggcagatagagggagttgctctaagaaaactaaagagacgaagacgatggcgtcaacacttacaacgagcgggacaaaagagatccagacaagcgtgccgaatcctgcgcacataattaatgatggtggttattacaagaccaataataactcaataaagactgtgttttcttttaccaacaagaacagctatctaggattgtaaggatggtaagtacccttgatatcgatcaagagagtgaagatggcgacgaaccacagcgggagactgcgtacacagaaagccagccagatgtcagggctccaacgtcataacaatgcaaaagagaaaagactacgcgaatcaggcagttctttt

SEQ ID NO: 3277 - DNA, 3185 bp, Zea Mays
tcgtcttctcccccccgtcagagcgagactgcgagagacagcgcgaaggtagagagagtgtgtggaacagtggaagcagcagcaaacgcgaccatggcgggtggcgccggcgggcgggacccgctcgtcgcctccgagatccacggcttcctcacctgcgcagacttgaactttgacaagctgatgatggaggctgggacacgctggttccggccgaatgagatctatgcggtgctggcgaactatgcaaggttcaaggtccatgctcagcccatcgacaaaccaattagtggtactgttgttctatatgatcgtaaagttgtccggaacttccgtaaagatggccataactggaagaaaaagaaagatggcaagactgtccaagaagcccatgaaaaactaaagattggtaatgaagaaaaggttcatgtgtattatgctcgaggagaggatgatccaaatttctttcgcagatgctactggctacttgacaaagagttggagcgcattgtcctcgtgcattatcgtcaaacatctgaggaaagtgccttaccaccttcgcatgtagaagctgaagttgcagaagtgcctcggatcaatatgattcattacacctcctcaacagattcagcctctgctcatactgagctatcttcttctgctgctgctgcaccagaagatatcaactcaaatggtggtggggcggtttctagtgaaaccgacaatcaaggttctagcctggaatcattttgggtagatctattggagtcatctatgaaaaatgatactcctgttgatgcttctgcttgcggctatcttttctccaccaactaatgtggtttcagaagcttatgctaatcctggccttagtcaagtatcagagagttactttggatctctgaaagatcaagcaaaccatgctccatctcttttaacatcagatctggattcacaatcaaagcaacatacaaattctttgatgaaaactccggtgtctgataacatgccaaatgatgtacctgctaggcagaacagtcttgggttatggaaatacttggatgatgatattagtttagatgataatccaagctcgggcatactccccactgaacaggtgactggcgaaataccctttcagatcactgagatatcctcagaatgggcttattgtactgaggacacaaaggtccttgtggttggatgtttccatgagaactacagacatctggctgggaccaatctcttctgtgtcattggtgaccagtgtgttgatgcaaatattgttcaaactggcgtttaccgtttcattgctagaccacatgctcctggacgagtcaatctttatttgactttggatgggaaaacaccaatcagtgaggttttgagttttcactatcgtatggtgcctgacagtcaaaacttggctgaggatgagccccaaaagtcaaagcttcagatgcagatgagactagctcgattgttgttcaccacaaacaagaaaaagatagcacccaagttacttgtagaaggaagcaaggtttccaatctcttatcagcatcgacagagaaggaatggatggatctgtcaaaatttgttactgattctaaaggcacttatgttccggccactgagggattgcttgaactagtactgcgtaatagattgcaagagtggcttgttgaaaaattaattgaaggccacaagtcgactggccgcgatgatctaggacaagggcctatccatctgtgttcttgcttgggctatacttgggccattcacttattttctttgtcaggattctccttggatttccgtgattcttctggttggacagctttgcattgggccgcatactgtggaagggaaaaaatggttgctgctcttttgtctgctggagcaaatccaagcttggttacagatcctactcatgatgtccctggtggacaaactgctggtgatctggctgctggacaaggttatcatggcttagctgcatatctttctgagaaagggctgactgctcattttgaggctatgtcactgtccaagggtaagcgatcaacatcaaggacagagtcactaaaacggaataccaaggaatttgaaaaccttagtgaacaagaattgtgcttacgagaatctttagcagcctaccgcaatgctgctgatgctgctagcaacatacaagccgcactcagggagcgaactcttaagcttcaaacaaaagcaattcagttggccaatcccgagaatgatgcatctgcaatagttgctgctatgaggattcagcacgcataccggaactacaacagaaagaaaatgatgagagctgctgcaagaatacagagtcatttccgaacatggcagattaggaggaacttcatgaacatgcgaagacaagctatcaaaatacaagctgcatacagaggtcaccaagtgagaaggcagtaccgcaaggtattatggtccgttggagtagtggaaaaagctatcttgcggtggaggaagaagagaaaaggcctgcgtggcattgcaactggaatgccagtagcaatggccacagacgcagaagcagcaagcactgcagaggaggactactaccaggttggtcggcaacaagccgaggacaggttcaatagatcagtggtacgtgtccaagctttgttccgttctcatcgggcgcagcaggagtaccggaggatgaaggttgctcatgaggaggccaaggtggagttcggtcgaaagtagttaagacgggcatagattcaagatctgaagtgacttgttgttccttgtagggggttggctagttcttctagttctttgtatatccgaaggaacaggcgtagcttgcggatgacgtacattctaggaacatctgacgctcgtagtcagtctgccaactgccgttaggcttcttctgtggtgtgtatttggctgggttttagttgggcgaaaacggcattgtgctttattaggtttgatttgtatggacggacgcgagtacgaataaggttgtaaatgctgataataatttcacctgactataaatccaggtggattgcaggcaccatttgttttttttctttatttgatgttttttccttggcagtaccgctacgtacaaccattatacgtcttgcttttgtgataattcactccagcacatttgctagagttcttg

SEQ ID NO: 3278 - DNA, 1470 bp, Zea Mays
caccgctttaaatccgcctcctcccagcgtctccctcctcccggcctgtcccctcacctccctccccctatctctccaccgccgcagctagctgcgacgtcatgcactcgccggcgccaccgccaccgcatactatctacaattagccagccgtaggcttacctatcctgtgtcaagcaagcctctcgcaagcaacaaggaaggaagctagctagttttatagctgctgtcggcggcggcggctgaagcgacgtgcctgagctaggatttaggttgagatcaggagagggagaaggcggcggcgatggggcgcgggaaggtgcagctgaagcggatcgagaacaagatcaaccgccaggtgacattctccaagcgccgctcggggctactcaagaaggcgcacgagatctccgtgctctgcgacgccgaggtcgcgctcatcatcttctccaccaagggcaagctctacgagtactctaccgattcatgactagtatatatgtggggaacttccacataccagaactgattgaaagagctagatacaatataatgcagtcagaaagtatggacaaaattcttgaacggtatgagcgctactcctatgcagaaaaggttctcatttccgcagaatatgaaactcagggcaattggtgccatgaatatagaaaactaaaggcgaaggtcgagacaatacagaaatgtcaaaagcacctcatgggagaggatcttgaaactttgaatctcaaagagcttcagcaactagagcagcagctggagagttcactgaaacatatcagaacaaggaagagccagcttatggtcgagtcaatttcagcgctccaacggaaggaggagaacaaggttctgcagaaggagctcgcggagaagcagaaagaccagcggcagcaagtgcaacgggaccaaactcaacagcagaccagttcgtcttccacgtccttcatgttaagggaagctgccccaacaacaaatgtcagcatcttccctgtggcagcaggcgggagggtggtggaaggggcagcagcgcagccgcaggctcgcgttggactgccaccatggatgcttagccatctgagctgctgaaggtttgccctcaccgtcgcgatgtgatagcccaaaatccagcaagtcttccccggaccccggactgtccccgcttctccgcctggtgcagtatcgtcgtgatcgcgagaagcagcagcagcggtttgccgtattttttaccactgtgtataagtagcatatctgcaatgtgtatattttgttcaccgttcctgctggggcggccgcacggtactttacgcatgtaatatatgtgcttcatcaaatcactttcactaccatagcatgtgccggtttgtggtagtttcatgtctcacataatgggtacacattcatatcccagtggtctcggttcttcacatcaaagttctatttcttcatgcagca

SEQ ID NO: 3279 - DNA, 3950 bp, Zea Mays
gcagtttcctcttgacttggtgtgctttcccgagtcttcagtcatctcctgcctgaagcaaactggcttctaaaaataaattgtcttgtctgaagataataaaacacagcgatgcaccaagacagtttcaggtcggtggtctgcagatccctctcgaagagcctgcccccaaggagcaaagatggcagctgttccgaaacagtccagtgcactgtcccctgtatcgtcacgctgcagccttcggtctgtcggagctgccaaggtcgggatgtacagagcgcgtcgcagagctacagggaggatgaaaggtccatgtcgttccacggggactacctgatggtgccctcgctgtccaagcattttgctgaggacctcctaataagaggcgccatggatctccaggagtcccttgcgatgcttgagaggttccaagctgcgtcactgagcatgagactactgtccagcaagaagataagaccggaaactggtgaacagtctcctgcgatagacaccatagtccgtgaagttctcctgaggccatcgaacgccaagcaggtgcaggtcaatggattaaaacaacagctaagcgattctaccagtgagttgaaaaatattgtcaaggatagtttttacaagaagaaccactctctggtgtccaacaatgagcaggcctctttgactttgagccagtcggcacggcacttgccgaacagttacctgatgcccaagcctgctgctcatcagaagaaatctgtgcccatgtcgtcgccatcttgtgcagcagtgcgacctgaaaagtctaagacgccaagcttggtagccaagctcatgggtctcgatggattgccctcgccgaaagctaaatccaccatgaaagacgacaagaacaaggcagcgagttcaccaagagcgctgttcgataccgagaggcccaggtcgaagaggctgctgccgcagttactcaaacaggaggctggttttggctcagagatgcctcggtcagaaaagctgccaccattgcaatctaacgttcaaaagaactctaccagctcaaagaagggcatcgtcggcacttcgtatactaccggagcggttcatgatactgcatcgatcaaaccgatccaaagagcggcatacgttgagcaggctcgaccgaaatccccgaaagaaatcaagatcgtctcttctcctacaggcaggaagcaacgggcgaatgagatcaacaggaggagcacggagaaacaaaggccttattcaggtgaaagaagcagagaaaggatgaatgctgcgaagtcaagagctggatcagcgtctcgtagcgcggaagcagtagcgaaacagtgtgataggagatcagttgcgtcaaggagcaatcgtacttgtgactcggtggtgaagcccaactcaccgaaaccacagagcaattccagagcgaggagagtgcccaggagaaatgttaagagctccaccgttgatgaattagtggcttacgagatagaaaaagagattctccatgccctggaccaaactgacggtccatccacagaacatagcgcgacaccgagcgacgaagcctgcccgagcgctgactgggacgaagcatcttctgtgggcgacatcctgaaagatcctggcgaggccagcgaaacatcgcagtctgctgtccgtgactgtagaatcagctcagctggtgcggatgcagatgctattcactcaccgacgcacagagccccgacaagggaagctgaaataaaagacgagatcggcttgcttctcctcagtgacaaaccgttccttagcagagcagctgagctcataggcgttgatgtgtatggggatctgagtaaccagtgtgacaggatctccaaggctagaacgagaaaccgtcggctctatctggacgcggcaggagagcaactggagctgaaacaccgccagcagaacatcctgtggccttacgctaggccgctgggccggagatggaggtcatcgtcatcggcgtacctgtcgctggaggagctgctgagagatgtcagcgacggggttaggaatctggaggatgggtattgcagtggagatgcccgccgtggcagcaaggatagcctggacgtgaagctggagagggatctcacctcctccgcagatgcgttgatcagtagtgtttgggacatgggctggcaaggtttggcttgtgtggaggcggaatgcttcgtcagagatgccggggaggagatcctgtccttgctcgtcgaggaagctgctctagacatgtgtctgcactgccatagtgccatgtgatgatatgaacatacagcgataagttgctgccatcgggacgatctataacaacttgcagcttcagttcttgtagttgtttttctttttttaggtttgaagtagatttcgtccgtgtaatcaccaggattgtagtagtataggaaccagtgaagtgatgtgttcatgagttcatcaagacatgactgaacaaaacaaggccatgaaaggaaggaaaaaaaaacagaaaaggtcacatacctgtcgtgttttgttgagtggcgacttgcgagcaccaacaaagccgagtcacgggccgagcccacgggagattcctattggcatctccatccgtcctcgtcggcatcccagccacacacacacacacaccgcacctagccacctaccctgctgtcccccgtgccgtcgccgatggagtccttgggcgtgctgctgctccaccccttcaacgcgtacctggagcaggagctggaccgccgcttccgcctgtaccgcttctgggagacgccccgcgaggagttcctccgcgcgcacgcgggcgccgtgcgcgccgtcgtcggcaacgccagctacggcgccgacgccgcgctcatcgacgcgctcccggcgctcgagatcgttgcctccttctccgtcggcatcgaccgcgtcgacctcgccaagtgccgcgaccgcgggatccgggtcaccaacacccccgacgtcctcaccgacgacgtcgccgacctcgccgtagggctcgccatcgccgtgctccgcaggatcccgcaggccgaccgatacgtccgcgcggggctctggaagtccaggggagactacaccctaaccacgcggttcagcggcaagcgggtgggcatcatcgggctgggcaggatagggcaggcggtggcgaagcgagtggaggcgttcgactgcccggtgagctaccaccagcggacggagcagcgggcgacgtacccgagctacacctactacccgtcggtggtggagctggcggcgaacagcgacgtgctggtggtggcgtgcccgctgaacgcgcagacgcgccacatcgtgagccgcgaggtgatggaagcgctaggccccagcggcgtgctgatcaacgtcggccgtgggccacacgtggacgagcgcgagatggtggcggcgctggcggacgggcggctcggcggcgccgggctggacgtgttcgaggacgagcctaacgtgcccgaggcgcttctggggatggacaacgtcgtgctgctgccccacgtcggcagcggcaccaacgagacgcgcaaggccatggccgacctcgtgctcgggaacctggaggcgcacgtgctcagcaagccgctgctgactccggttgtctgacgtttccttgtttctattacgaaataacaagcgcctgcgcctgacagcgagtggggattaaattcaaaatgttttgttttgatttgatcgccgctggtgaatggaactgaaatgtgctgtcaattctcagtccagtgcacacgacacgcttgcacgaatgtcgagcaaattatggcatcttcttttgcgaagccgcctcctcgtctgtacactctcttcccctttggagactttacgtatctgcgatgaggtttgttcatcctaagtccttttcggttggagggatttagtgagga

SEQ ID NO: 3280 - DNA, 3379 bp, Zea Mays
ggattgcattatccgctcgctgtgcctgccctgcttcttccgccattctttccgtctctgctctactttcttggtcgcctgtccggaggctcctccccgcggcccctgagcaaactgtaccatagccgcgtgattgattggttcacgggagggacagggagcggcgtcaagctggttttggtagtaaaaaatcacttcaattgtcccctcattcccatactaaagcaggctgcccaaaatttctcaatattgtcctcagaatttgttgctgtgcttttgccagaagcggtgcttgcttcggcagatggttgttctcccgcacctgtcctaccgccgttgatcgcgagagtctcgtacgtagtcttcgggggcaagcatccatggcggagtcatcgtcaaggcaagcggccgagatggtggagaagtggatggcgttcccgtctggctccgacgccggcagcggcttcgcgttcccggcgccacgctcagtgtcgggcgcgggcaaggagatagtggagctggcgtcgccctccacagccacggccacggccacggccacgaccacggccagtgccggcaacaggcaggcctcgttccagcgcggccgcgacagtggcgtgggcagcaccaggtcgtccatggacggcgcgcgcgcgtcgggggactcgtcgatgccgcgggtgtcgcaggagctcaaggacgcgctgtccagcctgcagcagaccttcgtggtctccgacgccacccgcccggactgccccatcatctacgccagcgccggcttctacaccatgaccggctacacccccaaggaagtcaccggccgcaactgccgcttcctgcagggccccgacacggacatgaacgaggttgccaagatccgggacgccgttaaaaccggccgcagtttctgcggccgcttgctcaactaccgcaaggacggcacgcccttctggaacatgctcaccgtcacccccatccgcgacgacaacggcaaggtcatcaagttcatcgggatgcaagtcgaggtgagcaagtacacggaggggctcagcgaaaagcgcatgcggccaaacgagatgccagtgtccctcatccactacgacgaccggcagaaggagacggcaatgtcatcgatcacggaggtggtgcagacggtgaagcacccgcgcgctcgctccgagggtgaacaggagcccgtggagcctgcaccgcccgtcatggcgtcgccgttggtggcccctggcacgccgtcgggcggtgccagcctcaagtccccgctctgggacgtgaagaaggaggactcacggctgagccggaagtcgagccgccgctcttccctcatgggatggggaagaggagctcgataggaagcaaggatgcccttccagcggaggtggaggccccggcgccggcgccggcgccaccggagtcaacgacggagaagcagcgcaagaacagctgggagcaagaggggagggagagggacatcaggcaggggatcgatctagccacgacactagagcgtatcgagaagaacttcgtcatcacggatcccaggctccccgacaaccccatcatcttcgcgtcggatagcttcttggagctgacggagtacacgcgggaagagatcctcgggaggaattgcagatttcttcaagggccagagaccgacatgtccacagttgataagatccgggaagctatccgggaacagaaagaaatcactgtccagctaatcaactacaccaagagcgggaagaagttttggaacttgttccacctacagccaatgcgagaccagaaaggagagcttcaatacttcattggagttcaattggatggaagcgaccatgttgaaccccttaggaatcgtctctctgagaacactgaactacaaagtgctaaattggtcaaagctacggcagagaatgtggatgaagcagtcagagagcttcctgatcccaacctgagaccagaggatctatgggacatttactcacgatatgtttccccaaagcctcataaacgttacaactcttcttggattgcgatggaaaagattataaaatctggtgtgaagattggcttgaagcacttcaagcctataaaacctttgggttatggtgacactggcagtgtacatttggtggagttgcaaggaagcggtgaattatttgcaatgaaggcaatggacaaatcagtgatgttgaaccgcaacaaggttcatcgagcttgtatggaaagagaaatatactcactattggatcatccttttctcccaacattatatacttcattccagacaccaacacatgtttgtctcataacagacttttgtcctggaggagaattatttgcactactcgatatgcaaccaatgaaacttttcagagaagaatctgcaaggttttatgctgcagaggttgtaattggcctggagtatctccattgccttggaataatataccgtgacctaaagccagaaaacattttgctccaagaggatggccacatcgttctgactgattttgacctctcttttttgacttcctcaaaacctcatgtgataaagcattctacatcaaggcgaagaagatctaaggagtatctgcccccaagttttgtttcagatcctgccactccatcaaattcttttgttggaactgaagagtacatagctccagaggtcatcactggtgtaccacatacaagtgccattgattggtgggctcttggaattctcttgtatgaaatgttgtatggacgtacaccttttcgaggaaagaacaggaaaaggacatttcataatatcctgcacaaagaccttacatttccaagtagcattccggttagtcctgcggctaagcaattaatccatggattgctacagagagatccctcttctcgacttggttcaagtgctgctgcaaacgatatcaagcaacatcccttttttgaagatatacactggccactcatccgttgcatggagcccccagagcttgatgttccactgaaactaactcggaaggaacctgaacaaaaagtgaagcctgaggaggatatatactcatgttcagattattgagacattttaagggcaggttgtacgatcccccctcccgaccccgtgcatgactttcagcctgaagagattttatattaccgagtggaaataacgttgctgagcatgtacatagtaataaaagaggtttataggcatgcaagatttccagcctgaattgcacaagaggtcgttgtaagtcattcttttggttaggttaagtgaataatccatcaacaggataaagttcttgtaaatgtacactttctttggcatatataataaaaatcttactaatttccgttggtcaaa

SEQ ID NO: 3281 - DNA, 2311 bp, Zea Mays
ccttggcagaatcgcagcgcagcgcacacgcacggacggccccgagggtttagagcccaacttctctcttcacatcgccgcgaagccagctccccgatgcgatctggccgagggaagatggcgactccgccgccgccaatccgccccgccgccgcgctcctcctcctcgtcctcgctggcgtcctcgcctccgccgcgagcgccgatctcgtcatctccaaggcagatcggagggttgatctgacctcgcatatcgttcgcgtcctcgcttccctcaaggctgaaaatgttggaccagaccctgtctctcaagttttactgccttttcccaatattcaagccaagaacttggcagctattagagcattcggcagtgaagggaaagtgaagggtcaaagtactgttctgccaattgaagttgttcaaccttctggagctcccccggagctgacattcttttcagcattgttgcccaaacctttggaaaaaggaaagactctgtacttggatgttctgactgtgttcacacactctcttcaaccattcccagaagaaatcactcaagccgaagcacaacttgttgtctatcaggatagtgctcactatctgtcaccttaccctgttaaggctcagacacttgctatcagattgcctggtggaagggttgaatcatacacaaggcatccaaacgcaaaacttgtggattcagaactgaaatatggaccatttcatgaccttcccccgttctcctacttacctgtgattgtgcattttgagaacaacaatccttttgcagttgcaaaggaagttataagggagattgagatatctcactggggaaatgtacagattacggaacactacaacattgctcatggtggtgccagactcaagggtgaattttccaggattgattatcaatctagaccttacgtaaggggtgtttcatcttttagacatcttattgcaaaactgcctccaagggcacactctatttattaccgagatgagattggtaatatttccacatcacatttgtggagtgattctatgaagacccaactggaaatagaaccaaggtttccattgtttggtgggtggcaaacaaccttcactgttggttatggtttaccacttgaagactttgttttctattctgatggaaagagatttctcaatatcacatttggttctccattggaggaaattctcattgaaaagcttatcgtaaagatttgtggccattgtgtttggtattcattataaactgccatctttatttgtgtcgtgatcataggaatgtggatagcaagaataatgacagggttgttctacctgaagggtcaaaggatatcgaagtttcagctccctttccaacacagcagcagcaagaggttaagtattcacaccttgacattgtcggaagaccagttgttgtcttggagaaacctgatgttattccagagcataatttgtatttccaggtttactacagattcaacaacatatccttgctcagagagccgttgatgctgattactggtttcttcctcctgtttgtggcctgtattgtttacatgcgtactgatatgtcaatatccaagagctctccttcctacttggccaagctgcaatgggatgaggtgcaagcaactgttcagaaaatccagggtatctttgagcaatgcttagcagttcatgataaactggaggcctcattgcgggatttgtctaggacaggagacattcagtcttgcaaggcagctcgtaaagctgctgacacgcagtttaaggagctatcgaaagatctgaagccactgttggcgactctacagtcatctccccagtcttatcagatattgccaaaggtagaggacttgatcgtaaaggagagagagatgcaggagaagctcatgacaaggcattccaccgttgtcgacagctttgagaagaagctgcgcgggcaagatgtagagaacaggattgctttgcagcagcagaaaattgctgccctgaggcaggaggttgaatctcttttagagtacattagtgagatttgagcaaatgagtgctgctgtggcgtgatacatctttagcgattagactgcctttgtttggtttagggtttaccccaatattgaaatctactactctgagattgtgtcggtaaccatctagtttcccagttgagagacctggaagttgcaatgaccttgtaacatgataatcagtgtaattctggagctgactaaatttttgcatttaatatcaatatcacaggaaccgtcatcttttggactgaatgtgtgaa

SEQ ID NO: 3282 - DNA, 746 bp, Zea Mays
cagaccacgcaccagggacctcaccgagcacaggtagggtttcggccaccagccatggccgactccgcgccgtccatcccgggcgtcatcgcctccctccaggcctactccacggccctctccgcctttaccgccgcatggcgtgccgtcgagacccacgcctccaccctcgactccgccctcgccgcccgcctagccggcttctcggagctcgagctgatctgctcggcgatggacggagccggcctccgcgcgtacctcaccgagcacagggacgagctcaaggatcccacgcgcgccctcgacgcagccctccaagttgcgcccgacccggggcttctggtcctctccgcggcagcgagtttctgccgcacgctgccggaggtggccaagagcgacggtagcgtcaaggcgtcctgccgcctgctcatcgccttgctcgaccggctgcgcgcgattggtgtcaagccgtcgcctgaggcgcgcgaggaggccagagctgttgcgacggactggaagcgaggcaagcggatcgggacggagacgatgtttaagcaggagacgttcgccttcttgcatctcgtgggagtgtttgggctcgtggaggatgtgggcggtaccagcgaggtgcttgatcttgtcgtgtcgatctcaggtcgtgagcgcgccgttgatgcgttcgtcgtcctgggcctggacctcgaccagcatatgccaaaattgcagacgaagttcatatgtttttt

SEQ ID NO: 3283 - DNA, 3581 bp, Zea Mays
ttaacaggtgcactgttacgaaaaacgaaaataatctacgcacttagcgagattcttgcttattttcattcataagcggcacgctctaaatggaagcagcaccgctagctagcctacacacatacggcctaccgagcacaagtagagcgctcacgtctgatctgataaataaaaagagagtgaagaagcgctcagctagctcacacgccatcattgctgcgctgcctcccaacgttcgggcaagaacgaaggcgtctttcgcttccattgctgctgcgagggagaagaagccagaacaagaacgtgagacacacatacatcgtgtgaggtggcgtgctgacggcgagggatgcgggcgggggcatacactatccaccagtcgctcaccgccgaggcggccgccgtgctcaagctcgcgctcgcgctcgcgcgccggcgcggccatgcgcaggtcacgccactgcacgtcgcgttcgcgctgctgaccggccccgccgcgtgcgcgcagcctctcgcggccttctcctcacccgcgtctccggcggtgccgtacggtctactcaaacgtgcctgcttgcggtcgcacccggcgcccggtccggcggcgtgtcacggcgcgccccagcacccactgcagtgccgcgcgcttgagctgtgcttcaatgtagcgctcaaccgcctgcccgcttccggcccgcagtcggcgccctcctcgacgtcgccattcacgtcgccgcttatccagcccagccccacactctccaacgcgctcgtcgccgccctcaagcgcgcgcaggccaaccagcgccgcgggtgcgttgagctccagcagccgccgccaccagcaaatgcgccgccagcacagcagcaggcgctcctcgccatcaaggtggagctggagcagctggtcatctccatcctcgaagaccccagcgtgagccgcgtcatgcgggaagccggcttctccagcgccaccgtcaagagcaacctcgaggaggagagcgcgctcatgccgccgcgttcctcgtcgtccccaccgctgccgctgccgccgccgcccatccctccccacttcttcatcgaccccagcattccctccagcggcaaagctggtgaccgcttcgggctctggccggcgcacttcttgtccgcggcgccgggcccgggcgcatgcaacgacgacgtccgcgcggtcctggaggtgatggtccggaagcaggagcggcgaagcaaccccgttgtggttggcgactcggtgtccatggcggaggccgtggccgacgagctgctccggcgcctcgagcgcggcgacgtcccagaagagctcgccggcgcacacctcctcaaactgcagctctcctacgtgcacatccgcctcatgagccgcggcgacgtgaacgcccgggcctccgagctccgccgtagcgtggacgccgtccagctccagcgcggcggcgggctggtggtctacgtgggcgacctgcggtgggcgctcgacgaggaagcccacgacaaccacgcggtctcgtcgtacagccccgtggagcacatggtcgccgagctcggccgcctcctcgacgacctccgagcttcctgcggccgcgcctggctcgtggccactgccagctaccagacgtacatgaggtggcagcagcggcgccggcggccgctggagtcagcatggacgctgcaggccgtggtggtccccaccggcagcggcaccggtctgtccctcaacagcctcggttcctcatcgtcttgttcctccctccaaagaatccttttccagaggtcggggcggcgacggcgtttgcaggcagagatgagcaggaggatgagatgcagctggcgctctgcaccgagtgcaccaagaactacgagagggaggcgacgctcgtgaaggcagaggctgatgcggagggcccacgtgccagcctcccgggctggctggtgctggacagaccaccggcagaccaaacaccacacgagaagtatctgaccgtgttgaagaggaaatggagccggctgtgcaggaagcttcacctctgctctgatccaggctcccctcagtgtccatggtggtctggttcttgctcgcaaccggccagcaagggtaagccaagcgagccgaggttcttgggcttggatggcttgatggggcaacacacgagcaggaggtccccgccgtcaccatcgaggagtcctcgttgggctccgagtccaccgatggggtcgggatgccagggcgtgggaactacgcttgctctcgccagccacctgctctcggactcggcgacctccgacagccgcgccccgggaagcggtgatggatccgcggcggcgcgcgagctggagcagaggctgcgcaggaacatcccgtggcaaccccgagccatcgtcgcggagattgccaatgcggtggtcgctagccgagagagcgacgacggggcgacgggcgtgtggctgtacgtgaaggggagcgaccacgtcgccacgcggcgcgctgtcacggtgatcgcggagacgcgctgcggctcggctgaccgcgtgatctgcgcggacccgagcaagttcagctccgcagagaggttgtgctcagatgttgtctccagggcgtccgcgatgggtggcaagatggtggtggtggtcgtcgacgatgtcgagaacgcgtcacgcgacgtcgccgactgcctagtcgccgcatcgaagagcggttctctgaaggatcgtcagtccggacaagcactggatctctccggctgcatcgtgatcctgctagcatcgaagtggaccggcggctccagcgaccagatcagcctgcgtctgtgggcggagaacgaggcgtcgtccgccgctctcaagaggaagacggagtcaccgctgcgcgagagcaagcgagcacggcacgacgccgggctgggcggccttgatctcaacctctgcgccgaggatgacccagcagacgaagacgacgaagcccttcccagcgacataaccgacgaaggcgactctagcgacacgagtgagcacggacaaccccacggcctcctcgaggccctcgcggcccgcgtggtcaccctcgacaatgacgacggcgacggcgacgccacagcctccatccgcgcgaggcttgccagggccatcggccaaggatggacacgtgtggaggagacggcggtgcaaatgcttgcagcggcgtccggacagttcctcgaggacgagtttgagagttggacgtcggaggtgcttgaaccggcagtggcgctggcaacggtcaaaaatggcgggaaagggaaggtgatagtacttggattggggccctgtggcgagagccgggagacaccagggtttatgggctctgtccttccaagtagggtccaggtggactgagctgtgtactgttttttagttctcatttttttagaggggaagtggtttgtatgtatggtatgtaaagcgtgggattggggcctggaaatgaaagggatcaaatgtactattattatatataagtagttttgcaggattaattatcactacggactaatttggaaacttaaatcctctggagattagagagc

SEQ ID NO: 3284 - DNA, 2009 bp, Zea Mays
acatatgcgatgtgaagaatttttttccatggagcccaccccgcaaccctcgaacaccgccgcccaccatgcccagctcccgtagcgccgcacacccccagaaaccggcagcgacagccgggagtacatcccaccctcccctccaacgccgccgcccgccatccccctgccctccgtagttccacgatgttggcttaggccgttgcctagggctccattcccctcccacagctctgccgccgcctcctgtcctctgaaaatggctgacctctaaaatctaaacccttcaaagcttctgtagattcacttcacatcgtccatggccgccgctgctcgcgtggcaatctcacggcccccacctctccctctcccttcctcctcgagcagcagggcgtgtaacctggttgctgggaggagcagcgaccccagcgccaccgctcgcgcggccctcccggctcccgcagcccccacctctccctttcccttcctcctccaacagcaggatgcgaaacctggtggctgggaggagcagagaccccggcgttagggcttctacctccaccgctggcgcgtataagaccaccgcgtcgacaacctcaggcgccaccgtgtttacggccccaaccgccacgacgaggggacgccggcaaggttgatgtcctataaatacatatattacaagcatgatccaaacctgtttggtgaatgggattttgaggtcattgttctgtcttctgaatgttgaagctgttgaaaaggccacttgtagtatagaacctatacctgcaaagcaacgatgctcctatacctgcaaagcaacgatgcaagagcaaaactagaatttcctagagaaatgtttatctattaacgatgcttacattttttgtgttcaatcttagagtagcatgatctgtaatgctcttatgtactgtcctgataaattttgtggcgaatattggccttatcaagttcaattccactttttagttgtgcttctgagatatcaccaggctgaaactatctcacacacccattattctcttgactacctcacccaggttgcaagtgttacttttgatctattgttccttccgatgcttagttcttaactgtttgttttaactttctttgttgcttcttgcttcagttgtccatgatgggataactaaaaattgaactaattatttgcatgaagcctcataagcaagattgcaggacaacagataccttcttgtcaacgttttggtttaatataagtttctcttccaatcctgttattgctgttaagttggccacacagcaggagtacttcctatctgtgcatttctcttacatgagtttcaaaactacatgagagataggtcattgttacgatgcaaattgtttcccatatggctctttgttttcattttctatttttctcaaaaacgattcgaaaactaatatttgccttcttttttcctctgcttctccctttccctttcttaaccgtttattttcatgctgctgctggaatccatctaagagatgtctcctttttagttcctcattctttgttgcatgttatattagatgatcaggtacgtagtctgccttctcagaaacattgttgtttgtccactttcctttgtgcttccaacaacacattgcactacattatctcattcatgcacttttgcgtaattagacataagtgctgctttttagaacatacacaagcatatgcctctcaactataaccacttaactatgggtacacatcctgatggatggtctaaattttaagaataagagaaacttacatttatgtcgatgtaaacaaacttctatattgggaagttgaaaaggacattggtaaatcatctgcaatactgttttcagcttaattttactttcttattatatggttgataaaacacaactgatgacgaccatactttgctattttttggatagtgagtaacacacttacaaaatactacatgtttgcaataggtggtacatgctaa

SEQ ID NO: 3285 - DNA, 1906 bp, Zea Mays
atttatgcctcacaccgacctcggcgcaccacaacgcaccagtgatcagtgcgtcgctttcgctcgctttggcaactcccccctgctcagtgctggcaattgctgcctgcgctcgtagtcactctcacagtgcccccccgccctgctgccagagaaccagaaggaaaggaggatcccgagcagtcaattgccctgatcctcccccccaccctggggtagtaagagaaagagcgaggctgaattgctgtgaggcaggcgagggtggttgtgtgtgtgtgtgttgctgcgctgcgcaggctcagtgcgggcgatggggcgatcgccgtgctgcgacaaggaggggctcaagaagggcccgtggacgccggaggaggaccagaagctgctcgcctacattgagcagcacggccacggctgctggcgctcgctgcccgccaaagccgggctgcagcggtgcggcaagagctgccgcctccggtggacgaactacctccggccggacatcaagcggggcaagttcagcctgcaggaggagcagaccatcatccagctccacgctctgctcggcaacaggtggtcggcgatcgcgacgcacctcccgaaacgcaccgacaacgagatcaagaactactggaacacgcacctcaagaagcggctggccaagatgggcatcgacccggtcacgcacaagccgcgctccgacgcgctggggacgggcggcgggggaggcgccgcgggcgcgcagcacgccaaggccgcggcgcacctcagccacacggcgcagtgggagagcgccaggctcgaggccgaggcgcgcctggcgcgcgaggccaggctgcgcgcgctcgcggcctccgcctcggcgccgccgcagatgcccgccgccgccgcgcaccggctcgactcgcccacgtccacgttgagcttctccgagagcgccgcgctcgcctcggtcctgcaggaggcgcacggcgccgcggcggcggcggccgcggccgcgcgcgccgccatgcagcccatgcaggcgtacgaggaggcgtgcaaggagcacgagcagcagcagtggggcgatcacgtcgtcgatgtcgccgacgcaggcttcgccgcggcggggttcacgggcctgcttctcgacggctccttgagccagcatgatctgaggccggcgccggcgacgacgacgagggacgacgaggcggacgccggcctgcacgagacggaggaggagaagagctactgggacagcataatgaacctggtgaactcgtcgtcgttgccgacgacatccgtggcagtgcccgctcccgagccagcgtacccgtcctcggcgtcgctgcacacgtcggtggctatgcccgcgctcgtagcgtacccgtcatcggcgccgctgcagacaccggtggcgatgcccacggtcgaggcgtactcgtcatcgacgtcgctgcagcagacgtcggtcatcgcgatgcccgcgcccgaggcgtactctccggcgatggagttctgctgactcgtgagccctggacacatgcatgtccgccggcatgtggccgttcaaatgacacagtaaatagctagctatttcggaacaataagatcgaactactaatgttgatggttaaatcgcgttctcgtgttaaatctgacagcaccctgattaaacatgcgaggaagaaaatggttgtaccgaatttagagtctactactcgttcatcagttgccaaagcttcttgtagactgaagaacagtgatcagagcgtctcgtcttcgctctgtatgtaattcgataaccattttcatcagtagtatactgcagcagtgaggtggagctaatcgaaatgggaaaaaaatctttttttttacgttcctcgtctgatcccatataattaacttaggtgccgtttag

SEQ ID NO: 3286 - DNA, 314 bp, Zea Mays
attcgtttttgattggcgtcgcagcaaccacctgtcaagtgtcaacactccagtccactacaatcatcgctgtaggagatggaggcggcggcggcggcggtgaggtatgggatagtcggggtggggatgatgggccgggagcacctccacaacctcgcccacctcgccacagaggtcgagcgggagcagtccgtccgggtgcgggtcaccggcctcgccgacccccaccaggagtcactccgccttggcctccagctcgccgctgagctcggcctcccgcctccccagaatcggcacttcgcggttatgcccct

SEQ ID NO: 3287 - DNA, 2009 bp, Zea Mays
agtcgccacctccgtttcggcatttttttcccactcccacccactcccccgtcttcctcctcccgacacacctctttaactcgcgtcggcttccaaaaaatgctccagctataatttaatccagacgaggaatcgcctcgcccgggatctctccccccccgcgaatccccaggcccgctcgccgacaggaccccgcgatcggctccagcgtgagcttgacttgcgttgcggcggggacgtcgccgacgctcggcacggggctcgtcggttcggcggtcgctttaggctcgggccccgtcgaggccagcggtgccggggcaatgcggtcagttcgtggagctgtttgaggcgcttggctgggatctgagggtgccagcgtgccagaatggagcacgtagtcgggggcaagttcaagctcgggaagaagatcgggagtggatcatttggggaactttacctcgccgtgaacgtgcagaatggcgaggaggtggctgtcaaactggaatcagtcacatcacgacatccacagcttcactatgaatcaaaactatacatgcttttgcagggtggaactgggattccacatcttaagtggttcggggtggaggggcagtacaatgtcatggtgattgatctgcttggtccaagtctggaggacttatttaactactgcagcagaaagttctcccttaaaacagtactaatgcttgctgatcagatgatcagtagagtagaatacatgcacacaagggggtttctacatcgtgacatcaagcctgataattttctcatgggtttaggacgtaaagcaaaccaggtatttgtcatcgactatggccttgcgaagaagtatcgagatctccaaactcataagcacataccatacagggaaaacaaaaatctcacaggaacagcacgatatgccagtgtaaatacccatcttggagttgagcaaagcagaagagatgatctggaatctcttggttatgtgctcatgtatttcttaagaggaagtctcccttggcaaggcctgaaagctggcacaaagaagcagaagtatgataggatcagtgaaaagaaaatgctgacgccagttgaggtcctctgtaaatcatatccatcagagtttactgcatactttcattactgtagatcactacgattcgaagataaaccagattactcctatttgaagagactcttccgtgacttatttatccgcgaggggtaccaactagattatgtatttgactggaccattatgaaatatcctcagtttagagataaaagcaaaattcagtctagcggcaagatgagtgggttggcaggcccttctgcagaaaggactgatagaactgcagctgaagctttgtttagaaggactggatctggttctggtcacaatcgagagcacaccaagcacagaagtcttctggagtcactgatgccatccaaggctgttgattcggataaagcaaggccacaatcatcgtcgcgcaacgggagcacatcaagaagagctgtcatttcatcaagcaaaccaagctcttctggggatctaagcgacccgaaccgcttggggggccgcctggcccctagtagcagcagccgcccaccgactgcccaaagggagatcagatcctcgtctttgtcaaaaatcggaaggtcttcacatgacgacgctatcaggaacctcgagctgctctcacttggtgctgacaagagaaaataagggaaccgacgaaatgggctagggtctggactctggatgatgacgatgcagggctgagcaggcagctccattatctgtatgttgaaaatattcttttcggaataaaagagattatataacttatgggattgtttcccggagctgtgctgctccaatccaataacccgcaagagttacgtagcaaagctaaattatgctgtcctagtagatcactgtatatctgaggacaggcggtgagacaacgaaggggagttgatagcaagatacaccattgcag

SEQ ID NO: 3288 - DNA, 866 bp, Zea Mays
ctggaacctgttgattacaggtgtgcgacgagcttgaggacatgatggaagaaggtggcatactagtagattaccacggatgtgatttctttccagaacgttggtttgacctcgtagttgtgctccagactgacaactcaattctgcatgatcgcctgacgggtaggtaggtaatccaagttgaattcgacgtaagtgcattctagtcacctcatcctgcatccttatatttgggactaaacttgtacagaggttacatgggttccaaactcgccaacaacatagagtgcgaaatcttccaagtgctcctcgaggaggcgagggagagctacagagaggacatcgtgatgccattgcgaagtgacaacgtggaggatattagtaggaacgtaggtgcactgacagactgggtaaacaattggagacctagttagacctgtcaaaagaaatgttgccttatgtgttgtatttggatatgtattgggtggaccagctgccatgtttgtaatgtacggggtgttttggttaaagaaacgaagtcgttcatcctcgtcttattcttttcttctaatggagtcaattacttaaatcattaccacaacattacttaagttaatatgtgctacatgcacaaggaatgcgatgatgctataaaaattcatgaggcagtgtggtctgcggaaattttgtttttaaattttttttatgatcggtcgggaaaccgatcgaaattcaacggatttttcaaccagaatgcattttcaaattaaaaaaacaaatttatattttttggtcgaaaatgtattatcgtcgaaattcattgtttttactaaaaaactatgattaagtttggaaaaaaaatcaaa

SEQ ID NO: 3289 - DNA, 1030 bp, Zea Mays
acggcatcaggcctagcgtgtccctgagtcttccatgttagaaagaaagaggagctccttccggcacctgagacctagaaccctcttccccctcgatggccgtagggagcggcggcggctcgcggcgcgcgcgtccgaacgtgctagtgacggggacgccggggacggggaagacgacaacgtgctcgctccttgccgacgccgcaggcctccgccacgtcaacgacggctgggacgccgacctcgagtgccatgtcatcaacgaggacctggtgtgcgacgagcttgaggacatgatggaagaaggtggcatactagtagattaccacggatgtgatttctttccagaacgttggtttgacctcgtagttgtgctccagactgacaactcaattctgcatgatcgcctgacggaggttacatgggttccaaactcgccaacaacatagagtgcgaaatcttccaagtgctcctcgaggaggcgagggagagctacagagaggacatcgtgatgccattgcgaagtgacaacgtggaggatattagtaggaacgtaggtgcactgacagactgggtaaacaattggagacctagttagacctgtcaaaagaaatgttgccttatgtgttgtatttggatatgtattgggtggaccagctgccatgtttgtaatgtacggggtgttttggttaaagaaacgaagtcgttcatcctcgtcttattcttttcttctaatggagtcaattacttaaatcattaccacaacattacttaagttaatatgtgctacatgcacaaggaatgcgatgatgctataaaaattcatgaggcagtgtggtctgcggaaattttgtttttaaattttttttatgatcggtcgggaaaccgatcgaaattcaacggatttttcaaccagaatgcattttcaaattaaaaaaacaaatttatattttttggtcgaaaatgtattatcgtcgaaattcattgtttttactaaaaaactatgattaagtttggaaaaaaaatcaaa

SEQ ID NO: 3290 - DNA, 1238 bp, Zea Mays
acctaaaccttgctaccatataaaccttttcactgctccagccgccgccgccgccgtttcttcgtcttcctcgcagcgccgccgctccatcttccgctgatccgctcgctcccgcctctcgccacgcaggcggcggcgctcaggcccgtgatttcagcgacggcgtcagcggcttcccctcccgtctcttcccagtcgcctcgcgccctcgcctccggtcctccgcacaccggccggtgaccctgcatccaccatgactggtgtcagcactggattgttgacgggcttgaggagggtcatggaacagcaaaggatttcaaccgctttctgcagacaatcacgagtttcgagctctactgtttctttctctgacctcgatgagaagggtgacatggaatatgatgataactctccaaattcaaagagggagttacgaccccaaggtgtagatcccaataagggctgggaattccgtggtgtgcacagggccatcatctgtggcaaagttggacaagtccctgtgcaaaaaattttaaggaatgggcatacagtaaccgtttttactgttggaactggtggcatgtttgaccagagggtaattgggcctaaggatttgccaaagccagctcagtggcaccgcatagctgtccataatgactacttaagtgcttatgctgttcagaagctggtgaagaattctgctgtctatgttgagggtgatattgaaaccagggtctacaatgacagtgttaatgatcaagtcaaaaacatacctgagatatgtgttcgacgtgatggtatgctgattcgcacaagcttctttcctatcatgtttattattgagactgtattccacataagtagttttcatatgtaactcaacagcaatgacatttttttacgtgataacatagggtgtccttgtatggtaggttacatctaccttttattttcatgtctccgttgaagaaagcctaatgtttggataactattctatgtgcaggcaagattcaattggttaaatctggggacagtgctgctaacatatcattagatgaactaagagaaggactgttctagctatagtgaaagatgtcaggagtatgcttctggcttgagaatatttgagccctcaatgaaacatctctctgtgtaatttactgctactgtcttttccatgcgatgcgcatctgtcattaactcattatctaggcctccttgatcctcatgttggctt

SEQ ID NO: 3291 - DNA, 1272 bp, Zea Mays
atgctccctgctcgctcctagtccctcccgggctcccggcagcggcggcgcaccttatggcgacttgagctctctgggcgacgtcctcgggacgggcagactgtaattgaaatgaaaaggataggtagatctagctaattcgacaacagagcaaggtgcgctcctatggaagtggaagaagcaggaggcgaagtggagaacgccggcaaggacgaggcggaggcggagtaccattcgcgcgatttcgaatgggaggacctcaaggaagaggtggaatctggacctgtcttctcctaccacctctccccctttctcgaccccgccgccagtaccacctcgccgccgcagccctcgtcggaggcctggagaagcttccaccgtcgccatgcgtccggaaaattctttttacaggaaaggagatatttgcttaaggaatttcctgaactttgtagcagcaaagatcatgccaaggttttagaagtggggtgtgggaatggaagcactgctgtttccattctacgatccaagtcaccatggaattagagaagagcacccagtcttccttggagagaaccaatgttgtgctggtggcatggattttattaccatgatattcacactgtcagccatacccttcgacataatgccaactaccatagaacaatgtgtttctgttctgaaaccaggcggccttcttctttttagggattacggtctttatgacatgacaatgcttcggtttttacctcatcaaagagtagggtttcgggaatatatgcgatcagatggtaccttttcatacttcttctcattggatactgtgagagaactctttcgtgctgctgggctagtagagttggagctggaatattgctgtgtcaagtccgtgaaccgaaagaatgggaagacgatgcggcgggtatgggtccatggcaaattcaaaaaaccacctaggtgacatcagttagggcttgttcgtgttcagctcaatccatatgaattggatagaattgtgtggatttaaatccatagcaagtcaaaatctctactaattttttccaatctcatcccaatccatatggtgtagaaataaccaaagggcttagctgttagttttgctcggccactttgttgttgcaacaaagcgttgtaacagttttgtagccacaaacttaaatggcattgaaattatgccctcccccacccccaatagccattctccaaccattttccttatatttcaccctttatcagtactttcgattatatttt

SEQ ID NO: 3292 - DNA, 1274 bp, Zea Mays
ggcaaatctgtctccgtgatttccttgctaaataaaggaaaggaaagcagctaaacgaatgccgacttgcaaagccaccagcaagagactcctctcttatcccgtcgtcctcttctctcgcctccaataattcgtaacccttctccttccaggccgggctcctgctggccggagttcccatctccctctttccttctcggttactatccgtgaagtctgcttgcgccgtgtgtgcgtgtgagaccggacgcagcttaacgatggggcgtggcaagatagtgatccgccggatcgacaactccacgagccggcaggtgacgttctccaagcggcggaacgggatcttcaagaaggcaagggagctcgccatcctctgcgacgcagaggtcgggttggtcatcttctccagcaccggtcgtctctatgaatacgccagcacaagcataaagtcagtgattgatcgatatggtcgagcaaaggaggaggagcatgtagcagaccccaacacagagcttaagttctggcaaagggaggcagcaagcttgagacaacaactgcacaacttgcaagaaaatcatcggcagttgatgggacaagatctttctggactaggtgtcaagggacttcaaaatctagaaaatcagctagagatgagcatttgttgcatccggacaaaaaaggaccaactcttggttgacgaaattcacgaactgaatcgaaagggaagtctcatccaacaagacaacatgggattacacagaaaggtcaacctaattcgtcaagaaaatgctgaattatataagaagctctatgagaaagaagcagaaggtgaagtcaaccgagattcaacaactccgtacaactttgtagttgcagagggtgccaacgttcctatccatcttgagcttaatattccactgcaagaaaatggtgttgagcaacctgtggctcctaaattagggttgcaattaaatcaatgaagacatgcaggacattgcctttgttctcattgtccttgtagtctgcaactcaaagcagcctaaaatgattggttgtaacaggcctaaaaacatagcaagacaaataaagtatgcatgccagagacagtggcaatggtagtgcaaatctatctcaaataacttgtgttatattgaataatccagcaaatggtttgttttttacacgttatgcaagtttgtttgaccaaaatggtatgtaacatgtacaaatttccaagtgaacttattgaaaaaattctataaagtgtgtatctg

SEQ ID NO: 3293 - DNA, 1559 bp, Zea Mays
ggagcactgcaggcttcaattcaaggcagcttggggaacactgggtctcaaggtcgtcgtcgcttgacggagtattattccgaggtgcgaaataatggcttctggcctccaatgccccgacaaacacacttccatgaacgtggaggccgtcctccacatgaagtcaggcctcggcgagagcagctacgcgcagaactcttcgcatcagaagaaaagcacggagacgttgagaagcctagtgatggactcggcaacgctggtgtacgaggcactcaggccggagagcttcacggtagccgatctcgggtgcgcctcggggaccaacgcgctcggcgtggtggaggccatcgtcaggggcgtcggcgaggcctgccgcggccgcgggccgtcgtcgtcgtcgccgccgcccgagttctcggtgctcctgaacgacctcgcctcgaacgacttcaacaccgtcttcgcccgcgcgccggaggtcgccggcaggctcaaggccgacgctggggccgtcgtgttcctgtccggcgtccccgggtccttctacgggaggctgttcctttgccggagcgtgcacttggtttgctccttcaatagcctgcactggctgtctcaggttcctgcaggccttcgtgacgagaccaacaagccacttaataaaggcaagatgttcatatcaagcacgagctctcccgccgtgccggcggcctacctgcggcagttccagaaggacttcaacctgttcctccggtcgcgcggcgctgaggtcgtctccggcggccgcatggttctgtcaatgctctgccgggaaaccgaggactacaccgacgtgaagatgaccctactatgggatcttctatcagagtcacttgccgcgctggtatcccagggactgctcgagcaggatgtggtggacgcctacgacgccccgttctacgcgccgagcgcacgggagatcgaggaggaggtgagcaaggagggctccttcagcctggactacgtgcggacgttcgaaggcagcctgagcagcggcgcaggcgctgagacagacggcaggaaggtgtccatggcgatcagggccatccaggagtccatgctcacccaccatttcggggccgccatcattgacgcgctattccacaagtacacggagctagtcaccgaatccatgcacaagggagaggtcaagagcgtccagatcggggccgtcctgggactgctcgagcaggatgtggtggacgcctacgacgccccgttctacgcgccgagcgcacgggagatcgaggaggaggtgagcaaggaaggctccttcagcctcgactacgtgcggacgttcgaaggcagcatgagcagcggcgcaggcgttgagacagacggcaggaaggtgtccatggcgatcagggccatccatgagtccatgctcacccaccatttcggggccgccatcattgacgcactattccacatgtacacggagctagtcaccgaatccatgcacaagggagaggtcaagagcgtccagatcggggccgtcctggtcaggatatgatgtaagcgct

SEQ ID NO: 3294 - DNA, 2810 bp, Zea Mays
ctcaattttccccttcccttggaaaaccacgcacccaccgagcccggccgcccccaaccactccgaccaaaccaaaacccagacccactctcccccgaaacccagggcctcgtgtcgtttgatgcgattccggcggcgatcgcgagcgcctccaccaccacccgctcccccgtcctagcgcgcgtttgggcgatctcccctctcgcggcgggcatggctggcggcggcggcggggcacgcggctccgacagggcgggggcggcgcgctctcccacaaccaccacggcgatacagtcgaccatccaatcgatcaaggaggtcgtcgtcggccactccgacgccgacatcttggacaccctccgcgaatccaacatggaccccaacgagacggcgcagaagctgctcaaccaagatccatttcatgaagtaaaaagaaaaagggacaagaagaaggagagtgctggccagaagagctttgctgatagcactgcacaagttgagcaaaactcacaatggatgaagccacatacacaaaagatggaaaatgatcaaagaactcccaagcagggtcagatgtcaggccctactcgtgaatttcgggttgtgagggacaacagatttcaacatggtgtggtggagaacagaccagaattaggacacaaaggttcagcaaatgtacaaatgtctgataggaggtttgatgtttctttgttccgtgcctatggtacacgaacaaatcctatgaaattgcagggtacatttgttgagtctggtcgaaaccgctcacctgctacaacctcaggtgaccagatcacacatcaaaatgctatgcagaactccaactctgacacaacccaagggaagagggatgctcaaggtactacagagaagcatgtgaagccatatttgaagaaccctcagaatgagcagcactttccaggttctgacccagctcatgggtcagccaatgttagaattgccggtggaactgttggacctgctcaacgtcatgttggagttgttaattctactaggcaatttgctgcccgttcgggttctcagatgcatgcaccaagtggttcttatgcaaatattcagagggggagttttacctcagtaggggcatctgggcgttactcagctttcatgtctagaaacattcaacaaaaccagagacctgatacaatgtttcgtggaaggcccactgttagatcttttgttgcacaaaacaccaacagatatcaccagggttctactagcaaccaaaaagcagtacaccctattaaggagtggaagccaaaatcgacaaagaagtcaccgaccattgatgcagataacagtatagctgatgctacatctccttcagctagcaactgtgaaagtgccaacacactgaatgtaaacgaattgcctgaaaaaatttcacaaactaacttgcatgaggtggagcatgttattattccggaacatcttcgtgtgccagaatatgagcagaccaagttaaggtttggcagtttcacatctggtttggattcggaacaagtatctgcctcgaccccacaagacactgagcaaccagaacatgtacaagagtcagttcaacaggcaagtgaatatgatagtttggatgctggacctgatgacatggatgagcaagctagatcttcacaacacctgtccacatcaacggctgagatttccttgcccccatctgaggatagtgatcgaatgagtggtcaagtagagaatgatgatggcctgggcttagttcagagcgacactccaattggagcagcagacggtgacaatacccaaatcacctcgactttgactgctttttcggcttatagtcatgaagatcctaatatgcatacaaacaatgaggcccagttatacggactggtggagcctaatgtacatccgcaagtattagcttcctcttctcaggggtacccttcagaaaacccggaagcagataatgctgtgcaagtcttcaggatgccagaatctaatgttcactcacaagttctcccttccacatctgaggctttaaatccacagattgtgagcaacagccctgtttcgatctcgtcacagcagcagcagcatatctcccagcaacaagccgcagcacagatgtaccctcaaatgcatgtgcagcattttccaaatttcatgccatatcgacaactctattctccagtttaccccatgcctatgccaaactattcgccaaatgtcccttatccatcaaatggaaataattatcttcagatgcccagtggaggttcacatttaactgcaggaagcgtgaagtatggagtttcacagtttaaaccactcccatctggtaacccttctggctatggaaattacactcatccagctggttttacaatgggttctcctggtgttattggagccacagttggtgttgatgatgtcaataggatgaagtacaaggacaacatttatgcctcaactccacaggtcgagacatctgacatctggattcagcaagctagagagatgccacctatgcaggttccttcatattacaacataccaggtcaagcaacaccaggtgcttttgtgccaaatccagcaaatgcatctttcaatgctacagctcaatcctctcatgtgcagttcccaggcttgtaccatcctcagcaacctccctctattggttttagtgtgttatgcaatctaatgcaatgtgataacctggtcagggttctttgtaactgggtacatttggatgattctttggaacaagagtctacaacctaattgcatgtggaaatata

SEQ ID NO: 3295 - DNA, 1314 bp, Zea Mays
tccagttctcctccgcctctccgggtttgactctgctgcgagcccgaacccgaagcagcagagctgcaaaatctagtctagagcgaaagaaatggcgagcgtggcctccgcgaggtgttacggccttctcctcccgccaagcttcgccggagcacggtgctgctcccgtccgtcctcttcgctccgtctgcggccgcggtggggcctgcgccggccgaggacccccctcgcctgcgtcgcgccgcccgactccgcggagccacagacggatgagcaggctgtgaaagctgaatctatccaagaagatgctccgactagtacacccgaggatgctgggcttccagctctcccgaataaggatctcaacagaagggtagcactactgtccactcttggagcggtggctctgtttgcatcccagaggctcaatcttagcgaggcatctcttaaagatcttgcagccaattcggttccatatgaagaggctctttcaaatggcaggcccactgtggttgagttttatgcagactggtgcgaggtctgcagagaattagctccggatatctacaaagtggaacagcaatacaaggaccgtgtcaattttgtgatgctgaatgttgacaacacgaagtgggagcaagagcttgacgagttcggggtggaaggcattcctcacttcgcctttctggataaggaaggaaacgaggaaggcaatgttgtcgggagacttccaaagcagtatttccttgacaacgtggttgcgcttgcttctggtgatcccgagataccgcacgcacgagtggtcggtcagttctcgagcgctgaatctaggaaagttcatcaagtcgctgatcccagaagtcatggctagcagtagttgttttctatgtggacagctgtaatcatagttctaatgccaagaccgtttgacaagaggagatcctaggctatatactatagttcattcagccctccctgtatcgaacatgcgggcgctgcaaagagctggtagattccacaaaacccggaagaaaaggctggcgcggattccttcagtgatactgaaacggtcgaaaaggagagagccagcctcggcccaccatattcgcatcgccgtctcctttgtgtgatcaggctgtctgccactctgttgcccggcaaccttttatgcgtctcttgttttttttttaaagggagagagagttactcttgatttcacaatcaatgatcgcggtgataagataatcgcaaaagtcgtgcgacggagactcgggagggcaggcaaaaggagggcgtgatcccggtggaacgctg

SEQ ID NO: 3296 - DNA, 1178 bp, Zea Mays
ctctgacctgcgggtccgcactccgcttgctcagccagctatgggccgctattgctgaaaagagtaaaaaaaccgacagccacagggcagggagccagggccgctccgctcctgctcctgctcctgctcctgctctctctctctctctctctctctcggcgtcgattgggcgaccgccgccgccgcccccaggtcttcgctgggcccgtcgccggcgacgagcacccaccagttcagtcgagtagctgtcggactcggaacacacatgccggcgatggcaactgctcctgtgaaattctctgtggctacgaactccccatgtgtccagcctagcttgcccctgaggcgtacacctgccgccatctccttcccttgtcgtccatggtcagccgcaatgaactcatgtactggattgttgaggcgctctgacgtggttgcagccgcggggcaccagaagttgatgggatctttgaccactaacgagggactcaggtttggggtggttgtggcacggttcaacgaggtcgtgacaaatttgttactacagggtgccctggaaactttcgagcgatactctgttaaagaagaaaatataacagttgttagtgttcccggaagctttgaggttcctataacagcacaaaagcttgggaaatctgggaaatttgatgcaattctgtgcattggagctgtgattagaggtgacacaacccactatgatgctgttgcaaactcagctgcatcaggtgtactcaatgctggattatctgctggtgttccttgtgtatttggtgttctaacctgtgaagacatggatcaggcgctaaaccgcgctggtggcaaggctggaaacaagggtgctgaagctgctcttactgccattgagatggcctctctgttccggcatcacttaggctgacgcttttgcgtattctggtttctatacacgaggcaagacatcatttcttcctatcaagagttttggctaatagagcttttccgccgcggctagtataattattttcaattctgttagtccggtgctgattggttgctttctttctatgagatttgaaaagctaacgagacatgtttgtaaacctggcacaatgaataattgtcaccatgaacaaaatatggtcatgaataaggttgcacacttcatgaattgtgagatc

SEQ ID NO: 3297 - DNA, 1153 bp, Zea Mays
aaggtgaaagtcgatgccagtagtagctacagcagttaatgcgaaaaactgaagcatgccacgcctgaccgacccccttctcgcctaatgtccgtgccccgactgcgtctccgccccgactcacccgcagcctgtctctgctcggcggcggccgtctcgactgcgggagaggggagcgccccttcgccgatctgatcgggagctgcaggccaaacggcgaggcgagcccatcaggaaccaccatggcagcggcagccgccgactccgatcccgccgcagctgtggccgacatgtccacctgcgcccattgttgctctctttgcaaagaaacaatagaacgtgtgaggtgggatcttcataaaggcgaaaagtgcccacaaagaatcgtcgcttgtgaatattgcgagtttgaattgcctgcagttgatctccatgagcatcaggatgtatgtggaaaccgaacagaactttgccaaacatgcaggaagtatattagattgtgtgaatggatagggcacgaaatacagtgccatacaagctcaaatggttctgcagacacatccagagcaattccagagagagagctacgaccgccgccgccggtgcggccggcacgaccagcacgtcctgctcatgcttcaccacacaagcggctcctcttcacaatcgctgtcactggaatagcagttatggttggctccatactgttccaaagggacgagagtttctagctccagtggccatggacttactctgtatgtcatgttgtttcttgaccgggagagtcatgccacaggaggtgtatttatgtataataactcctcgaatcagtgcataaatcgagtttgtttgagagcatagccccaggcgtgggtttgtggaaaatgcaaagtaaccgtggataaatgcgttcgcccttggcagttctggaacttctgtttgttctgacatcggacttgcatttgttcgtctgtaaagtcgagatgagttatacaatcggggtatcatatctggaaagcgacacgatgcagcagttgttaatagtttggtttatactgtatcctgtagtgttctaatgtaccaatttgtgggaaactggactatcttcaaacgctgtctcgatgttgtcagctgcggattacatcatgtgggc

SEQ ID NO: 3298 - DNA, 1158 bp, Zea Mays
aaggtgaaagtcgatgccagtagtagctacagcagttaatgcgaaaaactgaagcatgccacgcctgaccgacccccttctcgcctaatgtccgtgccccgactgcgtctccgccccgactcacccgcagcctgtctctgctcggcggcggccgtctcgactgcgggagaggggagcgccccttcgccgatctgatcgggagctgcaggccaaacggcgaggcgagcccatcaggaaccaccatggcagcggcagccgccgactccgatcccgccgcagctgtggccgacatgtccacctgcgcccattgatcagttgctctctttgcaaagaaacaatagaacgtgtgaggtgggatcttcataaaggcgaaaagtgcccacaaagaatcgtcgcttgtgaatattgcgagtttgaattgcctgcagttgatctccatgagcatcaggatgtatgtggaaaccgaacagaactttgccaaacatgcaggaagtatattagattgtgtgaatggatagggcacgaaatacagtgccatacaagctcaaatggttctgcagacacatccagagcaattccagagagagagctacgaccgccgccgccggtgcggccggcacgaccagcacgtcctgctcatgcttcaccacacaagcggctcctcttcacaatcgctgtcactggaatagcagttatggttggctccatactgttccaaagggacgagagtttctagctccagtggccatggacttactctgtatgtcatgttgtttcttgaccgggagagtcatgccacaggaggtgtatttatgtataataactcctcgaatcagtgcataaatcgagtttgtttgagagcatagccccaggcgtgggtttgtggaaaatgcaaagtaaccgtggataaatgcgttcgcccttggcagttctggaacttctgtttgttctgacatcggacttgcatttgttcgtctgtaaagtcgagatgagttatacaatcggggtatcatatctggaaagcgacacgatgcagcagttgttaatagtttggtttatactgtatcctgtagtgttctaatgtaccaatttgtgggaaactggactatcttcaaacgctgtctcgatgttgtcagctgcggattacatcatgtgggc

SEQ ID NO: 3299 - DNA, 1531 bp, Zea Mays
aacaaaaatgtcaaaacaaaattaaatctccaatcaaaagaactccatgccacgtggcaacgtggtattggccaagaaaccttcgtaggcctactggataagaaagatcccatccctccgctacccagacgaacaaggaacaatagcctttcctctcactcgcccctctgcatttaccactttgccctcgtcggcggcgctgaccacccgccgccgagtccggcgaaacaaccgcctgtagttccagagtagtacctcatggcggccatatcgtcacttcccttcgcggcgctgcgcggagccgccgagtggaggccttcgtcgacggcggcggccgtctccggcgccgtcgtgctcagcgcgaggtctcgccggggctcgcgctcggtggtgcgatgtgtcgccacgacgggtgatgtcccacccactgtcgcagaaacaaaactgaacttccttaagtcatacaaacgcccaatcccaagcatttacagtgcagtcttacaagaacttttggtgcagcaacacctgatgagatacaaaaaaacctatcagtatgatgctgtgtttgctcttggcttcgtcactgtctatgatcagctcatggaagggtaccccagcaatgaggacagggattccatcttcaaggcatatataacagcattaaatgaagatcctgatcaatacagagctgatgcactaaagatggaagagtgggcacgttcccagaacggtagttccttagttgatttttcttccagagatggagaaatcgaggctattctgaaagatatatcagaaagggccaaggactcatggaagttgggtttcaatcttgaaatctcatttgacctagacatggtctggtctgcccttctacccagtacagcacgctttgcgctgcactaaacgtcagtaaaagaagtgtggatagggaccttgatgtttaccgcaacatactctcaaagttggttcaagccaaggaacttctcaaggaatacgtggatagggaaaagaagaagagagaagaaagatcggaagccccgaagccgaacgaagctgtcacaaaatttgatggaaacctttattccacaaggcattagaatcagccctttgcagaggagagtttcccaggataacagaattaacagtaacatctggaccgtgttgagaaaccaccaaatgttcccctttcatcacagacgtctttggctgctcgtcttgtgatgtagcattctgccgtacaaaaggatccagattattcttactactggacagatatttgtattttctcatatgtcttgaaatcaaatgtatacattttctgtgtgtaggggtcaatgttactcaagcagagaaatatagttttctcttttgtatttaaattcaggtaatttgggaggccgtgttcacttatatataatatagtgtggcaaccatgaaaacaattggtgaagttctttatgtgagtttgtatgtaccgggctcagcactgaaaaatatctgaggttgaaaagtcttaacagccggcttt

SEQ ID NO: 3300 - DNA, 2638 bp, Zea Mays
gtttggttcgtggctaacccattcgaactgaagaacttgggtgatgagatgaccagagtattctggcagtctatcaaggacaagcttatctttccatttctggacctggacatcaagtactatgacttggggatactgcaccgtgacgcaactgatgacaaggtcacagtggaggctgcagaggctactctcaagtacaatgtggccattaagtgtgcgaccattactccagatgaaactagggttaaggagttcaatttgaagcacatgtggaagagcccaaatggcacaattaggaacattataaatggtactgtgttcagagaaccaattatatgcaaaaacgttccaaggcttgttccaggatggacgaagcccatctgcattggaaggcatgccttcggtgatcagtaccgagctactgatgcagttctgaaggggcctgggaagctgaagctagtttttgagggaaaagaagaacagattgatctggaggtgttcaacttcactggtgctggaggagttgccttgtctatgtacaacactgatgagtcaattcgagcttttgccgcagcttctatgacaactgcatatgagaagaaatggccgctctaccttagcaccaaaaacacaatcctgaagaaatatgatggcaggtttaaggacattttccaggaggtctatgaagctgactggaaatccaaatttgaggctgctggaatatggtatgagcatcgtcttattgatgacatggttgcatatgcacttaagagtgaaggaggctacgtgtgggcttgcaagaattacgatggagatgtgcagagtgatttcttagcacaaggttttggctctttgggtttgatgacatcagtgttggtgtgccctgatgggaaaaccattgaagctgaagcagcccatggcacggttacccgccatttccgtgttcaccagaaaggaggtgaaaccagtacgaacagcattgcttcaatctttgcatggacaagggggcttgcacatagggcaaagctcgacgacaatgcgaggctcctcgacttcgctctcaaactcgaggccgcttgcgttggagctgtggagtctgggaagatgactaaagatctcgcacttcttgttcatggatcttccaaagtcacgagaagccattacctgaacacagaagagttcatcgatgcagtcgctactgagcttcgatcaagattgggagccaattgagctgacaggaaactctgcgttgcaacttgaatgcttcatcaccgatcggctctagtcatgcttccgtgattaagtgaatgtgcgccgccgcaatttcgagccaagctaattaaagatgatgggatcgcatcgcatgagcgttcaaaataaaggaatatgtagaacaatggtcgcagatgattaaattactcatattatgttcagtcattccctcagtattttctagcttgttttctcctctgaattgcgtgtccattctgtggttcacacaaatcaccgtcgggttgcctgcgctccgttttcgtagacttcggaggcagtagggtagctgaacaactcagacgaccaggtggttcatgacttcatgtcatgtttatcctgaccgaagaacccaaacccaagccagcaacggcgtctcttctgttctgttctctggacagcggacacgagtccgccaccaattccgcgcgaaagatagtcccgcccatgtgtccccgggacgccgctcccgtcgcaccacgtccccaggccacgcggcgcctcacgcgcgggggggtacccacgaggccacgacgcagctcagctgtatatatacacacacgacttgcttcccatctctgcactgcagcgcaagcgaaatcgccgaaggaaaggagaccccgagacgagcaaggcggcgagggagggcaaagaccacgtaccagcgcgcacgcacaatgtcgggagcacagggcgcgcacccggtcggccagacgacgccgacgacgtacgagtcggtgggcggcggggagaaccgcacgcgcacggacctgcggtcgcgggaggaccagggcgccatccagatcgagaaggtgcaggacaaggtcgacgatgccgcggggcgtggggtagaccacagcaccttcggcgccaacaaggagggccgcgacgacaaggccgatgccggggcaaccggcaccggcacaggcgcgtgattttgtgcccttccgcagtgtacctgatcgtgtgtgtacgatagctttgtgtccgctgcttggctgctctgtatccgcgcgcgtggagtgtgtgaaacctttctgtaaaaaatgcacatgttagattgaaataaaacaaggaccgactggtctgaatcccacttggtactcccccaattgggaaaataataagggcttgttcgttttgctctcaatctatgtggattgggtgggattggatgtgtttcaatcccaaacaagtcaaaatctttcacaattttttccaattccatctaatccatatgggataggaataaccgaacaagccctaatatgtctgacgaggagcaatctgttgcgtctcgctgttttcagtttctacagtactttagtgtttatccagttcgaatgactgttggagcatcttcaacagt

SEQ ID NO: 3301 - DNA, 3064 bp, Zea Mays
gcagtccagtgctggtgagccgcgtgcggcccgcgggttgccttcttctcttgctagttcacccgtcaccaactcgctcctcgcagcagcagcggacgagcccctctgccctcccctctcgtccctccaggcggcaggcgctagctcgacgttcggccccgcgggccggatccgtcgccacagatccgctgcctcctccccgagtcctgcctgatcgggttttttcagttttccccgttccccgtgggccactcgaccggccgacagggcggaaaggctgccccggccgacagggctggtggcagtgagtccgcgcaggcaaattgaattccggcggcgaatcccatcctgtggtcctctctcgagtcctccgcgtctgcgcctcctccatctcgtcgccgttctcgacgcccgcggatccaacggtccaacactgggtttgcccaacagcccaagacgtccaggaatgccattatgattcaacgtcacaggccactgacagcttgcatgttgagcctatatatgagtcgttcctatgcccgcttaccaaacaggttatgcgggatcctgtctctattgacagtggtgttacgtttgaacgcgatgccattttgaagtacttcaatgaatgtcttagcagcagaaggaggcttgtctgccctgtaactaagatggagctcagcaacactgagttaaatccaagcatagctctgaggaacactattgatgaatggatgaaccgcaatgaggtggctaaacttgacgtcgctcggaagtcattgacttctgatagcacggaaagtgatatggtacaagcactccagtatgttgatgagatatgtcagagaagtcgatccagtaggcaggttgtgagaagagatgggttgataatcatgattgctgacttgttgaagaaaagcagtacgaaagtacggcaaatggcactagagactcttcgctccatcgcaaaagatgacaatgacaataaggttgagattgctgctggagacaatattcgcacaattgtaaagttcttaaatcatggtcagactcaggaaaaggaacgagctgtgtctctgttgtttgaactttcagagaacaaggctctttcagaaagaattggcagtgtttctggagctattcttatacttgttggcttgtcaagcagtaaagtagaaaactcgctgattgttgacagagctgagaagacattggaaaacttagagagctgcgaaaagaatgttagacagatggctgaaaatggtagattgcaaccccttctgaggctgcttcttgaaggttcacctgacatacaattatctatggctgcatacctcggagagcttgttttaagcaatgatgttaagtaatcagcttcctatgagattgaaggaggtctcagcgaccattcttgcaaatgttgtggcatcgggtgcacgttttgagtccattccacttgatcataataggcagaccttagtgtctgaagacattgttcacaatctacttcatcttataagcaacacaggacctgcaattgagtgtaagttgctccaggtgctcgttggtctaactgattcttcgacatctgtacaaaatatagttgatgctatcaaaggttcaggtgctattgtcagtttaattcagtttgttgaagcacctcaaagggaagtacgcatgaattccatcaagctcctgaataacatatcaccatatatgggtcaagaacttgctgatgcttttcgtggaaactttagtcaactccgcagcttggtcaaggtcattgttgataacaatggtatttctgaagagcaagcagctgctgctggccttgtagctgatcttcccatgcgggactctgtcctcaccagacgtcttcttcaagatggggcatttgcaacaatcattccaaaagttttaagaatccgacaaggcgagattcgtggggggcgttttgtgaacccattcctcgaaggtctagttagaatagtctcccggatcacatttgtcttggatgatgatccagatatcattgttgttgcttgtgattacaatcttacttcactcttcactgatctgcttcagatgaatgggcttgacattgtccagatcgtctctgctaatgcgctagagaaactctcacagcagtcaaaacatcttacgaagatactgcctgctcccagcccagggttgtgcttttcaatatttccatgcctcagccagaagactgtagcaactggggtttgtagagttcactgtgggatttgttctgcaagggagagcttctgtctcttggaggggaagtcagtggagaagttggttgcttgcttggataataataatgagaaagtagttgaagctgccctatcagcgttatccactttactggaggatggagtggacattgaccaaggtgtcatggtgctgtgtgatgccgaaggaatcaacccaatacttgacgtattgtgtgagaacagaaatgaggcactgcgccagagagcggtgtgggcagtggagagaatcctgaggatggatgaaatagcatatgaaatatcaggaaaccaaaatgttggtacagccttggttgaggccttcaggcatggtgactataggacaagacaagttgcagagcgagcattgaagcatgtagataagctgcccaatttctctgggatattttctaagatgggagcacaatgacgacgttacatggaagtagtctaattctattttgacacatggattgcagatccacatgaggcacagatgaacacatgtagattggttttgctgacccgcagatggtggtagcgatccgattgatcgaagaagaatcgaaacattgcacgtgttgtatagtgtatatttctacctgtaaacttgtatgtattttttagattggtcagattcatagaataggttgctatccctgttgtgtttagataaatataaataatgcataatccccagctctgggtggggaaaaagaaagaaatgtgaagtatttgcacgtatttaatcatggttttctggttgagtttattgcgatatgcgttgttgcatg

SEQ ID NO: 3302 - DNA, 2139 bp, Zea Mays
ctgtgaagtcaactctatttcaaagtcgaacgatgcaggataccaaattttagaggttgatggttcggtggagacgtacgataggatcataataggtattaatgcacatgatgcactaaaagtattaggagctgaagcaacaaatgaggaactgaagaatctaggagctttccattttatccggagtatcgcgtacctccactctgatgaaagtctgatgccgcgtaattcctctgcatggagcgctaggaacttcttggggacaacaagcagtggtgtctgtgttacctcctggctaaatatacttgagaacattgaatctgccgggcctctacttgtgacacttaaccctcctcgtgttcccaatcatgtattgcttaaatgtcatattagccatccaattccttccattgctgctgcaaaggctaatcttcagctcaacagcattcaaggaaagaggggcatctggttctgtggctcatatcaaggctatggataccatgaggacagtgttaaggctgggaaagcagcagctttaggattgcttggaaggaaatgtgaccttttgtctaacccaaaaccgatggtctcatcgtggacagaggcgggcgcacgtcttcttgtagcaagaagcctagaccaatacataaccattggtaacttctgtatactcgaagaaggaggcactacattcagttttggtaaagcatgcgaaaaatgtcatgtaaaatctgcgatacgcgttcacgatccccagttctattggaaggctgcaacagaaggagaccttggctttgcatctgcctacatcaatggccaaatctcatttgttgatcaccgaaaaggccttgtgaaccttgtacggatcatactggctaatagaggtgagttcaagaggttgagcagcactgctaggaaagcctggtggtcgccgttgcttggaattactggagtctcatttgcaaaatactttttgcgtcatgccttgcggaagaatagtgtatccaaagctcgtaaaaatatatctgaacactacgatctgagtaatgatttcttcgctctttatctggatccatcaatgacgtactcttctggcatttttaaggtggcggaggagagcttagaaacagcccaactacgcaaacttgacagtctcattaacaaggctaaggtggagccagggcaccatgttcttgacattggttgtggttggggcactttagcaatacggttggtgaagcaaaccggttgcaagtacacaggaatcacattatctgaggagcaactgaaatacgcgaagagaaaggtgaaagaatctgggttagaggaccgcataactttgctcctttgcgattaccgtcaactaccggcaggcgataagtttgacaggattataagctgtgaaatgattgaacatgttgggcatgagtacatggatgatttcttcgggtgctgcgagtatcatttggcagagcatggcctacttgtcctccagtccatcgcgctcccagaagaattgtatgacaaaatgaggatgcggcccgagtttctcaagacatatatcttccccggtggctgcctaccttctctaggccggattgtgtctgccatgtctaatgcatcaaggctcaacattcagcaccttgagaatattggggaccactactacactaccctaatgaactggagggacaacttcgtggccaacagagaaaaagcttctgcgcttggatttgacgacaaattcatccgtacctgggagtattatttaagttacgctgcggctttgttcaaatcacgcacagctatagattaccagatagtgtttgctcggccaggcgattcaaagctaccaagctatgttgccattgcataaaataaagctgtgtggcttggatagatgcatgcgtgtggtatatagtactactagaagtctgcatgcatatgtctgctagcggtgctttcatttgcactcgagtcgctccacgtaagaggtgaaataatagtggttaaggcatctgatcgagtgcttggcaaaaacatgatgttaagttgacaacttgtaataatattacttaaatatgtagagaattgttcttttaaataaaaaagaagaggcgctaatgtgaagagtgatgt

SEQ ID NO: 3303 - DNA, 1523 bp, Zea Mays
gtaccaagcatgcatcgggccgacgacgaagctactaggaccgcttcacaccggcctgctctcctataagtagcagtgcctcaatgcgacgccttttggcaagttcgatccagattatagcagctagctcaccgtcaccgacatacagtacaatagcagcttattagcttgtgtcagtccatccatccatccatggagaaactcgtctacttcgcgaccattatatccttatccatggcggcgctgctagtgccactccgcgtacagtgcgaagaagcagctagagctgctgctgccagaagctgccatgccggcaccggagcttctgcttctgcaccagccgcagcagcagcgtggaaaaggagctgcggcggcggcaaggcggggaagcagcagccgcaggtggagggcatgttcgtgttcgggagctcgctggtggacaacggcaacaacaactttctcaacggctccggcgtgcgcgcagactacctcccctacggcgtggacttccccctcggcccctccggccgtttctccaacggccgcaacgtcatcgacgcgctcggcgagctcctcggcctccccgggctcgtcccacccttcgccgacccgcgcacccggcgggcccgcgccgcgctgcgcggcgtcaacttcgcctccggcggctccggcatcctggagcacaccgggcagggcaaggtggtgagcctgcggcagcagatcaccaactttgagtcggtgacccttcctgacctgcgggcccaactgcgtggaccagctgcggccgccaaccactggatcaagggtcaagattccttccacaagtgctacctctccaagtgcctcttcgtcatcggcacaggtggcaatgactacctgctcgactacttcaaccccgggaacggcacccaaggtgggccgcccttgtcagagttcactgcgtctctcatcaccaagctctccggacatcttcaggcgttagggagacgagcagagcctgctgcgagatgtcgaggagctcgtcgggcgtgctgtgcaagaagcaggggcccatctgcagcgaccggacggagtacgtcttcttcgacgggctgcacccgacggacgccgtgaacgccaggatcgcgcgcaagggctacggctccagctcgcccgaccacgcctaccccatcaacgtcaagaagctagccatgctgtagcccttgtagaagctagccatgcatgcttgtaacctagctttgtactagtagtaataatctagaattaatgcctacctcatcaacgccaacatcgttcgactacttactagtagtactagttctctgtgaaatagtctaataagccatctcccattcgtctttgctaggcgttaagtgtttttagtgaagagtacgcgcgggcatgcagggtggtctagacaatcctaatgtatagtatccgctacttggtcttttatgtatcatgagtgatgcattcgtcttttatagtatccgctacttggtctatataatcctaatgtatag

SEQ ID NO: 3304 - DNA, 1750 bp, Zea Mays
gaaccggcccagcggtggccaaaccggcccgggcacaactacaaggcgtgcggtcgaagaaagaaattgatgaaacggcggctgaggccgcaagcttctcactggccgcaagcaaaccgaacgaacccaaccgaagcgagagctgagcaaggcagaggcgtcgtgaccggcgatggagcggctgcagcggatctttggcgcctccggcatggggcagccgccgacggactcgccgctgctcgattcctccgagcaggtctacatctcctccctagcgcttctcaagatgctcaagcacgggagggctggggtgcccatggaggtcatgggcctcatgctcggcgagttcgttgacgactacaccgtcagggtcgtcgacgtcttcgccatgccgcagagcgggactggtgtcagcgtcgaggccgtcgaccacgtcttccagacaaacatgcttgacatgcttaagcagaccggcaggccagaaatggttgtaggttggtatcactcacatcctggcttcggatgctggctatcaggcgtcgatatcaatactcagcaggtctatgcaaatccacttgttctctaaaagggatcttttggaatggtctatcaaaacaggatagctgctgtcattgcactgtactatatgtcatgtcaacgtcattataaacactgatgtgttttttaataaagcatggatatgatattatgatatgttgtactataattgatcaactgtaggcaccagtcagcttctccctctctatccccctattgcctgttttcaatttcactaccttcattgtgtatttgtgtaggttccatcaccctgaaagttgtggatgaactcatcttgttgagttttgaagctttgaaccctagagccgttgctgttgtgatagaccccatccagagtgtgaaggggaaggtggttattgatgcattccgcctcattaatcctcagaccatgatgcttggccaggagccacgtcagacaacatcaaatgttgggcacctaaataagccatctattcaggctcttatccatgggttgaatagacactactattcaattgcaatcaattaccggaaaaatgagcttgaggagaaaatgctgttgaacttgcacaaaaagaaatggaccgatgggctaattttgaagaggtttgacactcactcgaaaaccaacgagcagactgtccaggaaatgctaaacctagccataaagtacaacaaggcagtgcaggaggaggacgaactgccacctgagaaacttgcgatagcaaatgtgggtcggcaagatgcaaaaaagcatttggaagagcatgtgtcgaatttgatgtcatcaaacatagttcagaccctaggaaccatgctcgacacggttgtcttttagtctactaataatattgttgtcccaaactgaaacatagccacactatggaagcatgacacatgcaatgagcttgaggccagatacattttggttctaaggtttgtttatgaatggatttgtctacatttcattgtcgttaaacttcctgccttttctatcaaagcttcagtgcgttctagttatgtttaagccaaggtggctccagatgtcagttgggatgtcattgccctgggagaactgtgtaatgtgattatgacctgtggcagataacttatttttgagttaatccatcaccacttcattctttattgttagttgtttagtactaatatgtggaatggagtcatcccatca

SEQ ID NO: 3305 - DNA, 1761 bp, Zea Mays
ggaacgtgttgggcggccgacctcatgcctcaccccttccccgtcggcccccgactccccgagtcgccattgcctgccctcgttcggctcgatccccgcactacagcgcccgccaccaaccccgcccgcgcctccgctactaaagccgaggcctcacccaccacctgaccaccatgctcctccccctcctcagatcccacccgctcctccaccacgccgcgcgcctgtcctccccacgcacccgcctgctcctccgccgcgacgcaatcccgctcgcacgctccccgcctatccgcatggcggcctcgtccggctccggcgccagctcccctgcctcggcgccgccagctgccgtggtgcacaagtcaaagatcaaattttgccctgcttgtggaagtccaacgaaactggccatacctgatggcgatgagaagatgagggctgtttgttcttcttgtggaagagttcactatgaaaaccccaaaatggttgttggttgccttgttgagcatgataataaggttctcctttgcagaagaaagattgaaccagcttatggtctttgaggtgggggagtctactgctgaaggagcctctagagaaacattagaagaagcatgtgcagatgtagagatagtctcgccttttgctcagttggatattccactgattggccaagtgagtgaaaaattggcatagtcacaaagttgtaggttatttcgtccgctactaagttgattatctttgtattacaatgagatgcagtagagttacattattttccgagcaagattgaagacccccaacttttcacctgggccagagtcgctggaatgtgcactttttgctctggatgatataccattcgattctctagcattttcttcaatcattgtcaccttaaggatgtatactgaagatgtgaggtctggaagcatcaaatttcactattgcacgataaacaaaaggttaggagccagcccttcagatcttcggagtttcgatattgataaccatatagccgtgtgaggttgaaaggttctaaaccttttgcgattgaggagaatggttttggcatacaacaggcgcgcgcgcacacaccattggagccttgtttggcgcctccctgcacattggaacagatttaaagtaggtgctggaactgtaaatgattcggtatcaaaaaggctggtttagccattttaggagattatgcgtttcgatttcatgggagttgggaggacagaattgtatcatagtgcagtaactcttggttgtaggattgagttatcctgcatgccatggttgtggcgcttcgtcagcgaccgaatgctgtaatgtggttacgattctctgagctccttttcaaccattaattccagttgtaaagcctgtattgcttcatcttttatcttttaaaagtcacgttatcttcagatcgaactgagtgctcaatacatgtgcagccatgctcgttcgtgattatttgcaccctagaaacagcaaaaggtatcaagtttgttcatcaaattcagaaagaaaaagaactttaactatcaatatctctaaaacaattgctggaatgaaaactcgggtattataagattaggtctgaatgtctgattatggatatagatgtaaaccttgttgccaatggtattataaagtttagtcgtggtaaagaaaacactccgtttatccaaaaaaaaaaaagcaattaatgtgtgttcttcgttaaaaaacaatatataattaaaaata

SEQ ID NO: 3306 - DNA, 2049 bp, Zea Mays
ggaacgtgttgggcggccgacctcatgcctcaccccttccccgtcggcccccgactccccgagtcgccattgcctgccctcgttcggctcgatccccgcactacagcgcccgccaccaaccccgcccgcgcctccgctactaaagccgaggcctcacccaccacctgaccaccatgctcctccccctcctcagatcccacccgctcctccaccacgccgcgcgcctgtcctccccacgcacccgcctgctcctccgccgcgacgcaatcccgctcgcacgctccccgcctatccgcatggcggcctcgtccggctccggcgccagctcccctgcctcggcgccgccagctgccgtggtgcacaagtcaaagatcaaattttgccctgcttgtggaagtccaacgaaactggccatacctgatggcgatgagaagatgagggctgtttgttcttcttgtggaagagttcactatgaaaaccccaaaatggtaaatgctgaacaaataaaagaaaaaggaaaggatccatatacatttgtatttgtgctttaaattacgacactgaatgcctgttcgcacagtggccgtggattttttagttctacctacagtattttgtaggaggcaaatcacagctgcagctttaatctgcggtgaacaccccttcaattccatgattatagagcccgcattttttcattcatgtatgaagtgcttttgatgaacagatgtgtccccattttcttttttgtttaatctattggtgaaacaagggactatagctggcaatatttttttgttatatatgtgtaacacatgttggcttctattttctgccatttacaatatatatcatctggataggttgttggttgccttgttgagcatgataataaggttctcctttgcagaagaaagattgaaccagcttatggtctttgaggtgggggagtctactgctgaaggagcctctagagaaacattagaagaagcatgtgcagatgtagagatagtctcgccttttgctcagttggatattccactgattggccaatagagttacattattttccgagcaagattgaagacccccaacttttcacctgggccagagtcgctggaatgtgcactttttgctctggatgatataccattcgattctctagcattttcttcaatcattgtcaccttaaggatgtatactgaagatgtgaggtctggaagcatcaaatttcactattgcacgataaacaaaaggttaggagccagcccttcagatcttcggagtttcgatattgataaccatatagccgtgtgaggttgaaaggttctaaaccttttgcgattgaggagaatggttttggcatacaacaggcgcgcgcgcacacaccattggagccttgtttggcgcctccctgcacattggaacagatttaaagtaggtgctggaactgtaaatgattcggtatcaaaaaggctggtttagccattttaggagattatgcgtttcgatttcatgggagttgggaggacagaattgtatcatagtgcagtaactcttggttgtaggattgagttatcctgcatgccatggttgtggcgcttcgtcagcgaccgaatgctgtaatgtggttacgattctctgagctccttttcaaccattaattccagttgtaaagcctgtattgcttcatcttttatcttttaaaagtcacgttatcttcagatcgaactgagtgctcaatacatgtgcagccatgctcgttcgtgattatttgcaccctagaaacagcaaaaggtatcaagtttgttcatcaaattcagaaagaaaaagaactttaactatcaatatctctaaaacaattgctggaatgaaaactcgggtattataagattaggtctgaatgtctgattatggatatagatgtaaaccttgttgccaatggtattataaagtttagtcgtggtaaagaaaacactccgtttatccaaaaaaaaaaaagcaattaatgtgtgttcttcgttaaaaaacaatatataattaaaaata

SEQ ID NO: 3307 - DNA, 3311 bp, Zea Mays
ctagtctgtcatatgtggacgctatgatgcatggacagtgggcttcttagggcctttatgggccaggaattcgtcgaagcctgaaggaaggaaaaaaaaaacctaaagatggtcgctgccaccaggtagtttccaggcttccacgtttcactccaccgcttgtttccagttaccaccactccacttctaggttccagccgtgccggcgccgccgcttgcgctactctgcgcgccctcgccgctgcttgcttgctcgcaacttagaaggtgacgccgcctgcccagtgcgagcacgcctccacttgcactgcgggctgcggccctgccgaatctggaaggtgtcgagaagaaatagatccttgcactccatgccgctatgatcagcgctggccgcagcaggcggcgggggcgggcaccggcgtccctgcccacgaccacgaccgctgcttcccgccggaccgagcactccatctcctgctgttattgtgactgcaagatatattccttaaacgacgccctcttcaatttggggtggaagtatgctagatatatgagagcatggttttctgtaggtgtttatctatctctcattgctttagtcagtatatccttgatgctattgtgggagtcaattggtgtgttttattttaggagtggattccttagtgcctggttacagaacctactgacttcaggtctcaacatatctattgtagacaccacaatcattataatgtcaacaatcctgtctattgtttttcatgagtttggacatgccattgcagctgcaagtgagggactacagattgaatatgttgctatatttgtcgctgtactttttcctggggcatttgttgctctgaactatgacctactacaaaatatgcctctcttttccatgcttcggatttattgtgcagggatttggaataatgttatgcttcttcaaggtttgcggaggctttcaggtgaagtattatgagcatgggtcaactttgagctccttgattgttgacttaatgacaattttaactagtactccttgtgcatgtactttgacttagacaaaccttcacatataactttgaagggattcatctacttcttgaaaacatggaacaatgcatgtgccatgactaggtttgtttgaaagccttggaaacttgcaatcgattgtttcttaagttgttcccatgtggttatcgatctggacaaagggatgagtactaggtttgagctatgccttttgttgacggagggatgagtaccaggtttgagctatgccttttgcggccataatatgatttggctaacattgttgtgtttctgccgaattatgcaatggttgcttcgtaactcatgaggaattgctttgatttcgactgcccatcattcagaggaagcatggacagtttatatgcagcttgccatggggctacctgcaaatcccttgagaacgaagatgcactatcatagatgaaattacatttttacctttccctatttcatagtcaccctttgcaattaagggagtacaataatgtcattttactgcgtagacgtgtcgcacacatcttctcttcgtagaagcttcttatgtctcctctccttcgaagtcctctttatcgacgacaaagctttgctttcaatgccttcggcttcatgcacctttggctcattcagatctaccgaagctttttcaaggagagcggtgatcttcctttggccttcattagctttctggacctgaaaaaccatctaaatattgatttcatcattttggaccttcgactagagacctccccaacaacaaccaaatagaaacaattgctggtttacaaatgccattaaaccctggttagagaagtgcaaatataattctaatgcagtcttagacatacttcacgcgagtgtgaaatgtaacgttatatacttgtatactgaccttgttacttaatcattgtgatgttttataatttttttgttatgatttcatgtttaatagctctgtacagcatgtgtgatgataacattgttacttcctgtgatgttatatcctctctatgtgagtggtgatggcctcatggtcatggaagtccctgaaatatctcctatgtcagaatacttgtccactcatgatgttattctttctgtggatggtctgaaaataaccagaactgatgattggatcaagattctgaaccaaggtactacagcgaaatctagggatcctgaattccttgaaggctctcatagatatgttgccactagttctaccaagggttattgcgtgcccgattcatggatagatgcaagcaaaaatctctggcagataagagacaagctgccttgcccagatgaactgatagccttcgaaaaagttatctgtaacgtctcaaccattttgacagagaagactagcataggtagtgaccagaaggaagttgagggaaaatattgtttgattgcgaaagatgtagtaaagcttagaagatgtggaaacggatggcacatgactgaagatgatgaaagtagctgtgcatgttttgaggatgagcactgtttggtacctgttctgaacccaggcttttcatggattgaggtctcctatgccaggccatactctttgagatgtttacaaaaaggaggaaatttgttatcatcacatactgcaaatagtaactttggacagagtccttgtgaaggatcttttgtttatgtgggtgatctgtcatcagcagcacgttcggttaggttatcccgctaccgacctcgatgggcacttctacttttcattgcagacatcccatatatcttggaaaatggtttaagtagcttgcttcatgcatctgcagcattggctgtaatcaattgcctaccggtgtattttctggatggtgaagcgattctggagactaccttaagctatgtagcttggtttaccccaagactgcaacgcagaattctaaaagtatgcagcgtggtgtggacgggtttattagtcattactttctcaagtatttgttattccacagtgctacattatggcgtatagcaaataacccatgtaattttgtcttgaacaaagagaagatcattttaatggaacatgccaactgtactctgtccattgtaaattataagttgttttgacttttatatatacataacttttgttaggctatcttcagtagactatccacgtactcatattcaagcttcactccttgaatagtgtagtctgtagtgtaaaatagtgttttaggtgactatatggataaactgttggatatgacgtatctacactaggt

SEQ ID NO: 3308 - DNA, 5951 bp, Zea Mays
ctagtctgtcatatgtggacgctatgatgcatggacagtgggcttcttagggcctttatgggccaggaattcgtcgaagcctgaaggaaggaaaaaaaaaacctaaagatggtcgctgccaccaggtagtttccaggcttccacgtttcactccaccgcttgtttccagttaccaccactccacttctaggttccagccgtgccggcgccgccgcttgcgctactctgcgcgccctcgccgctgcttgcttgctcgcaacttagaaggtgacgccgcctgcccagtgcgagcacgcctccacttgcactgcgggctgcggccctgccgaatctggaaggtgtcgagaagaaatagatccttgcactccatgccgctatgatcagcgctggccgcagcaggcggcgggggcgggcaccggcgtccctgcccacgaccacgaccgctgcttcccgccggaccgagcactccatctcctgctgttattgtgactgcaagatatattccttaaacgacgccctcttcaatttggggtggaagtatgctagatatatgagagcatggttttctgtaggtgtttatctatctctcattgctttagtcagtatatccttgtgggtttagcaggtcccatatcttcggatgtaatgtggatgaagttaagctttggttatattttcccccctaggagtggattccttagtgcctggttacagaacctactgacttcaggtctcaacatatctattgtagacaccacaatcattataatgtcaacaatcctgtctattgtttttcatgagtttggacatgccattgcagctgcaaggtctttatgtcttaccttctcatttctatttttttctctcttacatgttgcgtgctttttgttcagttcacctggtactcaaaacatctgtaagcgaggaaaataggcggcaaatagtgggtttattatgagggaataaattactggattatataggcaaggatgttctagggttttagtttatagaaatgacaccaatcacagaggtccttgtgaccttgcctaccacaaaattgatatgtgtgtgtgcgcgcgcgcgtgtggtgtgtgtgtgtgtgtgggggggggggcacatgcacagcaataaggcccacagcctaaaccaattatctgtctaaaaactctcatgaattattttgtttcatattctgacacatcatttgctacttacacaacagtgagggactacagattgaatatgttgctatatttgtcgctgtactttttcctggggcatttgttgctctgaactatgacctactacaaaatatgcctctcttttccatgcttcggatttattgtgcagggatttggaataatgttatggtaagtcatgctgttatgcatttattatttccaaaagatagaaataagttcatttattgattgtgcctctttgtatcttcgtaatgcattgtcatatacttttgatatttgggtacttgatgctacctcatatagaagtagtttaatcattaaaaggaaaatgcataactatttgtttacttgcaataatgaaggcaacgagaagtaagaacaatatactctatgcagtctagcgtaagatgcaattggtctcactaaatatttgttcgaaataatgtgagcaaagttattgtagagaattagggaacacctcacacccaattagggggtggctttcatatatatgtagtcatgtacaacttggaatacaatatgtgttagactatacatacctctaatacctgcccacagtcacaactgtagggaactgaatgagactggacctgaagacattgaactactgtgtaagcagtctcttagtcataatgtacgtgaactgattagttgaggccacatggagtaccctaaagccaccttctcacgaacaaagtggatgtcaattgtcaatgtctatatgcttcgtacgacgatggtgaaccgaattggcagtcatatagactgtggtgacattgtcacaatagacaatggtcgccaaaccgagtgatagtctgaaattgaccatcgactatgttaaagctatcgtgagggaggctacacttgaggcttcgtcgggcaaacgggagcccttgcccccatcggttgcggcaagtccagagcagcaaccttcttcagcgatggaggcggaaaagaacgccgctgaggaactatcttttctaaagcacgcaactttgggaaaatattgtctgattgtggcgaagaagaaagatgaaggctctttggcgcgacctgttgactaggtgtaaattttgtacactaggccatgctgaagattcgttaggttgagttttgcttgaaggccttggaaaatattatgtctgattgtctgccacgcttcaattgtcgaccaatacatcatgcacggtgaagcttatattacagttgattaccatgatattgctgtgtgggtaatatcttagccgaaggtcatcttgagtgaatgttacaggcatatgaaccacttagatctgatataggacccctgaacacctatatgttggaccctcctttgaagttcttgtttttatctcttattgagtggcccgaagcttgatcttctcattattgggaatatgtgctttgctggtggaactaagttgttgacgtctgagctttgggctcttcccttctactgagctggctatgttctcgtatgtggcgtttttgtggaggttgattatataacattggatcatattgtgatgggtctggtagttgggggttgtaagcttcccactgttgtgactgatgttgcacaattgggcttgaggacgaagaatgtgagttctgcccttgatgctggatgtatgacacatcatagttagtcgagcattaagatgatgtatggcacacattcttcggctggccttcctgcttcacggttgccaattccttatgcttttggatggtgatgctacaatattttgttgtatgctctttattctccccgcaaaatacacaatactagtcaatggcgcgcgccagcgcttgcataggatttccctttttttactgggaaggtagagcggcacaacaacagtcgtcgcccacgcgtgcggctagatgtaccaacggccaagatttttcgcgcgacatggatagtgcgaatgtcgaggaagttgcatcggtttaataagaagaaatagctttcttgattgaccgttgttggagtacctgcctccaaaggtgtggccccccttctgtccctttgtgttgagccaccccagaaactactttgctggctttgctaaggtccgttcgaaggttggcttgttgttggagtttgcggaaactacttttctccatcaaactagggtgtagtctgaattgttcgggcttcccttgcatccttgttgaaaaccctcatgatctctctgtgtttctgttgttcttgtcaacgctgtcgaaagtcattgtgtgctctaatatattcatccatcttctgaaacagcttcttcaaggtttgcggaggctttcaggtgaagtattatgagcatgggtcaactttgagctccttgattgttgacttaatgacaattttaactagtactccttgtgcatgtactttgacttagacaaaccttcacatataactttgaagggattcatctacttcttgaaaacatggaacaatgcatgtgccatgactaggtttgtttgaaagccttggaaacttgcaatcgattgtttcttaagttgttcccatgtggttatcgatctggacaaagggatgagtactaggtttgagctatgccttttgttgacggagggatgagtaccaggtttgagctatgccttttgcggccataatatgatttggctaacattgttgtgtttctgccgaattatgcaatggttgcttcgtaactcatgaggaattgctttgatttcgactgcccatcattcagaggaagcatggacagtttatatgcagcttgccatggggctacctgcaaatcccttgagaacgaagatgcactatcatagatgaaattacatttttacctttccctatttcatagtcaccctttgcaattaagggagtacaataatgtcattttactgcgtagacgtgtcgcacacatcttctcttcgtagaagcttcttatgtctcctctccttcgaagtcctctttatcgacgacaaagctttgctttcaatgccttcggcttcatgcacctttggctcattcagatctaccgaagctttttcaaggagagcggtgatcttcctttggccttcattagctttctggacctgaaaaaccatctaaatattgatttcatcattttggaccttcgactagagacctccccaacaacaaccaaatagaaacaattgctggtttacaaatgccattaaaccctggttagagaagtgcaaatataattctaatgcagtcttagacatacttcacgcgagtgtgaaatgtaacgttatatacttgtatactgaccttgttacttaatcattgtgatgttttataatttttttgttatgatttcatgtttaatagctctgtacagcatgtgtgatgataacattgttacttcctgtgatgttatatcctctctatgtgagtggtgatggcctcatggtaagtctacttctagttctatgtgtttacattattttaattttggcaatcttcacaatctaaaagtctgtcagaacaggtcatggaagtccctgaaatatctcctatgtcagaatacttgtccactcatgatgttattctttctgtggatggtctgaaaataaccagaactgatgattggatcaagattctgaaccaaggtactacagcgaaatctagggatcctgaattccttgaaggctctcatagatatgttgccactagttctaccaagggttattgcgtgcccgattcatggatagatgcaagcaaaaatctctggcagataagagacaagctgccttgcccagatgaactgatagccttcgaaaaagttatctgtaacgtctcaaccattttgacagagaagactagcataggtagtgaccagaaggaagttgagggaaaatattgtttgattgcgaaagatgtagtaaagcttagaagatgtggaaacggatggcacatgactgaagatgatgaaagtagctgtgcatgttttgaggatgagcactgtttggtacctgttctgaacccaggcttttcatggattgaggtctcctatgccaggccatactctttgagatgtttacaaaaaggaggaaatttgttatcatcacatactgcaaatagtaactttggacagagtccttgtgaaggatcttttgtttatgtgggtgatctgtcatcagcagcacgttcggttaggttatcccgctaccgacctcgatgggcacttctacttttcattgcagacatcccatatatcttggaaaatggtttaagtagcttgcttcatgcatctgcagcattggctgtaatcaattgcctaccggtgtattttctggatggtgaagcgattctggagactaccttaagctatgtagcttggtttaccccaagactgcaacgcagaattctaaaagtatgcagcgtggtgtggacgggtttattagtcattactttctcaagtatttgttattccacagtgctacattatggcgtatagcaaataacccatgtaattttgtcttgaacaaagagaagatcattttaatggaacatgccaactgtactctgtccattgtaaattataagttgttttgacttttatatatacataacttttgttaggctatcttcagtagactatccacgtactcatattcaagcttcactccttgaatagtgtagtctgtagtgtaaaatagtgttttaggtgactatatggataaactgttggatatgacgtatctacactaggt

SEQ ID NO: 3309 - DNA, 2137 bp, Zea Mays
cgctggcgtttttttttttggggccttttgttcctgcttttctctttcaagaaaggtcacagattatcctacatattgtagctccgcaacctgttcagcaaaatgaggccttcagatgacagggcacagctttcaggctttgcacaatcagatgaatcgacacttgatgtggaggggcattgctgccatcagccgtcattcccttgttcgccgtcaatgcaaccgattgtttctgggtgcacacacacagagaacagcgcggcatacttcttatggccaacatcaaacctacagcactgtgcagccgaggggcgtgcaaactactttgccaacctttcaaagggacttctgccaaagattggccgtcggctgcccaagggccagcaagcaaacagcttgcttgacttgatgactataagggctttccatagcaagggtccaggaggtatttggtgtgatgttgatgttgttgagttttcgtactacggtgctccagctcaaactccaaaagtgcaaatattcacagagctcgtggataagttgtgtggcagtgatgaatgtattggctccggctctcaggttgcaagtcaggacacttttggaactttgggcgccattgtaaaacggagaactggcaacaagctggtaggtttcgtcaccaaccgacatgttgctgttgacttggactacccaaaccagaagatgtatcacccattgccacccaaccttgggcctggtgtttatcttggagctgtcgaaagggcaacatcttttatcacggatgatgtttggtatggaatctatgctggaacaaacccagagacatttgtacgtgctgatggggcattcatcccatttgctcatgactttgacatctccacagtcacaactacagttaggggtgttggtgatattggggatgttaaggttatagatctgcagtgtccacttaatagattaatagggaggcgagtatgcaaaatcggcagaagttctggccacacgactggaactgtgatggcttatgcccttgagtacaacgacgagaaaggaataagctttttcactgacctccttgtcgtcggtgagaaccgccaaacatttgatctagaaggtgacagtggaagcctcattatcctgactggccaggacagcgagaagccgcgtcccatcgggataatatggggtggcacagcaaaccgtgggaggctaaagcttaggtgtgaccatggccctcaaaattggaccagtggagttgatcttggccgccttctggatcgtcttgaacttgatcttatcataaccagcgaatcactcaaagatgccgtgcagcagcaaaggcgcgcgttggcggctgcagctaattctgctgctggggagtcgtcgacagcagcagctcccgtcctagaagagaaagtggaggagatcttcgagcctctggggatcaagattgagcagctgcgtcggcacgacgtttcggcctctgaagcggaggaggcagctgggatcaatgtggaagagcgccagttcatctcaaactttgtgggcaggtcccctgtgcgtgatgaccagggtgctccaaggcaaattgcgaacctgaacaatccgtcagaggaagagctcgccatgttgctgcacctaggcgaccagtagcccaagcggcttcgcagacagaatccgacctcgacgggaaacggcgaagcgctcatttcagtgtctctacatcgaagagtcgcaagtagtccgaagaaggtcacctggagttcagcaaactgaacctgcatcagtagcttagaccagcagcttcctggcacaaacattataatgaactatgctgaaacttgattcagcacttacatgatttgggtggtattcccttcagttttgctgtgctcgtgaagactttaatatgtacaatgctgagtccctgtatcaaaacaatgcaggtagtgataaaatcgtattgatcaccttctcttttctaccattatcggtggagttgtctcaagatgactagatcagcttctggcaggcctgtctagtgcccaatgcaactagggcgatggtacaggcccccaattttttgagttttctgaaatagataatataagaaggcaaatattgtttgatgttttgt

SEQ ID NO: 3310 - DNA, 1772 bp, Zea Mays
gcaccttctcttctgtgctgtcactccgatcactcctgccgccactccaggcatagcacgcaacgctgcaacggggccggaggcgccagcgccgggtcggccacggtccactggcgtcggcgcgagcacgaaccaaacgccgtccgcgggggcggccagttccgcgccaccgcctcgggaggtgccggactgccccgcctacttccggtggatccacgaggacctgcggccgtggcgcggcacgggggtcacgcgcggcgcggtggagggcgcgcgccggttcgcgcccaggctccgcgtcgccgtggtcgcgggccgcctgtacgtggcgcgctacggccggcggcggtgcttccagacgcgggccgcgttcacgcagtggggcatcctgcagctgctccgccgctaccccggccgcgtcccggacctcgacctcatgttcgactgtgaggacctgcccgtcgtcggcgctggcgaacgccacggggcccagccccagcctcctcctcctccgctgttccggtactgcggcagtgaggccacgctggacatcgcgtttcctgactggtcgttctggggttggtaaatatatatatacgcacattgcagctctttgccatggccatgaccatgcacgatcatcatctctgttcgtcgtaatatcgactcacagagggctctctccttctttggatatggaaggccggagctcaacataaagccatgggaagcgctgcaaagggagataaacgaagcgaacgccgtggtgaactggacggacagggcgccgtacgcgtactggaaggggaaccccaaggtgggcgccgaacgcctgctcctcctccggtgcaacgcgtccggcgagcgtgactggaacgcgcgggtatacgcgcaggactggggagaggaggtgcggcacggattcagggggtcggacctgtccaagcagtgcacgcacaggtacaggatctacatcgaagggcgggggtggtcggtgagcgagaagtacatcctggcgtgcgagtcggtggcgctcatggtgcggccgaggttccacgacttcttctcgcgggggctgtcgccgctgcgccactactggcccgtccgcggcgaccgcggcatgtgccggtccatcaagcacgccgtggactgggggaacgctcacgcggacagggcgcaggagatggcagggaacgcgagcaggttcatccgggaggagctgacgatggaccgcgtctacgactacatgttccacctcctgacagagtacgccaggctgctgcggtacaggcccgcggtgccgcgcggcgccgcggaggtcaccgtcgagtccatgatccgggggaggcgggggctggagaggcagttcatggtggacacgcttgcggccagtgcgagtggcgatggcccctgcaggctgaagccggcttacagtcccgaggaactgcaggcgctgcggagagcgagagcggatgcggtgaggcaagtggaggcgtgggagatctgacgttgacacgcgtagagactagaggaatttggacaaaggaatatacggcgaatttgtatccgaattatttatttttgacacttttgtgtccttggctatggttgttaaatcaaaaggcctgaacttgactgttgacactttgtttgcttccttggctccggtctcccactttcttccttcatccttgtttgcttcggtctttaaggctccttttgttttggatcaggttaacagtgtcactgtgtcagcgcttatagatatggat

SEQ ID NO: 3311 - DNA, 2094 bp, Zea Mays
ctttaatttgcaccatcccccccaaatctccatctccatctccactccacccttacccggctgcctgcccctcccctctctcctctctctctctctctcccatccaggcctcctctcccctctctgcctgtcgcccatgaggatcaggcggcggccgcagcccgccgcctcagatctggccgcatccaccgcgccgcagatcccgccgccgaatgccgcgaggaaccgcgggtggctgctggcaggcgagggcgagggcgaggacgaggatcgcgaggccaggatgctgcgtgcgagcgcggatctcgcgcacgaatctggagccagcaggcgcatggcattgccgcaggacgacaatgcggcggccgtgctggtggtggatcgcggcggcaggagcttgggcgcaccgcgtggcgctgctgatggccgcatgaggtacgcggattatatataagcagctgcacacggaaagaagagagaatggtagcaactttgctaattctgacggcacgataggttctcctgcttttgatctccttcctcagtacctgctcagctgtactgttccatagtgtgcgatgcgatgccatgccatgccagcttgacccatgaggtagggagggagggagtccatgggtcgatccagttttattttagtgcaccacctgtcctccccactgcagtcagccagtgtcagacaaaacacccctgtagctgtagtgtagtgtagtgtagtgtgggcacgtcctcccatggccatgaccatgaccatgatccatccggcgcatgacatgattcctgctctgctcccctagcccatgcccatgcccccatgccgacggccggccgacccctcttggctttggtcgctgctcgacactttgggggtgctgcctacttgttgtcgatcacagcgaagcctattagcagcgcctagcggtcttggttgcacttgcattgcacccacgcgtgatctcgcccgcgcggcacacgttaccaccaccaccaccagaactgaactattcattcatatcaataacattacttacctacgtcttgtctacgtggctcgcattggaatcaccactcccgtacgggcggacatgtgtttgcgctctgcagaatcagtgcggtgaacggctacgatccggcggcggcggcggtgaaggcggaggcggaggcacgacgggagacgagcaacggctccgtgcatcccgccgcgccggcgccggcgccgcccgtggccgtggcggcggcctccaaggacgaggggaggaagcagcagcaggccgccggcaagaagcggcgcggccccgcggtgctgctggaggggtcgcggtgcagccgcgtgaacgggcgcgggtggcggtgcagccagccgacgctggtcggctactcgctctgcgagcaccacctcggcaagggccgcacgcggaccgcggcgggtgccgccttggcccgtggcgccgccgccggcggcgtgggccggctcgggcgcaccgagcacggggccgccgccgccatcgccacggcgccgccgctgcccaaggccgagggccccagcctgccgggctgctagcaggctagctaggcgggtcgggactgcggaactctttcgtatcgtccgatcggtgtgggtggcggtggtggtcgtcgctcgtcgggcgatgtgaaccctcgcccgccgcgtttcgtgggagtttggatgtcggcggtggcatggcatggacgcacagtgaagcgacccggcgttcgtggcgtggtgggtctctcgctctctgtctctgctgccgaccgacgccgtgccagaattattgcggctatatatatatacaatacacatatgcgagttagttccgcgcaacttgtatcattcatcggtgcaacttggggggtgtaaaaaattgctggaggcggcgagcatgaaaaaatgtagagaaacggagaactgcaagctgggattcatgcaatcaatcaatcaataacgctacgggcgggcacaccttttcgaattccccccacatgttccctcttttgtttttttgtttcctcatcaaaactactgtattttgctaacccggtacagtggcagca

SEQ ID NO: 3312 - DNA, 2316 bp, Zea Mays
cgcaacgcggaatctgaattttccccgcgggcacgttgactctagcggcgctggcgagtccaaccctgttcgcaaaaggcgtcccaaaacaaatgccactatgcggctgctagagcgtcgtctcctttcctcccccaatccgccctttggcttcgctggcggcggcggcggctggggaaggcaggaatcccggcctttgcttgcgcgccactccgggcaccggctgcagctcgcagctgaacaaaatggcctccaatggtaatggaaatctcaaagctgatattcaacaagtagagtcaacagcttcagataatgttcaaggcgcaacaggcgtcaacactcttgccactcagggtgtttcacgaaatgaaaagcggtggagcgggtttagggatttctggaatcgcctttgtactggccccaagttaaagaagcttggtccctccacttcgttcaagtttcaacagatcgcacttcaacgtgatgagttctcacgttcgatccattcggacaaccatgttagccacgagcatttccagtttatccggaagattaattgggaacaactgtgggtgatggctaggaactggataaaagagcctatgaatatggccctttttgtttggattgcttgtgttgctgtatccggtgcaattctcttccttgttatgactggaatgctgaatcgtgttttgcctagcaaatcaaaaagagacacctggtttgaagtgaacaaccagatcctgaacgcattattcacgctcatgtgcctctatcaacatcctcaacggatctacaactttgtgcttctttgtcgatgggagcagcaggacatcttaaggcttaggaagatatattgcaaaaatggaacatataaacctaacgagtggatgcacatgatggtggttgtgatcctccttaatctgaactgctttgctcagtatgccctgtgtggtctaaacgtagggtaccgcagatctgaacgccccgctatcggtgttggtctcactatttctgttgcaattggggctgcagcattcgctggtctgtacaatatcatcagccctcttgggaaggattacgacacagaacatccagatatcgaccaagaagcacagatccatgccacctcaaccgagagcggcagaccaacttcacggcttcagtcattcgagaggagatactctttcatccagagcgacgaacgccgttttgtggagagaaggcctcagtgggttggcgggctaatggatttctgggaccagatatccattgcgtatttgtcacttttctgcagctgctgtgtctttggctggaacatgcagaggcttgggttcggtaacatgtacgtccacatcgcaacgtttctgctcttctgcctggcgccattcttcatcttcgtcctcgcagccggcaacgttgacaacggatccgttcaggtggcgttggtgctcaccggacttttcctgtgctttttcggtctactgtatggcggcttctggaggatccagatgaggaagagattcaacctccccgaaaacagcttctgctgccacaacccggacgcgtcggactgtttccactggttattctgctgctcgtgctcgcttgcccaggaagtcagaactgcggattactacgatatcacagaggacaggtcgcacacagggcaggtagttggtgaaagccaccgcataatgtccccgttgcagcgcgaagacggtctgcctcttttcaagtcgagcccaagctcgccgtacaggagcggcaacgttagtccgtcgatcttcatcctggagagcccgtcaccgtcggccccacgtaggtcgtctggttcgtcgcctcagggtggtggttcaccgacgatgggccatagggcgatgaaggcgccagttccatctgttcttcaaagagagagtggaccagatcatgcacaggggtgatccaatgaagcagctaccgcttgccagcccaatgagatatgtatatttttgtaaaggagatacatcgtcggcagatattttttttctgtgctgtctttcttgttcgtaagaaatgtatagaccttcgagttctgttgtgcatttgagctccgtcatgcatggttgcttcttatgtgaggcacgattattgaagagacctctcgtttgctgctcggtatctgccgatgtgttcatgataacagaagtgtgctggtgctgatagtcttactcaacaaatagttctagttcctgactcagtagtctaggataatgcacaggagattgccaggatatatctctgacgagttcgacatcgccacccacccaagggaag

SEQ ID NO: 3313 - DNA, 7655 bp, Zea Mays
cctgaccgcccacccctgatcggggcccctcgccggagctctccacctgccagcgccggtgctcgagcgtgcgggcgagagagagagatagacggcgctcactcgttctgggggattttcccttcgagacagggccaaagggtaccggttaccaaacgaaaccgctccgtcctgtccgtcgcccctcggtccctctcccttcggttcgaccaaagtcaccaaacgtatcgcaaacaagctcctcgacccgagttcgagctcaactcggcggagatctccactcttcagcaaggcgcgggatgccggcgatggcaccggaggacgatgaagcactgtacgagatccaccggcacgcgtcgggatcccaccaagaagaataccaaggtgctgcgacaagttgtggtagctcagatgctggaggaggaggtgtcctctcctatctctccttgcaaggtgtgagcaaacttaaggaaaagtgggataggtacagggtgctggggaagagtaggcagaggaagaagggggatggcgtcgcactgtttgtctcaccaaatgcagaatatgtgtctgtaactgttgggaatcacatcatcatcttgaggaaagccgatggctatgcatcaccttgtggtgtttacacaaataatgaccgaatagcatttttcacaaatggggcttggctggaggctcaaggcgtttttggtgtggtggatgacctaagcacactttacttgatcaaagaaaatggggagttactagcaaggaggacatgtgatcagttgaagctatcttcttccattattgatctggttttgcaggatggtacaagcttacttaggccaggtttctacatttttacaagtgactgcttggttcatagatttgattacactgaagaacctgaggcatgtttatgcgaagttcccatatcaactaaagatgcaatgtcagctaggactatccagttacctcgaagtttatcgtgcattgattaccatcaacgtcactcgctatttgtcctagttggagattccaatgtttcatttagctccaatagttattctggaacctattttatgtatctattacacttcaacaaaaatctggaacttagtctttcatttaaaagcatgcagttggaaggggtattttgtcccctgaaggatcaaagaacctttgtttcatccccgaaaatcaggatctcgcctcagggaaagtatattgctacgttggatttgactggttttgtaaactttttttcacttgatggtgacttgcgcactgttccacttcaaactcttggaaaggctagacacctaattgatgttaaggacatcagttggtggacagataatgttcttatgttggtaagaaaagatggtagcattagcatgtacagcatcactgaagacaagatagtttccaatgatgacccggttttatctacaccaatattggagaaggcaaaggctactgaaggacatgcttttgttttgcaatctaggagatatggaacaaacactccagttaataagcggatggatagtgactcggaaccttgtctgctgagtggttctggggagcaccaacaaacagaaggggatgaaatgtcctggagtctgatatcattctccaaagttacagtagcagaaatgtactctgttctgataagagagaaacgatacaaggacgctttagattttgcttctagatacaatctagataaggatgaagttcttaaagcatgctggttgcactctgatgccaatactcatgagatagactcgtacttagcaaaaattaaagaccaagtatttgtattatcagaatgtgtaaacaaagttgggcctacagaagcagatttaagggctctactttcttttggactttgtataactgattgttacagattttctgagttagataacagcagtaagggctcaacatgggacagtcgcaccattaggcttcgtttattgcggcacatagacatgttagagacattcttgggcattaatatgggaaggtatgcagcaggagaatatagcaaattccgttcaatgccattggtggaaacagccatagcattagccgaaagtggcaaaattggggctttaaatcttatattcaagcgtcatccatatactgtctcttcagatattttacgtgttttgtctgctatcccagaaacccttgctgttcagacttatagtcagttgctgccagggaaatcccttcccagtgttgtcatattaagagctggtgattgggttgaatgtgaacagatggcttcatatataaacaattgccctgccgagttggacaaggtcgaagagatcaaaacggaaatacttgtaaagcactcaaaaggcttttcatggccttcagttgctgaactttgtgagtggtataagaacagagcaagggacattgactgcttaagtggacagctggaaaactctctggccatgatagagcttgcatgtcagaagggcattgtagagttgcagccattctttgatgatattaaatgcctctaccaggttgtatattctaatgaattgaatgagtttacaatgaatcttttgacatgggaagatctgcctgattatgaaaagttcaaaatcattctcaaaggagtcaaagaagatacagttgttcaacggctagaagaaaatgctatccgttttatgaagaaattatatgaacacaaacaagaatcctaccttgttagttggctgaaagaggtagctgctaaaaatgagcttttgatttgcttagctgtcattgaaaatggttgtggggaatcaccaatatatggtctcttcaaggatcttgctgagatgatagaaacctctgttcactgcatttatatgtgcagtgcaactaaccagtggaataccatgtcatcaatattatcaaagtcactctataaaacaaagagggagaaatcgttagtggctagtgaagaagactgcaatctgaaagatgctaagcatgctcttggttcttctatggtttcttatgaggagatgcaatgtgtctgtgctgatatcttatctggtctgggcaatgctccagaagatttttatcactatgattcagtacctgacaaacctaatgatgtcaaatatcttgatatattggagaagaggctaaaagttgctgaaggccatgtagaagtaggacggctctttgcttattatcagacgtcaacctgttcgatcagacaatgagtgggctaacatgtggcgtgatttaaaactcttccaagaaaaggcatttccttttcttgattcagaatatatgctggccgaatttatcagagggctattgaaagctggtaaattttcgctagccaggaattatcttggaggaaccagtgcagtttctttatccacagagaaggctgaaaatcttgtgatacaagctgcaagggagtatttcttctcggcttcaactttatctgggaatgaaatttggaaagccagggaatgcctaaatttgttacctaatagcaaaaatgttcaagcagaaactgatataattgatgctcttactgttagacttccttatctaggggtgactatccttcctcttcagttcaggcaggtaaaggatcctatggatatcatccgcatggtgataacatgtcaagcaggtgcataccttcattttgaagagatcattgatgtcgctaaacttctgggattaagaagtgaagaggaagtagcggatgtggaggaggctattgccagagaagctgtggtaaatggtgatcttcaacttgcccttgatatctgtttaaatttaacaaaaaagagtcatggtgcagtgtgggatttatgtgctgcaattgctagaggccctccacttgacaatttggatactggtacccgtgaaaagctattgggtttcgctctcagccattgtgatgacgattctgttggggaattgttgaatgcttggaaggagcttcatgctcagggtacttttgagaaattaatgattacaaccgcaacaaatcctcccaatttcttgattgatggatcttcaatcacaccacttcctgtacaaagtgtgcaagacatacttgacctgagagatgacaatggccatgatagacgtagcgaccttgtgggaattgttaaagacatgctgtcaaaagtttgcttggacttttctaatggagacacacataattgggagtctatgttggaagaaaaccggaaattgttgtgctttggagcactggtattaccatggcttttgaaattgttcagtaatgaagcatgtgatggtgaaataatggatcatctcactaggagatgtcgattttcaacaaaagtaaaagcagcaaccagtatcatatattggttagttataaatggtttggcccccaatgataatataatcatgattcttgcaaagtctataatggagcctcccattgatgaagagtttgatgtacttggctgctcggttcttttgaatctcatggaccctttcaatggagtgaaaataatagaggaagagctaaaaagacgagaatcttatcaagaaattagcagcataatgagtgtaggaatgttatatagttccctcaataattctaagaaagagtgctccactcctgaacagaggagaaacctgttgcttcacaaatttcatgagaagttcacctcagccgataccgatgatttagaccaggttgatatggcaaatacaaccttctggagagaatggaaatcaaagttagaagaggataaacaactggctgatcaagcgcggatgctcaagcagatattacctgatatagacacatctcgattcttgtctggtgatgttaattatatcaaaatagtagtttactcctttgttaattctgtaaagatggagaaaaaacacatactcaaggaagcagtgcggatagctgaggcatatgggttgcaacgaactgaggtgcttttacgatttctcgcctgcagtcttgtgtctgaatactgggataacaatgatattctgaacgaaatttctgaattccgggaggatattgtcagctcagctaagggtgtgatcgatatgatatattcagatgtctatctggagatagatgggtataataaacaacgtctttcttacatttacggcattctttcagcatgtcattcatatctgaagaggaccaatgagatagaattgagatacccagtgcatgtgcatacccataagcttgaaccatttcagtactataaggtacttgaggaagagtgcaagaaagtctgcttcattgatggcttgaactttaaaaacattgctggactggataatctgaactttgagcatttcaatgacgaagtatgcaagaatatccatgcctccaccgtcactgctatagccgatatggtacagtctcttgtgagtatgtatgttgatgtactggccaagggactcatatcacaacaaggtgtttacaagcactatgttctggggttgctggcatcacttgaaggccgcagtgaagcacaatcgaacaacacagattatgaaaagttgcaggcttccctatgcgaatttgagttgaactatgatagttgcagggagtacatccaagctcttccagccacagatatttcatatattgtaagaaggtattgcaccctttgctttccatctaacttagcacgaagccatccacaggaaccttcatggaggaaacctcttgccacgctactagaattttggtctaaagttgttgatgacataccgggggattcaattgatgcttgctcatatggaagaacagactacttaaattcaaataggttatctctgtgcatgagagctttcaggcagctattaataattgatgagatagcactgcaccaaggttgggatgccatttccatgtatgtaaaagattgccttagaaatggaaagatgatggaaacaccatgcttttgtcgagctatgattctatcaggctgcagttttgaatctgtagttgaagtatactttggaggacaaggacagttagggagtgagaatgcagatccaagcaattatttggacctcttagaactttataatgctgctacagaaaagtgtttgtcggatttgagtgaggaatcttgcgaatatcgaatattgcttcataatttgctgtcatctttgagccggtcaacgggaaaacatgctggtgctctagaaatggtcagatctggtgtttgggggaagttaatccgctattcggaagacatgcagctagagagccaattacgagtctatgcactacagctgatgcaatgtatcacaggaagaaaccttaaatctcttccaaatgaaatggtgtgtcaggttgagccatgggaatcatggtatgagcatggagcgggtgctgccatagctgatgagagtatcaactcctctagcagcatcacagggactcttgtcgcacttagatctactcagatggtcgctgcagttctgcctgacgctaatatcactccagaaaacctagcaactcttgactctgcagtatcttgttttttaaaattgtcagaacgtgcttctggtgtgagcgttgctgtttttgaagcagtgctagaagagtgggagcaattgttctcccccaaagaagagcatgttgcacctcatgaatcaccaaaagaaacaagtgactggagtgatggatgggatgatggctgggaggcgctaccggaagagttggagagtccaaagaataaacaagagggtgtgttgttatctgtgcatcccctccacagttgctggatggagattatcagaaaacgtgttgaacttggtgagctgcacaaggtacttgaacttctagaccgagcatctttgaaacacagcgtgttcctagaggaagaagaagcacacagcttggttgaacttgtatctgctctggactgcttcatggcccttaaaactgtgttgctactcccatatgaatctctgagactgcagtgcctgcagatggtggaggtgaaaatgagggaaggaatcgtgtccacctcatcaaatgctgatgatcaggagctccttgccttggttctttcctctggaactatgcagaagatcatcacagaagaggcatactctaaatttttctcttacatatgccatcttgtcgggcaccttgcaaggtcattccagactgatctcctcgtacaatggaacgaagcaacatctaagatcaacagatctttactgttcgctagagttctgtttccatgttttgtatctgaactggtcctcggagggcagtatcttctggctgggttcgtcatctcgagatggatgcacacacatccatctctgggcctgatggatatcaccgagaccagtgtgcgatgcttccttcaaggccaggttgcccaacttgatgaggtgggagggagcgatgctgctctcactgacggtgaagtttgtgtaaggcacacaatctccaccctacagccgaaacttgtttctcttctgcagtctgcattagctctttcgaacaaagagttgtaggcaaagtcctgtgtagttaacttttacactcttgctgtactaccggtgtacctgtaacataaaatgtttttttagataatggtaaaagtgaatggtggaagatttcatattgttat

SEQ ID NO: 3314 - DNA, 1963 bp, Zea Mays
gcccaaaactgaacccacaacccgaaaccagcaggcaacaaagcaaccagaggcagagcgttcttcttccccgacggcccgggccgacggctcgactccactagtcgctggaaccctctgcaacaaagccgcctccacctgaccacctcccttgagctcttccccttcctcgtgggttgtgcgagccctctaccggcgcgcagtacaggtaccaacactcggaattattctccgtcttcttccttgagccgcgccgcccaccgctccacctcgccttctcctaatttgaatcggagtcgtacccgccgccgccctccacacgtagcgactcgtctcgttcatctttccctgtttgattctgtgggctgattgggtgatcaaacccgcaagatttgggtttgtgatttaggagcaggaggcggtggcaatatggaatataaggcgagatctactggaacttcaggaacttcgtctaaaagtttccgtgatctgtacaatatgaagtactcgagctacttaaacgacgaaccaatgccggatgctacatcggaaaaggagcagggaaatgagtatttcaaacagaagaagttcactgatgctattgaatgctactccagaagtattgggctgtctcctacagcagtcacatttgcaaatagagctatggcatatcttaaactaagaagattcaaggaggcagaggacgattgcactgaagctctgaatctggatgatcgctatattaaagcatactcacgccgaattactgcacgaaaagaacttgggaagcttaaggaggcaatggatgatgctgaatttgctatcagtcttgatccaaacaattcagagctaaggaagcagtattctgagataaaagctttgcacatggagaaaatggctaaaaaggttccagtgccagctaaacgtgcagtttctggaattgataaaactgcagatgtcacttctcacccaccgactatctcccagaaggacactattatggaagttgatctgcctgttagagatgcaatgaagatcaaagagagtgcaagcgtcaagtctaacggaggacctggagtaatcatcaatggcaataacgtgcagctccaaggtcgagatgccaaccagaagactgggccagaagtttcagtccaagatcttgcagctcgtgctgcttcacggtatatggccggcactgtgaaaagcattaagacacccaaaacagcttatgactttgaggtttcttggagagctctttctgatgacactgcccagcaaatacagttactaaagtcgattccaccagcaagcctaccagagattttcaagaacgcactttctgcaccttttcttattgacatcgtgaagtgtgcagcctcaattttccgggatgcggaggcattagctgtcagtattttggataatttggctcgagttccacgcttcgacttgataatcatgtgcctttcatccatgcacaaatttgaactgaggaagatatgggatcaagtattccttgctgaaaaagcgctggctgatgatcagatggaagctctgaggcagctgcgaggcagatacattccgggaggatggcaggatagcatgctcacttcgagttaaatcaatcaatcaaatgacgacgatgtaaagcaggattgttacaaaaaccttttgctggcttcgcaactgatgtctctgcatccatctgttctagaatcaggagtgcctgtcgattgttaagcccactggtctggatgtagcgaacggttgaagcatccagtgtaggaacatgtgtcgactgcaaatggttgagatttgttctgttgtgcttgccgctactgtaacctcgctttgttgtgcgccggattcctgacgctggcacatcgtacgcttgtcggcgacaactttatggaacacacacattttgatgatttaaagaattctctataaaatgtcttctaat

SEQ ID NO: 3315 - DNA, 1966 bp, Zea Mays
gcccaaaactgaacccacaacccgaaaccagcaggcaacaaagcaaccagaggcagagcgttcttcttccccgacggcccgggccgacggctcgactccactagtcgctggaaccctctgcaacaaagccgcctccacctgaccacctcccttgagctcttccccttcctcgtgggttgtgcgagccctctaccggcgcgcagtacaggtaccaacactcggaattattctccgtcttcttccttgagccgcgccgcccaccgctccacctcgccttctcctaatttgaatcggagtcgtacccgccgccgccctccacacgtagcgactcgtctcgttcatctttccctgtttgattctgtgggctgattgggtgatcaaacccgcaagatttgggtttgtgatttaggagcaggaggcggtggcaatatggaatataaggcgagatctactggaacttcaggaacttcgtctaaaagtttccgtgatctgtacaatatgaagtactcgagctacttaaacgacgaaccaatgccggatgctacatcggaaaaggagcagggaaatgagtatttcaaacagaagaagttcactgatgctattgaatgctactccagaagtattgggctgtctcctacagcagtcacatttgcaaatagagctatggcatatcttaaactaagaagattcaaggaggcagaggacgattgcactgaagctctgaatctggatgatcgctatattaaagcatactcacgccgaattactgcacgaaaagaacttgggaagcttaaggaggcaatggatgatgctgaatttgctatcagtcttgatccaaacaattcagagctaaggaagcagtattctgagataaaagctttgcacatggagaaaatggctaaaaaggttccagtgccagctaaacgtgcagtttctggaattgataaaactgcagatgtcacttctcacccaccgactatctcccagaaggacactattatggaagttgatctgcctgttagagatgcaatgaagatcaaagagagtgcaagcgtcaagtctaacggaggacctggagtaatcatcaatggcaataacgtgcagcagctccaaggtcgagatgccaaccagaagactgggccagaagtttcagtccaagatcttgcagctcgtgctgcttcacggtatatggccggcactgtgaaaagcattaagacacccaaaacagcttatgactttgaggtttcttggagagctctttctgatgacactgcccagcaaatacagttactaaagtcgattccaccagcaagcctaccagagattttcaagaacgcactttctgcaccttttcttattgacatcgtgaagtgtgcagcctcaattttccgggatgcggaggcattagctgtcagtattttggataatttggctcgagttccacgcttcgacttgataatcatgtgcctttcatccatgcacaaatttgaactgaggaagatatgggatcaagtattccttgctgaaaaagcgctggctgatgatcagatggaagctctgaggcagctgcgaggcagatacattccgggaggatggcaggatagcatgctcacttcgagttaaatcaatcaatcaaatgacgacgatgtaaagcaggattgttacaaaaaccttttgctggcttcgcaactgatgtctctgcatccatctgttctagaatcaggagtgcctgtcgattgttaagcccactggtctggatgtagcgaacggttgaagcatccagtgtaggaacatgtgtcgactgcaaatggttgagatttgttctgttgtgcttgccgctactgtaacctcgctttgttgtgcgccggattcctgacgctggcacatcgtacgcttgtcggcgacaactttatggaacacacacattttgatgatttaaagaattctctataaaatgtcttctaat

SEQ ID NO: 3316 - DNA, 1210 bp, Zea Mays
caacctccgcgcagtcgtcgtccacacttgcccgcctggataaggatacgaagtccaaatcctcatccgaccggttccctacttccctcaaaccacgtcctctgcaacgagcgcgccctacgcgacggcgttccctcggctacctctacctcctggacatgccaccctcctcccggcctccttcgcctcaaccctaaccccgcaccttcgaacccattgctgctcccctctctccccggctctaatccgctcctaacttccgccttgtttgctgcaaggaggcgtgcgcgacctccagttccaatctgagcgactttggtggcatggacttcctgttcaccatcgccggcttcctcaccatcatcagctttggtggcggacatgagaggagagaagaatccttcgaggatctgaagaaaaggagaaagaactccatgctctgaagtgcctcgcggttgagtcagaacaaggcacagatgggtgcgacagagctgtgggatctcttggcctccggctcagagcaattcgtggagatgtacagggtgtatcaacacctcaggctgaagaactggtttgtaaggtcaggactgcagtacaggcagactttgttgctcactgtcatcgtccgacactagtgcactcgtagttcgtggaggttgtggctccaaaagggaaagcattcggcaccaggtgtgcccgcatgaaggtttggtctgaactattatgtgcgctttgggactcttcaagtgtggccaagatgttacttcttaccattagcaccaagagctacgagctagaatccttggattgtttggagcagatgattgttcatgagaggacgatcacaagatggataccacaaccgtgtcgtgagcaacaagacaaaccatgcagagaagaaaccaaaagggacatgcaaagacaaaaatcctgcagagaagtattaagcaacgaacagagcatacaagtgtgggggtggtgtagtgtttatctattggacgtagtgcagagctttacagttatttctagcttacttatctacaaactgaaatcttaactaaagagcttcctatttctgtatagtcatgttgatgaacgtgaataatgcaattctatggtaccaatttgttgtgattctcattgacttttctacatatctttgataacatcatcttatgtaatgcctacttgaaagggaaatggacttaat

SEQ ID NO: 3317 - DNA, 3162 bp, Zea Mays
cgccggtggcggagacaccgatgccggacgaccttgctgtgactgactgactgaccgtgattgatgttttcttctctcccgtttcggccgccctcccgcgacccgaccccgcgtggccgcgtgcgtgcgtacaccagcgcttacttttactcgagtgacctactggcgttcgctgttcccggaaatacccctccagtctcatcacagagcttgctactactccgcgctgccgtggcggaggcaagcgcggtcatctgcccacttcaccagtcctcgcgctgtcgtgccgtctccggcttctcgttcttgctcttgccccggcaccttcggtttccaccaccaccgcgcgcgccgcggccgacctgccctgccccaactgtgtgtgctctttaaagccctcgcatcgccatttgcagaattgcccagtgctctaaccagatctgctccgctccgctccgggctgactaaccgagcccgccgtctctgtagctagctggtcgtccgtcgtcgccaccaacaggctaaccaccaaccgcccaaacgtctccaccgcgcgggcggagcgcagctgcccgccccggattaacctccctctcgccctccccacgcctccgagatcgcgagcgagaggacgccacgctgacatggcggcggcgaccgtcgctgccgcgggcacggcggcgccggcggcggccatgcacgccggcatccggcgctcgcgctccgagccgcacctccgctgcccgcgccgcgcgggcgccgcgctcaccaccagccgctccatcggcgtgttcccgttccagctcggcgcggcgccgctgcgcccgccgccgctgcccgacggcggcgccgacggctcccggctgctcaccgtcgccgacgacgacccgccggaggagcctgggccggaaatgccgcccgcccggaggcccgaggcgcactggctcggccgcctcctcgagctccgctcccgcttccacgacccgaccaagcgcgacgtactcgacgacgacgacgacgacctctaccgcctcgacgctgaccaccacgacggcgggtgcggcgtgagctacgacgacgaggaggaggatgccaggtgggaccgccactccttcgccaagctgctggcaagggccccgctcggagacgcgcggctgttcgcgcagctggccttcctctgcaacatggcttacgtcatccccgagatcaagggaaggagatcctcgcgactacaggctgggactggcctggtggtccatggggacacccactggcactcatattttttgtaagaatttttagtggggcttacccggaggaaccgccattaatggctgacaccttggctttaaaactcgccttgcagcagccccattgctgctcgctcgaaacgatggcctccgatctgtcctgtcgcacacatattaggtgcaacacccgtgtaattgaccgagccccaccaagaacaacttgcgcgcccaatgtctcctactattaatacttgtcgaggagctgaagaagcactacgggttgcggttcgtgacgtcgtctctggagaagaaggcggaggccggcatcataagcgccaagctggacgcggactccacgcggccgcgcaccgcgccggcgtacgaggtggcctccggcccgcagccgcgccggcccatacgaccgcacctggcctacgaggtggccgcgtcggccgcgaactacgtccgcgcgcgcgcccgcggcctgctctcgttcggaacgccgcaggcgcagctgcaggccggccacggcaggctgtacaactcgggcgtggccgcgtacatggccgcgtcgacggtgacggcggtggtggccgccgaggacgaggcgcgccaggaggcggcgcgcgacctgcgctcgccgctgtcgtcgccgtgcgagtggttcgtgtgcgacgaggcggacgcgcggacgcggtgcctcgtcatccagggctccgactcgctggcgtcgtggcaggccaacctcctgttcgagcccaccgagttcgagggcacgggcgtgctggtgcaccggggcatctacgaggcggccaagggcatctacgagcaggtggtgccggaggtcgaggcgcacctgcggagggcgcgcgcggggcgcgcgccgcggctgcggctcacgggccactcgctcggcggcagcctcgcggtgctggtcagcctgatgctgctggcgcgcggcgtggtgacgcccgaggcgctgcacccggtggtcaccttcggggcgccgtccgtgttctgcggcgggaaccgcgtcctggaggcgctgggcgtcggcgaggcgcacgtccggtccgtggccatgcaccgtgacatcgtgcccagggccttctcgtgccgctacccgggccaggccatcgcgctgctcaagcgcctcaacggcgtgctccgcgcccacccgtgcctcaacacgcacaggtcgctgtacatgcccatgggcgccacgtacatccttcagcccgacagcagcgtgtcgccgcgccacccgttcctccccgagggcgcggcgctgttccgcctggactcggagcgctcgccgacggccctggtagccagcgcgctgcgcgcgttcctctactcgccgcacccgctcgagacactgagcgacctgtcggcctacggcgcggggggcgccatactccgggaccacgagtccagcaactacttcagggctctcagtgcgctggccagggcgccaccgcggcgccggaagcaaccggagatcgtgtggcagttgcccggcgtcgagcggctgcagcagtattggtggccggggatcgccggcaccgtcatccccgcaccggtggccgtcctcagcaacaaggagctggtgtccgaggcataggacttcacgctgcgttccttgggtttgctcgcttgagcaatgtaacattatttggttctttggttggttccgcacgaggtacatagagaatgcacagcttcttttggtgtttgcgttcgtgtaaaaactgtaataatcatgcatagcgtaggacggtaggagcgtgtctggtttggtgtcctgatccgcggctgctcaataagacaatgggctttgtcttgggttcctgcgaaggaacggatgagttaacatgtaaacttgtttcaatgaagccttagaattcttaac

SEQ ID NO: 3318 - DNA, 2817 bp, Zea Mays
gtcagtaactgtggagagcacgagaaagtggggcatctactttttttagactactgctctcggcctcctctccgctccattttcgcaattccttcgagctccgctccgaccacgtcagccttcaccttgccgtctccgttacgcgccgcgagcccgcgagcgtttggggagttttggagcggaggaggcaagggaggacggacagggaagtttggttgtggaaatggatgtggtggaatcctcgccgtcgtcgtcgccgatatcgtctccggccgggtcttcggagtccatagacctcaacttcctgccgttcctcaagagggagcccaagtcggagcccgcgtcaccagagctcgggcccctgccgctgcctgcgcccccaacccagacgccccagcagcagcatgcagcggctccggctcctgaggccacggcgcctctgtcgccagcgactcctgacctctcgtccgctccggtgatggcgccgctgcagtcgctgccgcctaacctggacgaggacgcgctccttcgggagtactaccgcctcgcgggcctctacctctcgtctgcgaggtccggggcgatcatcccagcgctagctccggaggcggccgcaccggcggtggtgcagtcggggtccgggtctgtcgtgaagaagcgccggccgcgttcgtcggacctcgtgcgggtctcctcgctcggcgtgcaggaccagatctacttccgcgacctcgtgcgcagggcgcgcatcactttcgaatgcctccgcgggcttctactcagggacgacgagcgcgccgagtccctcggccttgcggccgtcgccgggttcggcgttgccagggaccggcgccgcgtccgcgcggacctgcgtgccgcagcgctcatgggggaccacgacctctggctcaatcgcgaccgccgcatcgtcgggccgatgcccgggatctcggtgggtgacgctttcttcttccgcatggagctttgcgtgcttggactccatggccaggtgcaggccggaattgattatgtcagtgcagggaggtctgcatctggggagcctatagccacatctataattgtatctggtgggtatgaggatgatgatgatcacggcgatgtacttgtgtacactgggcatggcggccgtgatcccaacctccacaagcattgcgtcgatcagaagctggagggcggcaatcttgccctcgagcgcagcatggcttatggtattgagattcgtgtaatccgtgctgtcaagtcaagacgaagccctgttggtaaggtttacttctacgatggcctctacaaggttgttgactactggctcgaccgtgggaaatctgggtttggtgtttataagtatagactgctgcggattgagggccaagaacccatgggtagtgtgaattatcgagtagctgaacagcttaaggtggatgtgtttgctataaggccaacagggtatttgagctttgatatctccatgggccgtgataccttgtcagttgcactcttcaatgatgttgatgatgatcaggacccactcttattcgaatatctggcacgtccaatatttcctacctctgctgtccaggggaagtttgctgaaggtggtggtggtggttgtgattgtgctgagatttgctcaattggatgtaactgtgcagggaggaatggtggcgagtttgcatatgataggactggaaccctgctacgaggcaagccactggtatatgagtgtgggccatactgcagatgcccacctagttgccccaacagggttagtcagaaggggcttcaacataggcttgaggtattccggtcaagggagactgggtggggagttcggtctttggatctcattaaggctggcacattcatttgtgagttcagcgggattatccttactcaccagcagtcagaggttgtggcagcaaacggcgattgcttggtgcgtccaagtaggtttcctccaaggtggttggattggggtgatatatctgatgtctaccctgattatgtggcgccagaccatccttctattcctgagttaaaatttgcaattgatgtgtcaagggcaaggaatgtggcatgctatttcagccacagttgcagtccaaacgtgtttgtccagtttgtgctgtttgatcattacaatgtgtcttacccccacctcatgatctttgccatggaaaacattccaccgttgagggagctaagcattgactatgggatggttgacgaatggattggacagttaactatgtagctggagtatctatttagaaggcagtaatctccttcttttacctttatttttgaagttttcattatgcttcactttgggatcatcaagccaactgctggctaaaattcctcagctgcagtggaggtttccaactagcataatgttcctctggcgttgaaagaggcttgcataaggtgaccaagctatcatcaacagaacatcagccgttcattgtatatgttgcctgataacctaggtgccttagccaattttctagatgatctcgcttttgaagtataatgtgtgctgctgtaggaagcttgtttggcgtggctggcgctgagtttcagccttaaccttcgtgttatgagttgtcgctgttggaactcattttctgtacatatatctgtaaattatctagctggaaatgtgcccgcttctgttgggaaatgttggtccatatgtggcaaagttatttggataccttgtggaattgaagattccgcggagccaggtttgtccgtaggtcattgcattaatgattttgtgaaattatttgtggtgaa

SEQ ID NO: 3319 - DNA, 1910 bp, Zea Mays
gcatgtgcaggcgtatctggcaggtttgatctgactctggggctctcacatgccctcacttcattcatgtggctatgcggtcctattgctggcttagtggtccaaccgctggttggcctgtacagcgataggtgcacagcaagatggggaagacgcaggccatttatcctgataggatgcatgctcatctgccttgccgtcattgttgttggcttctcgtccgacatcggagctgctctaggggacacaaaggaacactgcagcctctaccacggccctcgttggcatgctgcgatcgtgtacgttctggggttttggctccttgacttctccaacaatactgtgcaacgcgtgctatgatggctgatctgtgcggtcatcatgggcctagtgcagccaactcaatcttctgttcttggatggcgctgggaaacatcctaggctattcctctggctccacaaacaactggcacaagtggtttccgttccttatgacaaacgcgtgctgtgaagcctgcgcaaacctgaaaggcgcgtttctggtggctgtggtgttcctagtcatgtgcttgactataaccctgttcttcgccaaggaagtgccctacagaggaaaccagaacctccccacaaaggcaaacggcgaggtcgagactgaaccttccggcccactcgctgtgctcaagggcttcaagaacttgcccacggggatgccgtccgtgctcctcgtaactggactcacctggctctcttggttcccgttcatcctctacgacaccgactggatgggccgtgagatctaccacggcgaccccaagggtagcaacgctcagatctcggcgttcgacgaaggcgtcagagttggctcgttcgggctgctgctcaactcgatcgttctaggattcagctcgttcctgatcgagcccatgtgccggaaggtcgggccgagggtggtgtgggtgacgagcaacttcatggtctgcgtcgccatggcggccaccgcgctgatcagcttctggtcgctcaaggactaccacggatacgtgcaggacgccatcaccgccagcacgagcatcaaggccgtctgcctcgtcctcttcgcgttcctgggtgtccctctcgccatcctgtacagcgtcccgttcgcggtgacggcgcagctggcggccacgaagggcggcgggcaggggctgtgcaccggcgtgctcaacatctccatcgtcatccctcaggtgatcatcgcgctgggcgcgggcccgtgggacgcgctgttcggcaagggcaacatcccggcgttcggcgtggcgtcggggttcgccctcatcggcggcgtcgtgggcgtgttcctgctgcccaagatctccaagcgccagttccgcgccgtcagcgcgggcggccactgatcgcggccgccgcgccggagcacggcacggcggcacagcccagccgtgctagagctgtatgttttgaaagttgaaacagaataagaagcgggcgaaacgagaaaaccatgcatgtcatgtgtgtgcttttgttgtgtgtggggtggggcaagcgaggcgaggtgtgtggaggtgaagtgaaggtgagcatatccagcaccagctggtaccaaggtcgggtctctgtgctagtgctattagctagtgtaaggagcgagtaggtcagttaaggctggtgcgtcgtgagggctgtcttgtgtgtagctacagcagacggttcatcagaaggattattcgtgcagtatatacagtacaactagacaatgatgttgatgattggtctagagctagaggcctatagccctatactactgtgtattgtccgccgttttagttttttggtcccatcccatcaatgcaaccgccttgttttgctccaattgtcccgttcctgcgcctcgcttttgc

SEQ ID NO: 3320 - DNA, 1954 bp, Zea Mays
cgagccggttggtgcatgtgcaggcgtatctggcaggtttgatctgactctggggctctcacatgccctcacttcattcatgtggctatgcggtcctattgctggcttagtggtccaaccgctggttggcctgtacagcgataggtgcacagcaagatggggaagacgcaggccatttatcctgataggatgcatgctcatctgccttgccgtcattgttgttggcttctcgtccgacatcggagctgctctaggggacacaaaggaacactgcagcctctaccacggccctcgttggcatgctgcgatcgtgtacgttctggggttttggctccttgacttctccaacaatactgtgcaaggtccagcgcgtgctatgatggctgatctgtgcggtcatcatgggcctagtgcagccaactcaatcttctgttcttggatggcgctgggaaacatcctaggctattcctctggctccacaaacaactggcacaagtggtttccgttccttatgacaaacgcgtgctgtgaagcctgcgcaaacctgaaaggcgcgtttctggtggctgtgacacgtttttatgtcttccaacaggtgttcctagtcatgtgcttgactataaccctgttcttcgccaaggaagtgccctacagaggaaaccagaacctccccacaaaggcaaacggcgaggtcgagactgaaccttccggcccactcgctgtgctcaagggcttcaagaacttgcccacggggatgccgtccgtgctcctcgtaactggactcacctggctctcttggttcccgttcatcctctacgacaccgactggatgggccgtgagatctaccacggcgaccccaagggtagcaacgctcagatctcggcgttcgacgaaggcgtcagagttggctcgttcgggctgctgctcaactcgatcgttctaggattcagctcgttcctgatcgagcccatgtgccggaaggtcgggccgagggtggtgtgggtgacgagcaacttcatggtctgcgtcgccatggcggccaccgcgctgatcagcttctggtcgctcaaggactaccacggatacgtgcaggacgccatcaccgccagcacgagcatcaaggccgtctgcctcgtcctcttcgcgttcctgggtgtccctctcgccatcctgtacagcgtcccgttcgcggtgacggcgcagctggcggccacgaagggcggcgggcaggggctgtgcaccggcgtgctcaacatctccatcgtcatccctcaggtgatcatcgcgctgggcgcgggcccgtgggacgcgctgttcggcaagggcaacatcccggcgttcggcgtggcgtcggggttcgccctcatcggcggcgtcgtgggcgtgttcctgctgcccaagatctccaagcgccagttccgcgccgtcagcgcgggcggccactgatcgcggccgccgcgccggagcacggcacggcggcacagcccagccgtgctagagctgtatgttttgaaagttgaaacagaataagaagcgggcgaaacgagaaaaccatgcatgtcatgtgtgtgcttttgttgtgtgtggggtggggcaagcgaggcgaggtgtgtggaggtgaagtgaaggtgagcatatccagcaccagctggtaccaaggtcgggtctctgtgctagtgctattagctagtgtaaggagcgagtaggtcagttaaggctggtgcgtcgtgagggctgtcttgtgtgtagctacagcagacggttcatcagaaggattattcgtgcagtatatacagtacaactagacaatgatgttgatgattggtctagagctagaggcctatagccctatactactgtgtattgtccgccgttttagttttttggtcccatcccatcaatgcaaccgccttgttttgctccaattgtcccgttcctgcgcctcgcttttgc

SEQ ID NO: 3321 - DNA, 2307 bp, Zea Mays
cgcgccacggcctttaaatgccacaccatctcccccgctccaaacacccacacccacaccacacctcacgtctcctcactacccgcgctctcaggcagcgcacctcgctcctcctcccccacagcgctttccattttcgtctatctcccgagaaccctcctgcgcctcccaaagctctcttctatcgcggccgcgcgcctgatcgacgtacgaccggtctggtacgtacgtgtgctcgcccgccatggctcgcggcgacggcgagctggagctgtccgtgggggtccgcggcaccggcggcgcggcggcggcggcggcggaccacgtggcgccgatcagcctcggcaggctcatcctcgccggcatggtcgccggcggcgtgcagtacggctgggcgctgcagctctccctcctcacgccctacgtgcagactctggggctctcacatgccctcacttcattcatgtggctatgcggtcctattgctggcttagtggtccaaccgctggttggcctgtacagcgataggtgcacagcaagatggggaagacgcaggccatttatcctgataggatgcatgctcatctgccttgccgtcattgttgttggcttctcgtccgacatcggagctgctctaggggacacaaaggaacactgcagcctctaccacggccctcgttggcatgctgcgatcgtgtacgttctggggttttggctccttgacttctccaacaatactgtgcaacgcgtgctatgatggctgatctgtgcggtcatcatgggcctagtgcagccaactcaatcttctgttcttggatggcgctgggaaacatcctaggctattcctctggctccacaaacaactggcacaagtggtttccgttccttatgacaaacgcgtgctgtgaagcctgcgcaaacctgaaaggcgcgtttctggtggctgtggtgttcctagtcatgtgcttgactataaccctgttcttcgccaaggaagtgccctacagaggaaaccagaacctccccacaaaggcaaacggcgaggtcgagactgaaccttccggcccactcgctgtgctcaagggcttcaagaacttgcccacggggatgccgtccgtgctcctcgtaactggactcacctggctctcttggttcccgttcatcctctacgacaccgactggatgggccgtgagatctaccacggcgaccccaagggtagcaacgctcagatctcggcgttcgacgaaggcgtcagagttggctcgttcgggctgctgctcaactcgatcgttctaggattcagctcgttcctgatcgagcccatgtgccggaaggtcgggccgagggtggtgtgggtgacgagcaacttcatggtctgcgtcgccatggcggccaccgcgctgatcagcttctggtcgctcaaggactaccacggatacgtgcaggacgccatcaccgccagcacgagcatcaaggccgtctgcctcgtcctcttcgcgttcctgggtgtccctctcgccatcctgtacagcgtcccgttcgcggtgacggcgcagctggcggccacgaagggcggcgggcaggggctgtgcaccggcgtgctcaacatctccatcgtcatccctcaggtgatcatcgcgctgggcgcgggcccgtgggacgcgctgttcggcaagggcaacatcccggcgttcggcgtggcgtcggggttcgccctcatcggcggcgtcgtgggcgtgttcctgctgcccaagatctccaagcgccagttccgcgccgtcagcgcgggcggccactgatcgcggccgccgcgccggagcacggcacggcggcacagcccagccgtgctagagctgtatgttttgaaagttgaaacagaataagaagcgggcgaaacgagaaaaccatgcatgtcatgtgtgtgcttttgttgtgtgtggggtggggcaagcgaggcgaggtgtgtggaggtgaagtgaaggtgagcatatccagcaccagctggtaccaaggtcgggtctctgtgctagtgctattagctagtgtaaggagcgagtaggtcagttaaggctggtgcgtcgtgagggctgtcttgtgtgtagctacagcagacggttcatcagaaggattattcgtgcagtatatacagtacaactagacaatgatgttgatgattggtctagagctagaggcctatagccctatactactgtgtattgtccgccgttttagttttttggtcccatcccatcaatgcaaccgccttgttttgctccaattgtcccgttcctgcgcctcgcttttgc

SEQ ID NO: 3322 - DNA, 2196 bp, Zea Mays
ttttaaactaccgttcagacgtgtttttaaacacacgcactgacctgcgcgcacgcacacactgaggcgagggagagagagagagagtgagtgagtgagtaatgggcggttcatcaggccttgtggactggagaggacggccggtgaacaccaagaagcatggaggagtgagagcttcaattttcattcatgcgctggtgctgctcagcaacgtagccaacattgccagtatactgaatcttgtaagctatctgcgcgaggagatgcacatggatgtcgcgagggcgacgacgatggccagcaatttctttgccgcgctgcaaatgttctccatcccagcagccttccttgctgactcctacatcaagcgtttctacactgtcctcatctttggcccaattgaaatactgggctacatcctgctcgcggtccaagcacatgtcccatccctgcacccaccaccgtgcgtccctggacaagagacaagtacgtgtgagtcggtgagcggttcgaacctgagcctgctcctcctgggtctctacctgatccccatcggcgatggggcggctcgggcatgcctcccggctctcggcggggagcagttcgacacgtcggatcccgtagagcagaggcaggagtcgagcttcttcaactggtacaccttctccgtctcgacgggtggcttcgtggggctggtcttcatcgtgtgggtggagaacagtaaaggctgggacgtaggcttcgccgtctgtgccttgtccgtgctcctcgggatgctgatatggattgctggcctcccgttatacaggaaccagctgccaactagtagccccatcacaagaatactgcaggttcttgtagctgcattcaagaaaagaaatgttgcattaccggccaaccccagtgagctaaagcaaataagtcaagacgacgccggttccctcgagattctgcatagaaccgacggatttcgctgccttgacaaagcagcggtggacaccggaaggaccggtggctggattctctgcagcataacccaggtggaggagactaagatcattctccggatggtgcccatcttcctaagtgctgtcctaggctacatcccggtgcctctcatcctcaatttcaccgtgcagcagggcaacacaatggacaccaggcttggcgcacttcacatctcacccgcgacgctattcatcatccctacgcttttccagatggtaatcctcgtcgtttacgaccggttcattgtcccgttccttagacgaataaccgggtacgtgggcggtgtcacgcaccttcagcgcatcggcatcggattcctttcaaccatagtggccaccggcgttgcagcaatagtggaggccagtaggaaaaaggtggcacgagacagtggccttgtggatgctacagctggaattccaatatctgttttctggctgaccatacagttcttcctgctaggcattgtggatgtcacctcctttgtagggcttcttgagttcttctacagtgaggcgtccacggggatgaagtctattgggagctccatcttctactgcatccttggggtgtcagcttggttggggagcctgttgattcaagtggcaaaccgagttacaagacaccgcgatggcacgggaggctggcttgatgggacgaacttgaacaaggggaaacttgatcgattctattggttgttagcagttcttgagctggtgtcgctattagtctacgtcttcttcgcctccaggtatgtttacgggaatgaccaaagggttgtggctgatgaagataataatacggctccatctgatggtaccataaatgtgatctgatcatcagcaaccatttcaaagtagatttttcgtctgattggttacccgcgccatttcatcttgaatcaccgcatgcattgactttatttgagattatgttttgttgtttgtacgaggaagccacaggctgcatgggtgcatgcaaaataagtcattttgatacaattaacctgcatccactcatacgctcaaaattatcgtatctggctggacagggcggtgctaacctgggcatggacacacggccatcgtatcagcttagcaatattaagctggccagtttcatacttcctttgttggtcacaaataagtgatgatattaacacagtattggaaaaatataactttaaccacg

SEQ ID NO: 3323 - DNA, 1064 bp, Zea Mays
ttcgtttgtcgacgcgctccgactccatgccgctgtcgccgccgccgccctcctccagcccgaggcaagcagcgatccaggagctcaggaggggtacccagctggcggagctgctcaggcagcaggtagagctcatcccggagcctaaccgccgccacgctgcagcggtcaacgtgggcgagatatccatggctatggagtcgtcgctctccatcctccagtctcagatggagcaccccttctctgagcctgaggtcatggcggctgcgctcactgcccactccgacggaggcaccagcggggaaagaaatggcggtcccgtggcccgtacaaggaaggtgagggtgcggcaccggccaggcagaggcaggcctgcagctggagatgaactgccgatgttatactacaagtgcgggtacagcgacgaccacaagtgcccagcgaagaaatacgtgcagcagcaaagcaacagctaccctccgattttcttggtcaccctgatcaacgagcacacgtgcgacgccttgttccgagacgacgagcccatcatcagctcaagcagcagtggctcgtcgcaggtcctcgacttcacgaaggcgtcgctttcttctcctctccattgatgttggcggcggcgcggctgcaggggttggaagaaatagagatgcatggaagaagacagatttcgtgttcggatgatgagtactactagctagctaagctagtcgtcttcaattcgttgcccacgatgatgtcggcagatgagctccgcgcactcagcagcagggattattatcattatacattccgagtttccaagcagcagccaggcagattctcgcggcaataattaagagttttagtagccctggcatgcatgcatgttgcatttgaagcagtttttgattaaggatttcaatgtacgtactagggatggcaatcgggcgggtagtatatggatatatagttcgcgaatccatacccacgagataaaactcaacccatatccgtacccataaatgtttgtgggtatggatttgtatccgtacccgtacccgtcgggt

SEQ ID NO: 3324 - DNA, 1196 bp, Zea Mays
cccagtcccccaagcccagagctttcccatctttccttcttcacctttcgaagagtgccccccttcgtttgtcgacgcgctccgactccatgccgctgtcgccgccgccgccctcctccagcccgaggcaagcagcgatccaggagctcaggaggggtacccagctggcggagctgctcaggcagcaggtagagctcatcccggagcctaaccgccgccacgctgcagcggtcaacgtgggcgagatatccatggctatggagtcgtcgctctccatcctccagtctcagatggagcaccccttctctgagctcactgcccactccgacggaggcaccagcggggaaagaaatggcggtcccgtggcccgtacaaggaaggtgagggtgcggcaccggccaggcagaggcaggcctgcagctggagatgaactgccgatcaaggagatactgactgaggcaccagaaaatgatcgtttccactggaggaaatatggtgagaagaatatcctctattctgaatatccaaggttatactacaagtgcgggtacagcgacgaccacaagtgcccagcgaagaaatacgtgcagcagcaaagcaacagctaccctccgattttcttggtcaccctgatcaacgagcacacgtgcgacgccttgttccgagacgacgagcccatcatcagctcaagcagcagtggctcgtcgcaggtcctcgacttcacgaaggcgtcgctttcttctcctctccattgatgttggcggcggcgcggctgcaggggttggaagaaatagagatgcatggaagaagacagatttcgtgttcggatgatgagtactactagctagctaagctagtcgtcttcaattcgttgcccacgatgatgtcggcagatgagctccgcgcactcagcagcagggattattatcattatacattccgagtttccaagcagcagccaggcagattctcgcggcaataattaagagttttagtagccctggcatgcatgcatgttgcatttgaagcagtttttgattaaggatttcaatgtacgtactagggatggcaatcgggcgggtagtatatggatatatagttcgcgaatccatacccacgagataaaactcaacccatatccgtacccataaatgtttgtgggtatggatttgtatccgtacccgtacccgtcgggt

SEQ ID NO: 3325 - DNA, 1388 bp, Zea Mays
atggcagttggacccgtgggtatggatacccgtgggtttcgtacccaccggatatggatacgggtacaaaaactcacccgtgggtcctatcgggtcggatacccgaaatacatcgggtcggtctacaataacatatccactggatacccaatacccggtggatatccgatgggcatggatacagtcatgctcgagcggcaccgcgttcatcgcgacgccgacggcgatctccccgccgccgtgaccgccccccttctcgcgcacccaccgtcgccggctgagccttggcctgcgaactttggttcatcggagataaccgacgaggagatcgacgccgcctccgccgcctgctgccgcatctgcctcgaatccgagtccgagcctggtgatgtgctaatatctccatgtatgtgcaaggggacacagcagttcgtgcatcgctcctgccttgaccactggaggtctgttaaggaaggaactgccttttcacactgcacaacatgcaaggcgcgattccatctacgggttgaatttctggaggatgacatttgtcgtagaatgaagtttcggatgttcgttgcaagagatgttatcattatattccttcttatacaagccgtgtggttgtgttctttgtaatggttggatttttcgggctaatactacacctctcctcttacaacaacaacgatccgtgcctggttggctcccgtgattgttgctttgggtgtggtctggtggacttaccggcttcaatggaagcttgtttcgctttcgctgtcatatttgttattatgttggccatccttggagttgcctacgggtttcttgcggcgactgtggccatccagaggatctggcagcggcactatcacatacttaccaagaaggagctcacgaaggaatatgtggtggaggacctccctgggggttacacgccgccgaagatggatccagagcatgagcagcggttgaaggtgttgcagctcatgtagcttgcactttcgcaggtgatggacatgaagtatcgcatcttttttgttgcattgcatgtatgtacttttgcatgctgtgagtgttattagttggggtaaacatgtattctagtgacggaagtccatgtgcttataatgtacaaatatagaaccacggttaccagtcccaggtggggaatcacatacaggctaggaacaatgcaagttaaattgatcgactgtttcgctacacatactgcattactgccgagagacaatggtaatgctcactgtatcgaaacgttagtttccttttttttcactgctttggcgcctcggtgtttcgtccctttgtatctggatatgttgtacttcacctggaccaatcagaatcactctactaccaacataaga

SEQ ID NO: 3326 - DNA, 1885 bp, Zea Mays
atggcagttggacccgtgggtatggatacccgtgggtttcgtacccaccggatatggatacgggtacaaaaactcacccgtgggtcctatcgggtcggatacccgaaatacatcgggtcggtctacaataacatatccactggatacccaatacccggtggatatccgatgggcatggatacagtcatgctcgagcggcaccgcgttcatcgcgacgccgacggcgatctccccgccgccgtgaccgccccccttctcgcgcacccaccgtcgccggctgagccttggcctgcgaactttggttcatcggagataaccgacgaggagatcgacgccgcctccgccgcctgctgccgcatctgcctcgaatccgagtccgagcctggtgatgtgctaatatctccatgtatgtgcaaggggacacagcagttcgtgcatcgctcctgccttgaccactggaggtctgttaaggaaggaactgccttttcacactgcacaacatgcaaggcgcgattccatctacgggttgaatttctggaggatgacatttgtcgtagaatgaagtttcggatgttcgttgcaagagatgttatcattatattccttcttatacaagccaccatcgcagctataggtggtatggcatattttttggacaaagacggaaacttcagaaacaaattttctgatgattgggaacggtttctgtcaaagcatccagtgcccttttactactgtgttggtatttgttttcttctgtaactgcactttcaattattaagaagactcggatagccagatgataaaatgatagctagtgtcggagtggtaaaaaattcatataccatatagactgtatgcatgcattagtttgtttgagtcttttttaaatcagaatcattgagacatctcttgctttcatgaacattgcccgatgaggcctcaagttcttctgcttacacattgaaactaaaactatgtggctattcaaattcagatatgtaatttgacacattttttctgcttcaccctatcttgtacaattataactttccatattgcagtttttacagacctgttcaagtataagatgctaatgtttccgtgtaataagtcagctactgatatccccccgttttggttcaggtgtggttgtgttctttgtaatggttggatttttcgggctaatactacacctctcctcttacaacaacaacgatccgtgcctggttggctcccgtgattgttgctttgggtgtggtctggtggacttaccggcttcaatggaagcttgtttcgctttcgctgtcatatttgttattatgttggccatccttggagttgcctacgggtttcttgcggcgactgtggccatccagaggatctggcagcggcactatcacatacttaccaagaaggagctcacgaaggaatatgtggtggaggacctccctgggggttacacgccgccgaagatggatccagagcatgagcagcggttgaaggtgttgcagctcatgtagcttgcactttcgcaggtgatggacatgaagtatcgcatcttttttgttgcattgcatgtatgtacttttgcatgctgtgagtgttattagttggggtaaacatgtattctagtgacggaagtccatgtgcttataatgtacaaatatagaaccacggttaccagtcccaggtggggaatcacatacaggctaggaacaatgcaagttaaattgatcgactgtttcgctacacatactgcattactgccgagagacaatggtaatgctcactgtatcgaaacgttagtttccttttttttcactgctttggcgcctcggtgtttcgtccctttgtatctggatatgttttttttttttttgca

SEQ ID NO: 3327 - DNA, 2210 bp, Zea Mays
tcgtttcctcctcccagtccaagtctccagctacgagcctacgactgccaggtctccgcttgtcgccgtcacgcgcgcgcaggggcagggcgcaccatccccgcgccgccatgtccggcaccgggtgcctccccaccgacggcccggccctatcccgggtctgccgggacggcgcggccgccgcacggctcaagacggggtcgctgctggccattctcgtcgccagcgccgtcggcatctgcctccccgtcgcgctcacgcgggccttccgcggcagcccaaactacgcgcggggcctgctcctcgtcaagtgctacgcggctggggtcatcctctccacctcgctcgtccacgtgctccccgacgcgcacgccgccctcgccgactgcgccgtcgcctcgcgcaggccctggagggacttccccttcgcgggccttttcaccctcgtcggcgcgctgctcgcgctcctcgtcgacctctccgcctcctcccacctcgaggcccacgcccacgtcggcgcccaccacgaaactccctacgccccgatcccgaagaaggtacccgtgttcgagctcgccggcgaaatgagccccaagaagcgcgctttcttgggcgacgaccgagaagaggaccccgcgccgcacgccgccaccaacggcgcagacccggaccgcgacgacgtggcgctcttcggacccaagaagggcgcccgcagcgacgaggtcccggccatcactgccgggtgccatgccgtcgcccatgaagtggtggaggtaggggaggggcccggtgaggacgaggaggaggccaggaggaagcagaagatggtgtccaaagtgctggagattgggatagtcttccactccgtcatcatcggagttacgatggggatgtcccaggatgtctgtgcaatccggccacttgtggttgcgctctccttccatcaggtgttcgaggggatgggcctgggcggatgcatcgcacagcccccttgtgtcccctgatccctccgtctatggagtttaaaatgattcctggaccctggtcgaaggttccccgtggtccacaacaattaacctgagtgagcttttttgtactgctcattgcatttattttagcaataaaaagctgaatgctgaactttttgcaccatgaaaagccatgtggccaatccgtcctctttttgccaccaacttctgttggtttatgactcatcaaatgtttggacaatgtttaccttttgtcctccttcccccatagaaggcaatgaagctgatgtgttatgcacatataggaggagcgacaaagcatatggcattataaggcttaaaagtcctttttggtttggtggtatcttgtttgagagcaattccacgaagaatgaaagtgaaagagtaaagtaaagagattgcagggctggttttgggatggcaacagttggctacatgtgcataatgttctcagtgacgacgccattgggaattcttcttggaatgctagtgttccacatgactggctacgacgatagcaatccaaatgccttaataatggaagggatccttggttcactttcggctggaattctcatctatatggcgctagtcgacctagtttctcttgattttttccacaacaagatgatgtcagcgtctttgaagctgaagaaggcgtgttacattgccttggtgcttggatctgcttctatgtcggtattagctctctgggcataggcattttgaagaaaagccttatttacgatcttcagaggtattgctccttgatgtaaaggaatggataatttgggggccaacagtacactagtccctcatgtaaatttgaacacaaaggaaactgaaaattcacgaccacagtttgtgagctagctgtgtatactaagggctagtttgggagcctcaaacccggagggaattagaggggctaaaatcccttccttattcaattttgaataagaaggggattttagcccctccaatcccctccgggttttggtcttccaaactagccctaaggatgtatatggttatggaaaagtagctgcaagatgtgggatgtagaaaagctgatgtgaggtatgatctatgaaaaagttagccatttggttgagcatcctgcatcaacatacatctacatttctatccacccaactttctcctttcactgatgagcggatcctgcttgtcagactatct

SEQ ID NO: 3328 - DNA, 1116 bp, Zea Mays
ttgatattttgcaacgtggcatgtggaatgtgtgtgcccctatacagatatgaggaaaatctttccattcgggctgtttcacttgggtggtgatgaagtatacacagggtgctggaacacaacgcctcacgtgcggcagtggatggacgagcgcaaaatgaccacgaaggacgcttacaaatacttcgttctgaaggcccaggagctggcgatcaagctgaactggactcccgtgaactgggaagaaaccttcaactcgttcgaagaaaacctcaatccactgacggttgtgcacaactggctggggcccggagtctgcccaaaggttgtggccaagggtttcagatgcataatgagcaaccaaggcgtctggtacctggaccacctcgacgtcccctgggaggacgtctacagcggcgagccgctcgccgggatcagcgacagagagcagcagaagctggtgctcggcggggaggtctgcatgtggggcgagacggccgacacgtccgacgtcctgcagacaatctggccccgagccgccgcagcggcagagcgtctgtggagccagctggaggccatatccgcccaggacgtcgagacgaccgtgctgtcacggctacaccgcttcaggtgcctgctgaaccaccgtggggtcgccgcggctcctgtcacgaactactacgctcggaggccgccggtcggcccgggttcgtgcttcgttcagtaaagcaagcagccaagcaggaagtcgaaataaaaccgcaccgttcaaacctccttcgagctcgggcagtactgcatttgttttctggcggcggggtgcgtcgctgtcggggaccggacgccatcttttcctcagtttggccttgacctgaaacccgctggtccaagctgcgcattaatggcgcgtgtaatttgcgaccacctgttgtgcttgggtggtttggagtgacgacaatgggtttggcaccttgttctatacttccaatatagagagagaggtcactgtccttcccatgccaccttcttcattgcccatgtatgtctttggccttttgctctatctatatatatctactgcccctatttcttaactattgggagcctaaaatcgag

SEQ ID NO: 3329 - DNA, 2088 bp, Zea Mays
ctctctcgtccaaatcaccgaagacaaccagcacattaaaattcttcccaaccttcccaaaatgccccccaaccgccccgcttacctgctctccgccctcctcctcgccgccgccgccgcggccgtcggcgcgcgtcgccacgcgtcgccggccgcgaacgctaccttcgccggagagcccgtctacctctggccgctgcccaagagcgtctcgtccggatcccggacgctgacggtggacccggacctcgcgctcgacccgcagggcctcggcggccgctccccggccgtggccgaggcgttccagcggtaccggggcctcgtgttcgcgccgtgggcgcacgccgcgcgcgcgggccgcgcgcggtacgacgtcaccaggctcaccgtcgtcgttgcctccgccaacgacacgctggcgctgggggtggacgagagctacgccatctacgtggcggcggccgggggcgtcgattccatcgtcggaggagcaatcattgaggcaaacacaatatatggagctattcgaggactggagacattcagtcaactttgtgttttcaactatgacaccaaaaatgttgaagtgcacaatgctccatggcatatccaagatgagccccgctttgcttttcgtgggctgctcctagacacctcaaggcattatcttccagttgatgttattaagcaagtgatcgactctatgtcatttgctaagctgaacgttcttcattggcatatcatcgatgagcaatcctttccattggaggtgccaacatatccaaacctttggaaaggttcatactccaaatgggagcgctacaccgtggaagatgcacatgatattgtcaactacgctaagaaaagaggtatcaatgtgatggcagaaattgacgtgcctggtcatgcagaatcatggggaaatggatacccaaagctctggccttctcccatttgtacagagccattagatgtctctagtgatttcacatttgaagtaatttttggaattttgtctgatatgaggaaaatctttccattcgggctgtttcacttgggtggtgatgaagtatacacagggtgctggaacacaacgcctcacgtgcggcagtggatggacgagcgcaaaatgaccacgaaggacgcttacaaatacttcgttctgaaggcccaggagctggcgatcaagctgaactggactcccgtgaactgggaagaaaccttcaactcgttcgaagaaaacctcaatccactgacggttgtgcacaactggctggggcccggagtctgcccaaaggttgtggccaagggtttcagatgcataatgagcaaccaaggcgtctggtacctggaccacctcgacgtcccctgggaggacgtctacagcggcgagccgctcgccgggatcagcgacagagagcagcagaagctggtgctcggcggggaggtctgcatgtggggcgagacggccgacacgtccgacgtcctgcagacaatctggccccgagccgccgcagcggcagagcgtctgtggagccagctggaggccatatccgcccaggacgtcgagacgaccgtgctgtcacggctacaccgcttcaggtgcctgctgaaccaccgtggggtcgccgcggctcctgtcacgaactactacgctcggaggccgccggtcggcccgggttcgtgcttcgttcagtaaagcaagcagccaagcaggaagtcgaaataaaaccgcaccgttcaaacctccttcgagctcgggcagtactgcatttgttttctggcggcggggtgcgtcgctgtcggggaccggacgccatcttttcctcagtttggccttgacctgaaacccgctggtccaagctgcgcattaatggcgcgtgtaatttgcgaccacctgttgtgcttgggtggtttggagtgacgacaatgggtttggcaccttgttctatacttccaatatagagagagaggtcactgtccttcccatgccaccttcttcattgcccatgtatgtctttggccttttgctctatctatatatatctactgcccctatttcttaactattgggagcctaaaatcgag

SEQ ID NO: 3330 - DNA, 1842 bp, Zea Mays
agaagaaagactaccaagtcagcggcatcacagttatgtggaagtggaacagtcatgtgcgattttctttctcaaaaacagtgaagatgctcaggctcttttgtttcagatgtagaggggcgacatcatcgtcatgtctgtccacatttctcctgcggtggtcttagcaatatatcttatccatttcgtcggcaaggtgatccatctgggtgcggtgtccaatcgtatgagctggtttgcacggatacagatgctacaattcgcatcggcagtggaacatacaaggcatgccggtgcccatgaatacaagctatccagatgttgttaagttcatgaggaatggatttgcccttcggtttcctctttcgattgaatattaccccaacatcagagaatgtctcgcagagaatatgcgtgctttccatgaagaaccaagaaatagtacaggcatcagggaacagatcttggacattcttacgttcgagacattatggttttgtgttattgaacaacttggatcaagtaataatggtgtcaaatctgttctcatcaacatcatcgtcagaataataccatatgttctgtggggtctaaaatctgcacatgttatttgcaggtttgtattgatgccgttagcagtatttgtcttcctagcctataaatactggaaaacacggataacaatagatgcagttgagaagttcctgcgaatgcaacatatgctcgttccgatgagatatgcatacacaaacatcattgctatcaccgcccatttcagagacaagctcggacaaggaggctacggtactgtatacaagggggtgctacagccaggtgaagttcatgttgctgtcaagatgctgggcaactcaaactgtaacggagaagagttcatcagtgaggtggccaccattggaaagatccaccatgtcaatgttgtgcgcctcattgggttttgctccgaggaaaatatcagggcacttatctatgagttcatgccccgtggatctctcgataagtacatcttctcgtcggagaagacattctcatgggacaaactcaacgagatcgctctgggcattgctagaggtcttaactacctgcatcacgggtgtgatatgcagattgtacactttgacatcaagccacacaacatccttcttgatagcaactttgttccaaaagttgctgattttgggctagccaaactgttcccaagagatgacagtttcgtgccactaagcgctatgcggggaacgataggatatatagctccagagatggtatctcgaagctttggtgtcatctctagcaaatccgatgtgtacagctttgggatgctactgttggagatgacgggcggtcgaaggaacgcagatcctcatgcaggaagctccagtcaagcatactacccatccttggtgtacagccagctgagccaaggagatgcgaacgagatcagtgaaggtgttgatatgcacgagttagagaagaagctatgtatcattgggctttggtgcatccagatgaagccgcaagatcggccgacgatgagtgaggtcatagagatgcttgaagctggcatcgatagcatgcaaatgcctccaaggccattcttttgtgatgacgagggtgatagttcatactctacaatctctgaactgaatacaatagaagagtagtagtagaaaaatacacttgtgtctatgcgctcttaatgtatgagactagtaagattgcaaggttgtcataagctaaggtactggttatatacttttattgagagtgtgataacttgatgccatataaaatactacttaggaacattttttttaccaaaaa

SEQ ID NO: 3331 - DNA, 2014 bp, Zea Mays
gttatgtggaagtggaacagtcatgtgcgattttctttctcaaaaacagtgaagatgctcaggctgtctgtgactctgggtgactcttgtcttccacatcgccacgccactgattggctcgcgattatgtgatccgtgaaccttcttgccatggggatgtctgcagcgtctcatctctgtgctccttcatccctgcgagctttaaccgtgttgtttgtgttggcagcttttgtttcagatgtagaggggcgacatcatcgtcatgtctgtccacatttctcctgcggtggtcttagcaatatatcttatccatttcgtcggcaaggtgatccatctgggtgcggtgtccaatcgtatgagctggtttgcacggatacagatgctacaattcgcatcggcagtggaacatacaagccttcatgcggttacctagccatgactcctttgggtggtccaggcatgccggtgcccatgaatacaagctatccagatgttgttaagttcatgaggaatggatttgcccttcggtttcctctttcgattgaatattaccccaacatcagagaatgtctcgcagagaatatgcgtgctttccatgaagaaccaagaaatagtacaggcatcagggaacagatcttggacattcttacgttcgagacattatggttttgtgttattgaacaacttggatcaagtaataatggtgtcaaatctgttctcatcaacatcatcgtcagaataataccatatgttctgtggggtctaaaatctgcacatgttatttgcaggtttgtattgatgccgttagcagtatttgtcttcctagcctataaatactggaaaacacggataacaatagatgcagttgagaagttcctgcgaatgcaacatatgctcgttccgatgagatatgcatacacaaacatcattgctatcaccgcccatttcagagacaagctcggacaaggaggctacggtactgtatacaagggggtgctacagccaggtgaagttcatgttgctgtcaagatgctgggcaactcaaactgtaacggagaagagttcatcagtgaggtggccaccattggaaagatccaccatgtcaatgttgtgcgcctcattgggttttgctccgaggaaaatatcagggcacttatctatgagttcatgccccgtggatctctcgataagtacatcttctcgtcggagaagacattctcatgggacaaactcaacgagatcgctctgggcattgctagaggtcttaactacctgcatcacgggtgtgatatgcagattgtacactttgacatcaagccacacaacatccttcttgatagcaactttgttccaaaagttgctgattttgggctagccaaactgttcccaagagatgacagtttcgtgccactaagcgctatgcggggaacgataggatatatagctccagagatggtatctcgaagctttggtgtcatctctagcaaatccgatgtgtacagctttgggatgctactgttggagatgacgggcggtcgaaggaacgcagatcctcatgcaggaagctccagtcaagcatactacccatccttggtgtacagccagctgagccaaggagatgcgaacgagatcagtgaaggtgttgatatgcacgagttagagaagaagctatgtatcattgggctttggtgcatccagatgaagccgcaagatcggccgacgatgagtgaggtcatagagatgcttgaagctggcatcgatagcatgcaaatgcctccaaggccattcttttgtgatgacgagggtgatagttcatactctacaatctctgaactgaatacaatagaagagtagtagtagaaaaatacacttgtgtctatgcgctcttaatgtatgagactagtaagattgcaaggttgtcataagctaaggtactggttatatacttttattgagagtgtgataacttgatgccatataaaatactacttaggaacattttttttaccaaaaa

SEQ ID NO: 3332 - DNA, 2423 bp, Zea Mays
agactaccaagtcagcggcatcacagttatgtggaagtggaacagtcatgtgcgattttctttctcaaaaacagtgaagatgctcaggctgtctgtgactctgggtgactcttgtcttccacatcgccacgccactgattggctcgcgattatgtgatccgtgaaccttcttgccatggggatgtctgcagcgtctcatctctgtgctccttcatccctgcgagctttaaccgtgttgtttgtgttggcagcttttgtttcagatgtagaggggcgacatcatcgtcatgtctgtccacatttctcctgcggtggtcttagcaatatatcttatccatttcgtcggcaaggtgatccatctgggtgcggtgtccaatcgtatgagctggtttgcacggatacagatgctacaattcgcatcggcagtggaacatacaagagcagttgcccccttccccggtgggattaccatgctaggaggaccagtcgtaatcgtaacttacatcgtcggaggattgagttcagccatgatttttccaattctactccgacgatgtgggtttacgcttacttttaccctgattggaccagtagcaactcatatcgtcagagggttgagttcagccatgatacccctttttcttcttatatggattattcggggtgggctatctttgtgaattgttctcagccaatagagaacaatgatactgataaatatcatatatatgagccggtgtcttgcttgagcaattcttcttttatctacttgctggtaactgactactggtatgatgacaatgtttctgctggggatctggagccttcatgcggttacctagccatgactcctttgggtggtccaggcatgccggtgcccatgaatacaagctatccagatgttgttaagttcatgaggaatggatttgcccttcggtttcctctttcgattgaatattaccccaacatcagagaatgtctcgcagagaatatgcgtgctttccatgaagaaccaagaaatagtacaggcatcagggaacagatcttggacattcttacgttcgagacattatggttttgtgttattgaacaacttggatcaagtaataatggtgtcaaatctgttctcatcaacatcatcgtcagaataataccatatgttctgtggggtctaaaatctgcacatgttatttgcaggtttgtattgatgccgttagcagtatttgtcttcctagcctataaatactggaaaacacggataacaatagatgcagttgagaagttcctgcgaatgcaacatatgctcgttccgatgagatatgcatacacaaacatcattgctatcaccgcccatttcagagacaagctcggacaaggaggctacggtactgtatacaagggggtgctacagccaggtgaagttcatgttgctgtcaagatgctgggcaactcaaactgtaacggagaagagttcatcagtgaggtggccaccattggaaagatccaccatgtcaatgttgtgcgcctcattgggttttgctccgaggaaaatatcagggcacttatctatgagttcatgccccgtggatctctcgataagtacatcttctcgtcggagaagacattctcatgggacaaactcaacgagatcgctctgggcattgctagaggtcttaactacctgcatcacgggtgtgatatgcagattgtacactttgacatcaagccacacaacatccttcttgatagcaactttgttccaaaagttgctgattttgggctagccaaactgttcccaagagatgacagtttcgtgccactaagcgctatgcggggaacgataggatatatagctccagagatggtatctcgaagctttggtgtcatctctagcaaatccgatgtgtacagctttgggatgctactgttggagatgacgggcggtcgaaggaacgcagatcctcatgcaggaagctccagtcaagcatactacccatccttggtgtacagccagctgagccaaggagatgcgaacgagatcagtgaaggtgttgatatgcacgagttagagaagaagctatgtatcattgggctttggtgcatccagatgaagccgcaagatcggccgacgatgagtgaggtcatagagatgcttgaagctggcatcgatagcatgcaaatgcctccaaggccattcttttgtgatgacgagggtgatagttcatactctacaatctctgaactgaatacaatagaagagtagtagtagaaaaatacacttgtgtctatgcgctcttaatgtatgagactagtaagattgcaaggttgtcataagctaaggtactggttatatacttttattgagagtgtgataacttgatgccatataaaatactacttaggaacattttttttaccaaaaa

SEQ ID NO: 3333 - DNA, 3105 bp, Zea Mays
aaaaaataaactaaaataaagggagagaaaaactgtcttttgctacagctgagctagaaaaggaacctttttccgcgcgttattcttcttcttgtattcgaaagcccaagcccaactgataaaaggcccatgctcaagcgataagacgagaataaacaaccaccgatcccccagggcccaggcccacgcgcacacattctgattccgaaggcaagggcgtgtacatggcggtgagacgaggagccaaaacccaacggcgacgagaaatccacggcggctagttcaccccatccggcgcgagcgactccctccgcctgcaccaaaaacgagggcgttttcgtgtcccctcctccaaactccggagcccacatcctccagtccccactcacctgcgccactccccaccacgctcctcaaaaccctaggtccttcgatctaatgccgtgagctctcgaattctcaattcccccagcctctccatggaagaccccgtggcggtaccctcctcgtccttgaccgaccctgccgctgccgccgcagctagggttccgggtgcggtggcagcagcccctggcgtcacctctgcgccgtccgctctcgctccgacgcagccgcctgccaccgcggccgcggtctctgaagccgcgacgccgtgccagaggcagctgttcacagtggagctgcggccaggggagaccacaatcgtgtcgtggaagaagcttctcaaggaggccgggcacaccgccgcggcaccgccagtggcggtggagccagcgttcgccgcacatgcgggcccatctggtccggcacatcctgcagaaaatgacccaaaggatccaacacagccaaatcggttcaatgcagtgattgaaaaaatagagcgcctttacatgggaaaacatagcagcgatgaagaggatcttaatgatgtaccagatgatgatcagtatgacactgaggattctttcattgatgatgccgaattggatgaatatttcgaagttgataatttgaaaactaagcatgatggctattttgtgaacaagggaaaattggaacagattgaacctggtacagcggcaaatgttgctccaaagaaaaggagaagaaaggatgcatcaagttcttatctggagagtaatcaccttggtccaattgattattttgatattggcgatgtacctgaaaaatcctctgcaagaggtactgtgcagacgggaaaacagttagttagtagcaacgtaagttcttatggtcaataccatgaggacaatagagtggtgaagaataaaatcagtggtcctggaggagcccctaaaagaaaatcttctgaattctcgggtgacgctgcagcacgagctaagattattaaggatgtctcgcatgctcctttggagctaagagacatggaaaagcataaagctgcagcactacctgttgactatgcacataagtcaaaaatcagcgaaacatttgattatgcatatccagcttatagggataaaggcacttcagggcaacttgatttccaacaaagaaagataagcagggaaaatcaaggtccatcaaatagaacctatcgcaaagagaaacatggaacaaatgaatatcctggcatcgctatggctactgcggtctattctacacaaacaatgcacccagttgttggtagggagggttcaggaactaaacccaaaggcaccaggcttgagcgagctattcgcgatctccagaagatcgttgcagaatacagaccaccaacaattgatattaatgaggtagatccaaatggccaggtagcagttaaaagacggttgcctcctgaaataaagcaaaagcttgcgaaggcaaataacggaaagatccaagaacatgagctaatgaatcgcctcatgggcatagttggacaccttgttcagcgcaggacactgaagagaaacatgaaagaaatggtagaatctggtatatctgctaaactggagaaggctgacaggtttcagcgtgtaaaattggagatcaatgagatgattaaagagcgtatggctacaaagtccaaggtcaatgaacaggatggttcagctgatgattttcaggttgctaatgatgaaagaagagctttaaaaacaaagtatacaatggatactgcattggaggacaagatgtgtgatctgtatgatatgtatgttgagggtatggatgaagacaagggccctcaaagcaggaagttatatgtagagcttgccgagttatggcctcatggttgcatggacaatgtcgggatcaaagatgccatttatagatcaaaggagcgaagaagattattgtacagccagcaaaaggttcgcagtgaagagagaatgaagaggaagaggctggctgcaacagcaaagctgccagatggcctcgcagttgcaatgcaaagtggagttgccccacaagttgcacagccacccataacaaatcccatcacataccatacggctgattatggacagaacccggggttaaaatattttgatagggctcgtgaaacgagctccagtgcaatccctgatgacggcaacagaattgctggtgaggtcaagaagaagaaaagaaaacctgaatatgaccctgtagatacacaagctaacctaccaagggctcccatgccgcacgggagcgagaagcaaaagccttctaagcctgctgacgaggccagtgctggtagcctgccctccatggcgacaactcaaactgtgcttggcctaccgtcggtgcttggtcataaccaacaacctagctgattctttcggcgtagtgttggacatttggttctccttataggcctttttcagctgctgtaacaaattatggcctttccatgtgttcagcatcgattgttgagactaacatgttcccgagtagagaggatatttgatcactctttacttttccagcattgcatggttggtacccttgcccagattatctgtgcagcgctgatagatatgatctgcaaccccttcaaataccagttgtaattatgaatattttctcgagacatgtactgctcatattgtgcgaagcgatgtgcagattttcttttacttttgttcaagtgtg

SEQ ID NO: 3334 - DNA, 3211 bp, Zea Mays
aaaaaataaactaaaataaagggagagaaaaactgtcttttgctacagctgagctagaaaaggaacctttttccgcgcgttattcttcttcttgtattcgaaagcccaagcccaactgataaaaggcccatgctcaagcgataagacgagaataaacaaccaccgatcccccagggcccaggcccacgcgcacacattctgattccgaaggcaagggcgtgtacatggcggtgagacgaggagccaaaacccaacggcgacgagaaatccacggcggctagttcaccccatccggcgcgagcgactccctccgcctgcaccaaaaacgagggcgttttcgtgtcccctcctccaaactccggagcccacatcctccagtccccactcacctgcgccactccccaccacgctcctcaaaaccctaggtccttcgatctaatgccgtgagctctcgaattctcaattcccccagcctctccatggaagaccccgtggcggtaccctcctcgtccttgaccgaccctgccgctgccgccgcagctagggttccgggtgcggtggcagcagcccctggcgtcacctctgcgccgtccgctctcgctccgacgcagccgcctgccaccgcggccgcggtctctgaagccgcgacgccgtgccagaggcagctgttcacagtggagctgcggccaggggagaccacaatcgtgtcgtggaagaagcttctcaaggaggccgggcacaccgccgcggcaccgccagtggcggtggagccagcgttcgccgcacatgcgggcccatctggtccggcacatcctgcagaaaatgacccaaaggatccaacacagccaaatcggttcaatgcagtgattgaaaaaatagagcgcctttacatgggaaaacatagcagcgatgaagaggatcttaatgatgtaccagatgatgatcagtatgacactgaggattctttcattgatgatgccgaattggatgaatatttcgaagttgataatttgaaaactaagcatgatggctattttgtgaacaagggaaaattggaacagattgaacctggtacagcggcaaatgttgctccaaagaaaaggagaagaaaggatgcatcaagttcttatctggagagtaatcaccttggtccaattgattattttgatattggcgatgtacctgaaaaatcctctgcaagaggtactgtgcagacgggaaaacagttagttagtagcaacgtaagttcttatggtcaataccatgaggacaatagagtggtgaagaataaaatcagtggtcctggaggagcccctaaaagaaaatcttctgaattctcgggtgacgctgcagcacgagctaagattattaaggatgtctcgcatgctcctttggagctaagagacatggaaaagcataaagctgcagcactacctgttgactatgcacataagtcaaaaatcagcgaaacatttgattatgcatatccagcttatagggataaaggcacttcagggcaacttgatttccaacaaagaaagataagcagggaaaatcaaggtccatcaaatagaacctatcgcaaagagaaacatggaacaaatgaatatcctggcatcgctatggctactgcggtctattctacacaaacaatgcacccagttgttggtagggagggttcaggaactaaacccaaaggcaccaggcttgagcgagctattcgcgatctccagaagatcgttgcagaatacagaccaccaacaattgatattaatgaggtagatccaaatggccaggtagcagttaaaagacggttgcctcctgaaataaagcaaaagcttgcgaaggttgcaaaggttatcggcaaataacggaaagatccaagaacatgagctaatgaatcgcctcatgggcatagttggacaccttgttcagcgcaggacactgaagggatggcagcgggtcaggtattatccgcacatgagtatacctgtgatcctaatttttacccgtgcccgcgagcatacctgcgggctgcggagaaacatgaaagaaatggtagaatctggtatatctgctaaactggagaaggctgacaggtttcagcgtgtaaaattggagatcaatgagatgattaaagagcgtatggctacaaagtccaaggtcaatgaacaggatggttcagctgatgattttcaggttgctaatgatgaaagaagagctttaaaaacaaagtatacaatggatactgcattggaggacaagatgtgtgatctgtatgatatgtatgttgagggtatggatgaagacaagggccctcaaagcaggaagttatatgtagagcttgccgagttatggcctcatggttgcatggacaatgtcgggatcaaagatgccatttatagatcaaaggagcgaagaagattattgtacagccagcaaaaggttcgcagtgaagagagaatgaagaggaagaggctggctgcaacagcaaagctgccagatggcctcgcagttgcaatgcaaagtggagttgccccacaagttgcacagccacccataacaaatcccatcacataccatacggctgattatggacagaacccggggttaaaatattttgatagggctcgtgaaacgagctccagtgcaatccctgatgacggcaacagaattgctggtgaggtcaagaagaagaaaagaaaacctgaatatgaccctgtagatacacaagctaacctaccaagggctcccatgccgcacgggagcgagaagcaaaagccttctaagcctgctgacgaggccagtgctggtagcctgccctccatggcgacaactcaaactgtgcttggcctaccgtcggtgcttggtcataaccaacaacctagctgattctttcggcgtagtgttggacatttggttctccttataggcctttttcagctgctgtaacaaattatggcctttccatgtgttcagcatcgattgttgagactaacatgttcccgagtagagaggatatttgatcactctttacttttccagcattgcatggttggtacccttgcccagattatctgtgcagcgctgatagatatgatctgcaaccccttcaaataccagttgtaattatgaatattttctcgagacatgtactgctcatattgtgcgaagcgatgtgcagattttcttttacttttgttcaagtgtg

SEQ ID NO: 3335 - DNA, 1474 bp, Zea Mays
catatttataataatattatggcgcattttgtccaacaaattttgcatataatagtattgtttgtcgtaccatatatattttatactacaactgatatgattatttaacttgcagtattctagaatttgctaccctacaactcatatgattatttgactatgcacatgtctccaagaatattgtagggaaactacaacagatttgtgccatgttttactctgattttggagttttctgcttaactgaggcgaagcgcaaccaccaggttggctgttttagatctgtctcctagactgccctttgctcaagggaaatccctccttttcatttaacgcaaaagaaacttattctatttatttgtatctacgaaatctggcgtcaaatgttcagttgaactcagatgtgtgagactcaactgaagatcccaaatcatcacattatttccccgtcgaaatcatttgtgtttcttagagagaaaaaatgttttatgcttctgtctcctagactgacctttgctcaagggcaatccctccttttcatttaacgcaaaagaaatttattctgttgaacagtattttcatctttatacttatttggtactgcaacagcaatgagaggagcaatatccttgacaccttaattttgtattgccttacaaaggattttttagctgtcgcttgccaagtataggtcgtattgtgggtagtcacaccaaaactaaaactaatggcaattggtttgcaataggcagtgctctttctgttagctctggatgtcagggcaatgaacaaacacgttgagtatgatagtgatgctaaaattactgcaatgggttgaagccctaccatgtggcaaccattgatccatgcccaaaatgtgcctgccactggtgttcctgtcccaacactcgatcaacatgcaagtaaaaaatgaagcatagagccaaacgatgcgagagaagtatggtctacacatgagccagttcacataaacccttcagacccaagcagctcaagttgtgcggtttggtgtcatggtgttgttcaaacttcgcagtggtgtgtgaaatagaagaatcccaattcccaagcatattatttgtcacgcttggtacaggggaaatacgacagcatcatcgtggaggtgaagagctactacatgtcgatgagcaggtacagggatgataaaaaaagaaagggtgagattatgaaggtttatgccaatgatcaaataaaaacatgtgttgagtttccagagtgttttgtatatgaacaatcttctacatgcaaatttctgttatgcgcgcttgtggtcattggcaggaagactcatgtggtcggaagagggctgatgagcacgatcaccatggatgtggacaccacggcaagggtggacgagttcttggttaccacctttgtaggcccattggtggaggaagacttgacgagaggaccaatgaatactctcttttaa

SEQ ID NO: 3336 - DNA, 1101 bp, Zea Mays
ccgagcatcggatcccctcgcctcgcggtgctgacgcagcttcccctgctgcctccaggaccccagcaagctctcggcgtacagggaccgccggttcaaggggacgcaggaggagtatgaggcggcgctgcttgcgtcgacaacgctgtacatcggtaatatgtccttctacaccacggaggagcaggcctacgagctcttctcccgcgccggcgagatcaagaagatcatcatggggctcgacaagaactccaagaccccatgcggtactactctagggaggatgctgaagatgctgtcaaatacattagtggaacgatgcttgacgatcgtccaatccgcgttgatttcgattggggctttgaagaaggcagacagtggggccgtggacgaagtggtggacaagtcagagatgagtaccgtacagattatgatcctggaagaggtggttacggtaagatggttctgagggaactagaagcacagcgagaattagttgactatggtggatcttttcaaccgaatgcaccacctccctatgagagaagtgagcggaagagaggacatggagattctcataggaatgacagaggagattaccagcggaaacgctaccggaacgatgaccggtcagcaccagaggagtccaagagagcaccggactctgatccagcggagaagaatcctagattccgtgagaaaggtgactctgacgaagaagaggatgactacgacggcaaacgtcgtcgctaaagctgtggaacagccgttgctactacatgcagctgttctggtgtccagacgttgcagaagagtccacagctagcagcagtatccggatctcgccctgttgtacaacagatttaattcttcggtcggccattcctccttttctagtgctcctatcatctgttaatctgaatgtgcgcggtgttacatgtgctccaagtggggcactgttctcacagatacaatgagccttatctgtacgtttgctgctgatgaagcttgagaccagtgcatatattaattctaacagattgttaccgaacccaatcttcaatttttcctgtctgtttccccgacaaccctagtaggccc

SEQ ID NO: 3337 - DNA, 2958 bp, Zea Mays
ttcgcggagaacagcgcgtcagcgcctacggcttctgcttgtctctcccgttccactccaaaccctaggggcgaatctccggctaatcggcggcgggcgcagccacgctgtctgtgcagggcttgtgcggccttaggacgcaggggcgttgcttggggctcccggtgggtggctacgaagggctgtggcggcccgcggccaggggcaagtcggcagcggcaagcaaccggggtgctgggcgtgggtgggctgctgggacgcctgcggcagcggtaaaaagtcgagcctcgaccgtcctgaggcaggagcagagcagctgagctggtttggtactctgttgattctccattggagacactagtgatggaaggtactaccatttctattgagattgatggggaggccatctgtcttgacagtgtcggagataatgaacaagaagctgcggagaatggagaaatgcaccaaacaatttacactgatgaaaatggggaacaagtagcctttgacaaccaagaacaggggagggaggaagatctggcaggaaatggagaagaggatagggaccataattctatcattccaagccgtgaggagttgactgaagaattaagaaataaagtcgcatatagtgaggaagaagcttacaggttgtactgtgactatgggcaccgcatgggctttagtgttcgaaaaggaaagcagtactactttactggaaccaaaaccatccgtactaaagattattactgctcaaaagaaggcttgaaggatgatgaacagcttactgaagcaaactttaataagccggagaccagaactaattgcaaagcgatggtccgttttagggttgattctgaaggtcaatggcgagttattcaaataattcctgaacacaatcatgagctagttcgaccggaagaaatacacttactgagatcagtgaggactctttctgttccgaaatctggggtgctgaatgcaatggtgaatgctgaaattcaagcaatgcatgataatttgcatataaatgaagatggtacagaatgccacagccaacttagcatccgtagttacacactgcttgaaccaaaggaatgtgaggcccttgttggatatttcaagcgcagaacaaatgaacaatgtatgttctattgggatgtagaagtagatcaagaaggccgaatgactaattttttctggagggatgggaaaagccgcgttgactatgacagtttcagagatgttgtgatatttgatacatcatatctcaccaacaagtataatatgatatgtgctccatttattggtttgaacaaccaccgacaaaatgtcatgttcggctgtgcatttttgttagatgaatccttaacatcctatgaatggttatttaagtcattcttggagtcagtgggtggtcgtccccctgaaacaatctttactgatcagaatgaatttatctccaaggcaatcgaagttgttcttcctgggacacgccattgtctttgtcaacagctcattgaaaaaaaacttatgtcccatttaggcagtatcaatgattctggaacacttcatagcttgttttcaaagtgcatgagagaatgtgagtcagaagcagaattagatgaaacatgggcgatgatgcatcatgagtataacatgcaggaacacccgtggctcactgatctgtaccagcaaaggcataaatggtgctcggctcttcataaggatgcatttgatggtgggattgaatcaatggataggaatgagagtttgaacaatgttttgagcaacattgacgatgaatcagcttcgctttccacttttgtccttgagttggataaacttgcagggagttggcgtaaaactgagtctttagaggacattcagtgcaaccaagctgctccggagtgtacagttaagcataacagaattttgcaacatgccgctgaagtttacacacataaggtctataagtctattgaaacagattttctagatggatgtagtgctacttcatatcaggcagctcagtgtaatgaaacattgcataagtttgagttccttctggaaaatagtccaaatgtttcggtagttttccttaacacctctaccatggagttgagctgtacttgcaaaaaatttgagaccatgcgtatactttgttcacatgctctaaatgcacttgttctcaagaatgtagataggattcctgaaaggtatattttaaaccgttggacaaaatatgccagaaaaggaacatatccatttccagttgatgaatttgcagaacaagatcgcacagaagttgcatttgtgtaccgtaatagggctatgtggtttgtttatgatctgctgactaagagcaaaagtcatcataatacaagaaaactaattctggatgcacttgaaaatggagaaaaatcactggaaagtatgtgtgacctcaaaagattgcatatgaataccttggggaaagagaaagatggaagcagggttgaaaagagaaagaaaaaatcaactaagcaagagaaacattcaagtatctcctttcacttgcattcgtcttgctttagcaatgattaagtttgattgaatagaatcattgtttttataggaaatgttaaacaagcggttttgccccagacagctgacccggtttttgttgatccaccaaatcaagatcaatattttgctgcagaagatattgcatcaaaccaatctgttggtagacctttcttctaccagggatatcccatgactgttgtttcaacaagccagattcaggggcatactaatatgcattctgagcctcagtgtgcatctcagcttgcagggacgtcagatgcgagtgcgggctgcggcgacggtgacagcggccgtcgctgcgatggaggtggttgtgcccgtggttgtgcggggacggcggatgcgcccgcctgtctctttcctcctctc

SEQ ID NO: 3338 - DNA, 2083 bp, Zea Mays
aggttgaggatagcaaacttccgaagcccgccgttcgggatacctctgctccaaataactccttccctcgacctccccgaacccgaactcctctcaggtcgagcctagggttagggtttcgtccctccggccccgattcgaaccaatccgcctcggcctccgccgcgccatggccgccggctccatcgtggtggacttcccttccatgggcgccgccctctgcttccccagcctcgattcactcctccgcgactccgcctcgggcttcctcgctgccgtctccaacgccccagcccccggcgcagccgacctcaccaactttcaccgcgtcttctcgcgcgtcctcagcgcctacccggacccaccgctcgaggctgtctggttcttctccgcgctctccttccacgaccgtcccgacgacctccgctccctgctccagctcctctccgccttcaccgcctcctcgcccggcaccgccaagccgcttgcccttctcgcccctgtcgtttccgagctcttccacgccgacaagccgcgcagggagaccgagaccctcgttgaggccgtcctcagctacatcagcatctgcagcaaccgctctgccccctcttcgaccgtgggcgccaccgcagacgctgtgagcctgctgccggcctttggggagctcgtcaaagtgtggagcgtgcgctactcgagggagaggtgcccgttccaagtgctgttcccgctcgctggggacgaggccaggcgggagctcatgaaggaaggctgcagcgttgactacctcgccggggtggtgctggctgaggcgttccttctcaggctctgcctcaaggtgcagaatgcaacaggggtgcctcgctctgagctgcagaaggagctcaagatctgggcagtcagctccatcccggtcttccagaaccaccgattcttcggaggaaaggtgatcaagggagagcagtgtcatttatcaatgctttctcaacctcaaatgttcccaattttctcatcaagtgggctacttttcaagctggctctggtgcactcagcaaaccaattgccaatacaccgcaatctattattaagtggcttgtcgaccttgaagtcaaggggctcaaagtgtttggagactacagttcttgtattatggagaggtttgcttatgatggggtcaagaatggccatgggaacatgattcattcagatgcggaccttttcttttttgataagcagagtggtagggagtttatggacaccaaaggcagcgaggatgaagctgtggatgagatggagactgcaggtaataatgcttttatggctgctgcccagtcaatgaagggggtgactgacggcatgaggaagaggaagagctgcggatacgaagatgcaacagctgtgaagtttgtgaagtacaaggttgaagacagctcgctgaaggactacctatcagcagctaatggcataagcagtggcagtgaggtagagaacccgcagtctgatgatgagatggaagaatcaaactgatgcatagaaacgagatcacccgctaatgcttactttggacagttgcttttgagagttccttggacagccgcctttttttggagccaggaccagtcttgtttcagctgccgcttgttaatgatgccgtgcagaatccgcaagacggccccatctccagctaggcattcggatgtagtagtaaccgttagctgaccatacttgacatggagcatatgatgtttgctatgggccatatcgtgctctctgttgttatgacgcagctatagtagagtagagacctaaaaatgtagtcttgcttcaagttacttttgtaatagctgggtacttcgttatcccacggaaccagttggaagtaatgaaatcttaaccttctcctgtgtatagtgtctttttttgtgctgacgacatgcggtcaaacagtacgttttctttttttcttttgtgaatgatgagtgaatatggtgaaatattaccaacatgtttggtttgatgaatgaggtagtctatcatcttcttacttactttcttgtttggttttggtttgtggaatagacttata

SEQ ID NO: 3339 - DNA, 2207 bp, Zea Mays
cgccgttcgggatacctctgctccaaataactccttccctcgacctccccgaacccgaactcctctcaggtcgagcctagggttagggtttcgtccctccggccccgattcgaaccaatccgcctcggcctccgccgcgccatggccgccggctccatcgtggtggacttcccttccatgggcgccgccctctgcttccccagcctcgattcactcctccgcgactccgcctcgggcttcctcgctgccgtctccaacgccccagcccccggcgcagccgacctcaccaactttcaccgcgtcttctcgcgcgtcctcagcgcctacccggacccaccgctcgaggctgtctggttcttctccgcgctctccttccacgaccgtcccgacgacctccgctccctgctccagctcctctccgccttcaccgcctcctcgcccggcaccgccaagccgcttgcccttctcgcccctgtcgtttccgagctcttccacgccgacaagccgcgcagggagaccgagaccctcgttgaggccgtcctcagctacatcagcatctgcagcaaccgctctgccccctcttcgaccgtgggcgccaccgcagacgctgtgagcctgctgccggcctttggggagctcgtcaaagtgtggagcgtgcgctactcgagggagaggtgcccgttccaagtgctgttcccgctcgctggggacgaggccaggcgggagctcatgaaggaaggctgcagcgttgactacctcgccggggtggtgctggctgaggcgttccttctcaggctctgcctcaaggtgcagaatgcaacaggggtgcctcgctctgagctgcagaaggagctcaagatctgggcagtcagctccatcccggtcttccagaaccaccgattcttcgagcgctgatgatgaaatcttgttgagagatgtcctttatgattctcttatcctggtggactattctttcattaacaatggtgttggagttgatcttttgcctatatacgtgttgagattggttatcactcttgatgctgtcaatgatgccaggaggaaaggtgatcaagggagagcagtgtcatttatcaatgctttctcaacctcaaatgttcccaattttctcatcaagtgggctacttttcaagctggctctggtgcactcagcaaaccaattgccaatacaccgcaatctattattaagtggcttgtcgaccttgaagtcaaggggctcaaagtgtttggagactacagttcttgtattatggagaggtttgcttatgatggggtcaagaatggccatgggaacatgattcattcagatgcggaccttttcttttttgataagcagagtggtagggagtttatggacaccaaaggcagcgaggatgaagctgtggatgagatggagactgcaggtaataatgcttttatggctgctgcccagtcaatgaagggggtgactgacggcatgaggaagaggaagagctgcggatacgaagatgcaacagctgtgaagtttgtgaagtacaaggttgaagacagctcgctgaaggactacctatcagcagctaatggcataagcagtggcagtgaggtagagaacccgcagtctgatgatgagatggaagaatcaaactgatgcatagaaacgagatcacccgctaatgcttactttggacagttgcttttgagagttccttggacagccgcctttttttggagccaggaccagtcttgtttcagctgccgcttgttaatgatgccgtgcagaatccgcaagacggccccatctccagctaggcattcggatgtagtagtaaccgttagctgaccatacttgacatggagcatatgatgtttgctatgggccatatcgtgctctctgttgttatgacgcagctatagtagagtagagacctaaaaatgtagtcttgcttcaagttacttttgtaatagctgggtacttcgttatcccacggaaccagttggaagtaatgaaatcttaaccttctcctgtgtatagtgtctttttttgtgctgacgacatgcggtcaaacagtacgttttctttttttcttttgtgaatgatgagtgaatatggtgaaatattaccaacatgtttggtttgatgaatgaggtagtctatcatcttcttacttactttcttgtttggttttggtttgtggaatagacttata

SEQ ID NO: 3340 - DNA, 1324 bp, Zea Mays
cgtgtagtcgtgttcttgtgcggccggtgctcccggtgctccccatcacaccaccaaacggaccaggcgaggcgtcctccaggccctagctctgtggtgtgcgcctctgcgatactgcgactgcggggcgccggtgcccgtcccatcggccgccgaactgtgcgccccggttgcccactaggccactactgcagtctgcactctgcagataacacagaggaaggcggaagccgatggccgccgtggcaagccccgccctccggctccgcccgagagccgcctctacgtcggcgacctcctcctccgcccctcctcgctgtcgcttcggctccttctctcactcctgtttcaagtttgggaggtcatttccagttcagagagtcaatggaagcacgatgcagcatttcggtactctaaaagctcaagtttttagcagcactggcgaccatgatggacgatttcatattaagaggactatatgctttgctgctacggacaagcaggagccggtcgtttcacgttactcagacatgccggttttgcatgaggcagaaagtgattttcttatactattctttaccgaggctttattttatggaggagttgcaatttttgtcttcttgattgataaagtctggagacctttgcagcaagtagcaccaaagagttacatttggtcaaaatccagatttttccgtatttcctcagtaacaacaatggttctgagcttgataatacctcttttaacaatgggcatggtatggccctggactggaccagcagcatcagcgactcttgccccttatttggttggactggttgtacagtttgcatttgaacagtatgcacggcatcggaaatcaccttcttggccagtgattcctattatcttcaaggtatacaggctacaccaactgaacagggcagctcagctggtgacggcactcacattttctgtcagaggaacagagacaacaaatcaaaccctagccatcatgaactcattaggagcattactgactgtccttcaaattcttggcgttatctgtgtttggtccctctcaagctttctgatgaggtttcttccctcttcagacattcctgatccctgactcctagacgttttggtagaacttttggagcgtgggcatagcttcccattgtaaattggttacacggaaccagtttcacatgtttgcaatgtttagcatttctttagggcatcttgatgcaatcttcggctgagtaattggaagagaaactgacgctggaatcaaataaacagcaaattaaaaggtccgatgcattgagtgtttccatgctg

SEQ ID NO: 3341 - DNA, 1993 bp, Zea Mays
ggcgcatccggccgtccgtccttccggagccccacgcgataggcggcaggagcggccgagcgggacacgcgttgcagttcaacaccgcagtggcattctcgctactgagactgagaggcagcctccctccctcgtgggcgttctaccgcgacgggggtcgctctataaagagcggacgcgcccccgctgctctgctcatcgtcctccgctccagcagctgccacagagacatcagagagcggtcctccttgtgagtctgagctgaagaggaggaggaggaggaggagaagcagcagcgcagccggaggagggagagcgaagatgcgccgcgtcgcgctgttgctcgtcgccgccgtgtgcgcgctggcggcgccggctgccgcggtcgtcactgacggtcttctcccgaacggcaacttcgaggatggcccgcccaagtcggcgctggtgaacggcacggtggtgtcgggcgcccacgccatcccgcggtgggagacgtccggcttcgtggagtacatcgagtcggggcacaagcagggggacatgctgctggtggtgccgcagggcgcgcggcgcctactacgccatcacgttcagcgcggcgcggacgtgcgcgcaggcggagcggcagcggctgaacgtgtcggtgagccccgagtggggcgtgctgccgatgcagaccatctacggcagcaacggctgggactcgtacgcctgggcattcaaggcgaagatggacgcggtgacgctggtcatccacaacccgggcgtggaggaggacccggcctgcggcccgctcatcgacggcgtcgccatccgtgcgctgtacccgcccgcgctcgccaggcgggcggggggaaacaacctgctcaagaacggcgggttcgaggagggcccctacttcctgcccggcgcgtcctggggcgtgctcgtcccgcccaacatcgaggacgaccactcgccgctccccgcctggatgatcgtctcgtccaaggccgtcaagtacgtggacgccgcgcacttcgccgtgccccagggcgcgcgcgccgtcgagctggtgggcggccgggagagcgcgctcgtgcaggaggtccgcaccgtgcctgggtggacctaccgcctcgccttcgccgtgggagactcgggcgacggctgcgcgggctccatggccgccgaggcctacgcggcgcgcgccacggtcaaggtgccctaccagtccaggggcaccggaggatacaagcgcgccgtgctggacttcacggccatcgccaaccgcacccgcgtcgtcttccagagcaccttctaccacatgaagcccgacggcacgctctgcggcccgctcgtcgacgacgcctcgctcgtcggcctgcgcaagaagaagcccgcgcgccgcctcatgcagctcctgtaagcgctgcttccacgtgcactacgcccggacggaccgcgcaagcgatggtgtaatacggctggtatgtgttttttggtttggtgtgtgcgtgcgtggtatacgcgtgccgtgcgcgccctgtggctgtggctgcagtggcgtcgcgttgggtgttttcttgttgtgacgaagaaaaaagggtatgggttggggtggtccgctggccggcgcaccggggttttaatcaacttatattaacctgatgaaggtgaaggtgaaggtgacacgggattaatggcaaaaatgctcctagtactatttttgtaataaaaaaaaaagattttgaaaaatgtaaactggctaacacgctatggctgaagcgcatgtgttgttttaaattgttcgccgtacgtgctccatttcacttctcaacagcactcttctcttatttgtcccatgagccttgcctacgggatctgaatcctccgtcgtgcggccgtctcctcctttctccatcgtaacactgcttcgtggtcgtggcattatcctgacaccggcaaccgccatgcggccctctcccttctccagcaggacgccatcttc

SEQ ID NO: 3342 - DNA, 4290 bp, Zea Mays
cccacgacgacccacgacgcctgcgtcggccctgcccgaactggcgtgcagagcagtgctccacgacgccgccaccacctgccccagcagcggcacgctccgacaacggcgaccatggcggtgcgggcgcggcggctggggagtctgttccctgctagatccagtagatggctgactcatcgaggccctccgtgaacatcatctgcgccggtcgtctgctcggctgcagtggattaggaggcttggtgtggaggcgctcagcagcgggtggaagttcccgtcaaggagtctgtcccgtcaaggagaccgtcgtgccctggacggagtcagagcaagagtcgatcaacattttcctcacgatgattgagcgacacaggcacaattcaccatgatcccatcccccactcaaacctgcaaaatcctgtagccgaacatctcgatggtctcacgtgccattcctttctacaggaataggcctataactgatttcaataagtttatgctgcatttcattcagtgtgtttggatgcatatagagaacacgaagtttaatgtgtttggtgcataatgagaattgaggaaatgggacattctagcatgctatgtgaattgtgaaaggctatagattaatgtgtacagcattttttatgttggaactgcctacatttatgttggtgccgctcccacgagcgcaccaggacgccggcttggaggtacttgcacacaagggtcgagctcggacgtcgtagcggtgcggagggcctcggccgtagcatgccccgccccgccgcgcatgcctgcgcggtcggtgtcccgcagcacccacaccgagtggcctgtcttcaaagtcgtcctcatcctctcctcctggctcaacgagaccatcaacgtctggatgttcatagacctgctcgggttcatgctgttcttcgacctcaccctggtgcacctcggccagtacttcaccaaggtgtctggtatgattgggcacctctcctgctccggcgaccgagctccaaccagggacgtctagcgctagcgcccaggacgcacgaccccctgctcctctatcctcagcgccgagcccctccgtcctgtttctggcagcgaaagcccagcccctgcggcaagctacctactcgatggaatgcccagccgcttgtcggatctacgcagcccctgcgcgacgtcacaaactccgaacggttatacgcgcctcacacaagcatgcgctgaatttctcgctttcccaaccctatcgttttttgggtgtgtatggttttcccaggcagtcaggcgggataacaagcagaggtttagtctgttggaggaagatggcgagctgttgatccgggcgaaccagggacacacactaaaaaaatatagtctggaggtgacctcaatgtaattcaattagtgatggaacatttgggagtctactcattatgtatttcttctatctggaaaaacactcaagggatctttgtttagaggatggagacctaaatctgaccgaccttcattggtggataaatatgcagaaaaagaggagaccttcacctaaaaaacaaagatatatgttgaaatggttctttttaaaagattgcaacgtgatccgggtgtcagagattcagaaggtcttggacatcgccgacgagcgtagcctcattgacaccatcttcttctgctacctcgggtgcaatgcaagctaaggtggtcgacaatggtgttcgcggcggcgaactcgcagcgcagccaggtgatgaagccatcgcgctcgtcgacgagccaggcgacgggctcggccacggcggtgccgggggccggcgaggcgatgacggcggcggtggaggccatcgccgtgcgtccctcaccactgcgggccgcagcatagcccagccagcaatgccgaggtccatcaccactgggaaccgtcgtccggaccctctcccatcccgcacccattcctgtcctctgtctctgcgatgcgcttagcgccctcaccacttccacctccccagcctggctagcagcggcggagggaagaagtaccccactctggctagcagcggcggtggcagctcagattagtacggcgctgccccttcttcccccacctgtctttggatctacaaccgcccacccgtcttcggagctgttgtattcctccccacttgcttatctattcctctcaaaatagtgatggatttcggtcctcggatttttaccaatcggacaaatccagtgaattatgttgagaaattgttatactgaatttagtggtaggttggtattacgacctgcaaaacttaggtttggttatatgtttctttactggcctgtaggtacgacgttcttacatactttaagtaccttgacacattgagagtattagaaggtgtctgatcaatttggatacttgctgatccaagccataggtatttgagcttgcaaagaggtgcgtttaccaggcagtgagaacaaatggtgttaatgttaacacaaatattaagggcacactgacaaagaagaggaaagtggcacataatgctacgaagaaaggaaaagaaatcggtagtggctcttggccccttcattttgcaggtggtatatgtttttcgaaagaattttagtgtaacagacaccttctgatactatgcagatggtatatgtttttttaaagaatttttgaaagaattcctgttgggtacatagtggtgtagaagcagggccagtctcataactatctgctcgttccagtaattaagttaaagtaaatgccagtaaacaagttaagaaaaattccatcatggaggatagaattgtccaagagttactttcttgtatgttgtaaggcctttaatgacatattacgaataaatagtatgcagatgttaactgtaccagttatgcactgcctttattccttatatttctgaattgtatacatatgcttcaacctgtctgtcttaaagcctccatgtcttacttttggcaggttcctccaagagaatccagagtatgttgcacagggtgtaactttagctcagttttcgttccagatacctatacctctgcggcaggactatgtcaaaaagaaaccgaagttgataaatgcaagtgatgaagcaagtacaattacctctaagtcttctgaaccagacgaagtgaaccctatagcctgggcagttcctacaaaacatgagggcgatgccagtgaagaagcttctctcgccgatgagacacttgcatcagaagtagtgctaacccggaagaggaaaataggaagctctttgtcagtagagccaaaccatctctctgatgaacttgaaccaaagttggaggatgcttagaacggggagacgtctaactgaaaagtaaaagtgggcagcgtcgtgatgccaacttacccccctgccatggttttattggtcctctgcttgtttctcgttttccttgggagttagcttctctgttttatgtggtcgcacacggccttatttgtagtattacaccacaaaagctggctgacccccactgagggagggtgattgatgcaagcattgtgtatgatccttggacaagggaatcacggatgtttggttttgtcaccatggctgctactaaggaggcagatcactgcatcaaatatctggactgttctgtgttgcaaggtcaggtcataattgtttagaagtactctacacagaacattttattgttttgtcttcaccaccgagaatccaagagcgcctcccatagcctccacatccacaaggtcctgcttgactgcgacgacgtccaggctgatgccctcatcgtggatcgactcgcctcgctctagaaggagtggcccctctggagttgaatatgcagttataaccaatttttaccccttttatcctagaagagttgccaagacacggtataagaccatgataatagactaagagaggatttgtctctaattattatatgttttatttatgcagtcccatgagaactttgagtatttgcagattgatttattaatatattaaagttaaagattgtatgtgttgagtatgtatccattcttgttggaagtgtcttgcaattccaatccaaggatgtataaaagactgcatgggctaagtatgtgttttttcatgtatttggagtatatatactttttgttgcttgagaacatgtatgtacatacatagaagcttgtcaattgtgtgaacttgagttgatccctgtctaacctgagtatatatatatattttgttgcttgagaacgagtatgta

SEQ ID NO: 3343 - DNA, 4332 bp, Zea Mays
gtgcgtcctgttcacccacgacgacccacgacgcctgcgtcggccctgcccgaactggcgtgcagagcagtgctccacgacgccgccaccacctgccccagcagcggcacgctccgacaacggcgaccatggcggtgcgggcgcggcggctggggagtctgttccctgctagatccagtagatggctgactcatcgaggccctccgtgaacatcatctgcgccggtcgtctgctcggctgcagtggattaggaggcttggtgtggaggcgctcagcagcgggtggaagttcccgtcaaggagtctgtcccgtcaaggagaccgtcgtgccctggacggagtcagagcaagagtcgatcaacattttcctcacgatgattgagcgacacaggcacaattcaccatgatcccatcccccactcaaacctgcaaaatcctgtagccgaacatctcgatggtctcacgtgccattcctttctacaggaataggcctataactgatttcaataagtttatgctgcatttcattcagtgtgtttggatgcatatagagaacacgaagtttaatgtgtttggtgcataatgagaattgaggaaatgggacattctagcatgctatgtgaattgtgaaaggctatagattaatgtgtacaggtgggaattcattatcggtttactaattatatagctgtttttccctattatctctctcaatttactgtgtataatgtactactaatctggaaattgatgtatgatagcattttttatgttggaactgcctacatttatgttggtgccgctcccacgagcgcaccaggacgccggcttggaggtacttgcacacaagggtcgagctcggacgtcgtagcggtgcggagggcctcggccgtagcatgccccgccccgccgcgcatgcctgcgcggtcggtgtcccgcagcacccacaccgagtggcctgtcttcaaagtcgtcctcatcctctcctcctggctcaacgagaccatcaacgtctggatgttcatagacctgctcgggttcatgctgttcttcgacctcaccctggtgcacctcggccagtacttcaccaaggtgtctggtatgattgggcacctctcctgctccggcgaccgagctccaaccagggacgtctagcgctagcgcccaggacgcacgaccccctgctcctctatcctcagcgccgagcccctccgtcctgtttctggcagcgaaagcccagcccctgcggcaagctacctactcgatggaatgcccagccgcttgtcggatctacgcagcccctgcgcgacgtcacaaactccgaacggttatacgcgcctcacacaagcatgcgctgaatttctcgctttcccaaccctatcgttttttgggtgtgtatggttttcccaggcagtcaggcgggataacaagcagaggtttagtctgttggaggaagatggcgagctgttgatccgggcgaaccagggacacacactaaaaaaatatagtctggaggtgacctcaatgtaattcaattagtgatggaacatttgggagtctactcattatgtatttcttctatctggaaaaacactcaagggatctttgtttagaggatggagacctaaatctgaccgaccttcattggtggataaatatgcagaaaaagagattcagaaggtcttggacatcgccgacgagcgtagcctcattgacaccatcttcttctgctacctcgggtgcaatgcaagctaaggtggtcgacaatggtgttcgcggcggcgaactcgcagcgcagccaggtgatgaagccatcgcgctcgtcgacgagccaggcgacgggctcggccacggcggtgccgggggccggcgaggcgatgacggcggcggtggaggccatcgccgtgcgtccctcaccactgcgggccgcagcatagcccagccagcaatgccgaggtccatcaccactgggaaccgtcgtccggaccctctcccatcccgcacccattcctgtcctctgtctctgcgatgcgcttagcgccctcaccacttccacctccccagcctggctagcagcggcggagggaagaagtaccccactctggctagcagcggcggtggcagctcagattagtacggcgctgccccttcttcccccacctgtctttggatctacaaccgcccacccgtcttcggagctgttgtattcctccccacttgcttatctattcctctcaaaatagtgatggatttcggtcctcggatttttaccaatcggacaaatccagtgaattatgttgagaaattgttatactgaatttagtggtaggttggtattacgacctgcaaaacttaggtttggttatatgtttctttactggcctgtaggtacgacgttcttacatactttaagtaccttgacacattgagagtattagaaggtgtctgatcaatttggatacttgctgatccaagccataggtatttgagcttgcaaagaggtgcgtttaccaggcagtgagaacaaatggtgttaatgttaacacaaatattaagggcacactgacaaagaagaggaaagtggcacataatgctacgaagaaaggaaaagaaatcggtagtggctcttggccccttcattttgcaggtggtatatgtttttcgaaagaattttagtgtaacagacaccttctgatactatgcagatggtatatgtttttttaaagaatttttgaaagaattcctgttgggtacatagtggtgtagaagcagggccagtctcataactatctgctcgttccagtaattaagttaaagtaaatgccagtaaacaagttaagaaaaattccatcatggaggatagaattgtccaagagttactttcttgtatgttgtaaggcctttaatgacatattacgaataaatagtatgcagatgttaactgtaccagttatgcactgcctttattccttatatttctgaattgtatacatatgcttcaacctgtctgtcttaaagcctccatgtcttacttttggcaggttcctccaagagaatccagagtatgttgcacagggtgtaactttagctcagttttcgttccagatacctatacctctgcggcaggactatgtcaaaaagaaaccgaagttgataaatgcaagtgatgaagcaagtacaattacctctaagtcttctgaaccagacgaagtgaaccctatagcctgggcagttcctacaaaacatgagggcgatgccagtgaagaagcttctctcgccgatgagacacttgcatcagaagtagtgctaacccggaagaggaaaataggaagctctttgtcagtagagccaaaccatctctctgatgaacttgaaccaaagttggaggatgcttagaacggggagacgtctaactgaaaagtaaaagtgggcagcgtcgtgatgccaacttacccccctgccatggttttattggtcctctgcttgtttctcgttttccttgggagttagcttctctgttttatgtggtcgcacacggccttatttgtagtattacaccacaaaagctggctgacccccactgagggagggtgattgatgcaagcattgtgtatgatccttggacaagggaatcacggatgtttggttttgtcaccatggctgctactaaggaggcagatcactgcatcaaatatctggactgttctgtgttgcaaggtcaggtcataattgtttagaagtactctacacagaacattttattgttttgtcttcaccaccgagaatccaagagcgcctcccatagcctccacatccacaaggtcctgcttgactgcgacgacgtccaggctgatgccctcatcgtggatcgactcgcctcgctctagaaggagtggcccctctggagttgaatatgcagttataaccaatttttaccccttttatcctagaagagttgccaagacacggtataagaccatgataatagactaagagaggatttgtctctaattattatatgttttatttatgcagtcccatgagaactttgagtatttgcagattgatttattaatatattaaagttaaagattgtatgtgttgagtatgtatccattcttgttggaagtgtcttgcaattccaatccaaggatgtataaaagactgcatgggctaagtatgtgttttttcatgtatttggagtatatatactttttgttgcttgagaacatgtatgtacatacatagaagcttgtcaattgtgtgaacttgagttgatccctgtctaacctgagtatatatatatattttgttgcttgagaacgagtatgta

SEQ ID NO: 3344 - DNA, 4629 bp, Zea Mays
cccacgacgacccacgacgcctgcgtcggccctgcccgaactggcgtgcagagcagtgctccacgacgccgccaccacctgccccagcagcggcacgctccgacaacggcgaccatggcggtgcgggcgcggcggctggggagtctgttccctgctagatccagtagatggctgactcatcgaggccctccgtgaacatcatctgcgccggtcgtctgctcggctgcagtggattaggaggcttggtgtggaggcgctcagcagcgggtggaagttcccgtcaaggagtctgtcccgtcaaggagaccgtcgtgccctggacggagtcagagcaagagtcgatcaacattttcctcacgatgattgagcgacacaggcacaattcaccatgatcccatcccccactcaaacctgcaaaatcctgtagccgaacatctcgatggtctcacgtgccattcctttctacaggaataggcctataactgatttcaataagtttatgctgcatttcattcagtgtgtttggatgcatatagagaacacgaagtttaatgtgtttggtgcataatgagaattgaggaaatgggacattctagcatgctatgtgaattgtgaaaggctatagattaatgtgtacagcattttttatgttggaactgcctacatttatgttggtgccgctcccacgagcgcaccaggacgccggcttggaggtacttgcacacaagggtcgagctcggacgtcgtagcggtgcggagggcctcggccgtagcatgccccgccccgccgcgcatgcctgcgcggtcggtgtcccgcagcacccacaccgagtggcctgtcttcaaagtcgtcctcatcctctcctcctggctcaacgagaccatcaacgtctggatgttcatagacctgctcgggttcatgctgttcttcgacctcaccctggtgcacctcggccagtacttcaccaaggtgtctggtatgattgggcacctctcctgccattgctcccttcgtccccagctccggcgaccgagctccaaccagggacgtctagcgctagcgcccaggacgcacgaccccctgctcctctatcctcagcgccgagcccctccgtcctgtttctggcagcgaaagcccagcccctgcggcaagctacctactcgatggaatgcccagccgcttgtcggatctacgcagcccctgcgcgacgtcacaaactccgaacggttatacgcgcctcacacaagcatgcgctgaatttctcgctttcccaaccctatcgttttttgggtgtgtatggttttcccaggcagtcaggcgggataacaagcagaggtttagtctgttggaggaagatggcgagctgttgatccgggcgaaccagggacacacactaaaaaaatatagtctggaggtgacctcaatgtaattcaattagtgatggaacatttgggagtctactcattatgtatttcttctatctggaaaaacactcaagggatctttgtttagaggatggagacctaaatctgaccgaccttcattggtggataaatatgcagaaaaaggtatttctgttttttgagaaacaaatgtttgaaaataaattaagattcacaatagtaatatatccgcactttttgtgttatgtgaggtggagtcaagtggaaagatgatcttaaatatacatgttgtcatcttgtatggtgattatgtagtaaaattgatggcaagaaaactactggttactatgactaacacaaaataaaacgttctttttaaaaaaaacttgggtataccgtatactgttattttgatactatggcacttctgtcatgttatatgttttctaaagaatgcttccctgaagcagaacagtcatgttcattatatttcagttatgcatcagtatttgcacttgctaggttgatccttgatttctatggaattcaagtgttggacggatatgtacttatggactagctcagttttggagattagttgttttagttgtttttgtgtcatgtcttctataaagcaaataagttaccatggatcaattttgtgtcagaaggtgactatatcatctctgacaattggaatttcagttgtgagaagctttggtgatagatttttgatatatttctggtttgccactttgtttgcttgtttttttgcatgttttgaacttgttttattattgttaggtgaagcttcaattgatgatatattcttgtcagtatgctctttttgtgcaccttgtttttaatctctggcagaggagaccttcacctaaaaaacaaagatatatgttgaaatggttctttttaaaagattgcaacgtgatccgggtgtcagagattcagaaggtcttggacatcgccgacgagcgtagcctcattgacaccatcttcttctgctacctcgggtgcaatgcaagctaaggtggtcgacaatggtgttcgcggcggcgaactcgcagcgcagccaggtgatgaagccatcgcgctcgtcgacgagccaggcgacgggctcggccacggcggtgccgggggccggcgaggcgatgacggcggcggtggaggccatcgccgtgcgtccctcaccactgcgggccgcagcatagcccagccagcaatgccgaggtccatcaccactgggaaccgtcgtccggaccctctcccatcccgcacccattcctgtcctctgtctctgcgatgcgcttagcgccctcaccacttccacctccccagcctggctagcagcggcggagggaagaagtaccccactctggctagcagcggcggtggcagctcagattagtacggcgctgccccttcttcccccacctgtctttggatctacaaccgcccacccgtcttcggagctgttgtattcctccccacttgcttatctattcctctcaaaatagtgatggatttcggtcctcggatttttaccaatcggacaaatccagtgaattatgttgagaaattgttatactgaatttagtggtaggttggtattacgacctgcaaaacttaggtttggttatatgtttctttactggcctgtaggtacgacgttcttacatactttaagtaccttgacacattgagagtattagaaggtgtctgatcaatttggatacttgctgatccaagccataggtatttgagcttgcaaagaggtgcgtttaccaggcagtgagaacaaatggtgttaatgttaacacaaatattaagggcacactgacaaagaagaggaaagtggcacataatgctacgaagaaaggaaaagaaatcggtagtggctcttggccccttcattttgcaggttcctccaagagaatccagagtatgttgcacagggtgtaactttagctcagttttcgttccagatacctatacctctgcggcaggactatgtcaaaaagaaaccgaagttgataaatgcaagtgatgaagcaagtacaattacctctaagtcttctgaaccagacgaagtgaaccctatagcctgggcagttcctacaaaacatgagggcgatgccagtgaagaagcttctctcgccgatgagacacttgcatcagaagtagtgctaacccggaagaggaaaataggaagctctttgtcagtagagccaaaccatctctctgatgaacttgaaccaaagttggaggatgcttagaacggggagacgtctaactgaaaagtaaaagtgggcagcgtcgtgatgccaacttacccccctgccatggttttattggtcctctgcttgtttctcgttttccttgggagttagcttctctgttttatgtggtcgcacacggccttatttgtagtattacaccacaaaagctggctgacccccactgagggagggtgattgatgcaagcattgtgtatgatccttggacaagggaatcacggatgtttggttttgtcaccatggctgctactaaggaggcagatcactgcatcaaatatctggactgttctgtgttgcaaggtcaggtcataattgtttagaagtactctacacagaacattttattgttttgtcttcaccaccgagaatccaagagcgcctcccatagcctccacatccacaaggtcctgcttgactgcgacgacgtccaggctgatgccctcatcgtggatcgactcgcctcgctctagaaggagtggcccctctggagttgaatatgcagttataaccaatttttaccccttttatcctagaagagttgccaagacacggtataagaccatgataatagactaagagaggatttgtctctaattattatatgttttatttatgcagtcccatgagaactttgagtatttgcagattgatttattaatatattaaagttaaagattgtatgtgttgagtatgtatccattcttgttggaagtgtcttgcaattccaatccaaggatgtataaaagactgcatgggctaagtatgtgttttttcatgtatttggagtatatatactttttgttgcttgagaacatgtatgtacatacatagaagcttgtcaattgtgtgaacttgagttgatccctgtctaacctgagtatatatatatattttgttgcttgagaacgagtatgta

SEQ ID NO: 3345 - DNA, 1464 bp, Zea Mays
caggaaattgacccttgcaagagtattagtgatgaagatattcgcacgaccatccagaattctgggggtccaaaaggggctatgtttctgcccgaggtaccatttgagattcttgtgcggaagcagataggtcgcctacttgacccaagtcttcagtgtgcccagtttatctatgatgaattaatcaaagtatgtccacagtgcttaatcagcgaacttcagaaatttccagctcttaaaaagcggttgagtgaagtcgtttgcagtttcttgagagatggtcttcgacctgcagaaacaatgataacccatatcatcgaaatggagatggattatataaatacttcgcacccaagctttgttggaggcaccaaggttgttgaacttgcaaagcatgaagttctacctcccaaaacatcagcttcactatcaggtcgtaaggatggtactattgttggttctgagatacaattagcagccgaaagaagccaaaagtcacgtgctgttttcgcaagagatgcaatcagaagagtaacatctgaacaggcttctgtggaagcaggtaattcacaggttggtgagagttcaagcaaattaccctcaatcattcctctaaaagagccacccattaccttgaagccatcagaaactgagcaggatgcaacagaggtagccgttgtaaaactattgatcaaatcctactatgacattgtaagaaaaaacattgaggatgcaatcccaaaagctgtaatgcactttctggtgaaccatacaaagcgggatctgcacaacttcctaattcgcaaactatatagagagaacctgctcaatgaattgatgagggaaactgatgaagtacttatgagaaggcagcgtatccaagaaatgcttgaaattcttgaacaggcacataggacacttgaggaattcccctttgaagttgataagcttgagaagggctacaaccttactgaacatgcaactggcctgtcaaaaatccatggagtcagcggggacagcacaaatgtcatttacacatcctcccctaattgctactctccacatcgagcgtctcatatggtcctatagagcagcatgtaccagtcaccaatggagcttacctttccgcaacagtggtatgtacctgttgccaatggagcttgcctttccacaccagtgttacgcgttaccgatggagcttgcctttccgcagcagtgtatggtagtcaccaaatgacctttgatcccaattcttgaggtttttaagcaatgagcttgagagttacctgtaaattctagttttgctagggagcaaactgctttctagtagaaagctatttgctggtagagaactttaattgtgtattcttgaaattgtcacagccgacatcaatgcggtagtgaatatgggcaacaaggtagttgtatagggctatatccaacataccaatttgccctagttat

SEQ ID NO: 3346 - DNA, 2065 bp, Zea Mays
gtcccactcgctctatcgtcatctccaccaagtcgaaaaaaaggaaaggggcaaatcagcggcggcggagcaaaggaaagcttttggcagatagatggtggataaggtgaaggtggttggtgcccctggaaaaaggaagaatgccttttgcggggatagcttcggaaggatgactgcaggtggtggcgctggtgcttggttgcctagggtttcaggccagccggctgacttggaggcggcaagtgtaatggctactgagagtgctgtcagattaattggtggaacgggagctagggactggagtaagggatttggtgcattcgactcttcagtgggtgccctttcaggggaagacttgggatttgtagataatgatgctggggtttatgggggctggagcaaatctgttccaaatcgcagtggaagcgcgccacctagcatggaaggatctcttgctgctcttggccatctcattggccagcagagtgggagctttgaagctagtttggcaaccttggataacataactgacagttccaagtctgaggagcaagtacttgctgatccagcatattttgagtattatggctccaaggtgaatctgaatccaaggctccctcccccacttatttcaagggagagccgccgattaatgaaccgtgttggcaaggccaaagagtggagggtggtctctcaagataacagcaacaaagactctatatacattcctcgatccacattgtcaactcacaaagaagaacctgaggatgataaatctccaagattggatttaagttcagtggaggatgcccagattatctccagtgcatccaactttcagagccaggattttatgctggctcttgaagttatggaacttgaccagaaaatagatctagttcatgagcttgatggacatgttatgagatgtgttcgtgatcaaaatggaaatcacgttatacaaaagtgcattgagtgtgtccctacagaacatattggttttgtagtatctgcttttcagggacaagttgctagcctttcaatgcacccatatggctgccgtgtaattcagagagttttggagcactgcggtggtacctcacaaagccagtgcatagtagatgagatattgcagtcggcgtgcgtccttgcgcaagatcagtatggcaactatgttacacagcatgttctagaaagaggaaatgctcatgagaggagccaaattattattaaattggctgggcaggttgttaccatgagccaaaataaatttgcatcaaatgtgatagagaagtgttttcaacatggtgatatggcggagcgggatctcttgatcaggcagattgtggagcagacagagggcaatgacaatttgctggcaatgatgaaggaccagtatgcgaattacgtggtccagaagatactcgaaacatgcaatgagaaccagcgggaactcctggtcagccgtgtcaagggccacatgcaagcattgaggaagtacacatacggcaagcacattgtaagccgagttgagcagctctgcggcgacggaaccgccgagccggattcttgaaatgaacccgcctaattcttcccaggccaggggtgtgagggtgtcttgttcttttgctcagtccatcagtggagaaagcagaacagatcaagtccacctctggtgcttccaaacagactaacaaaactgtcatcgaagattgtataggtgtgactcgcttcaggatagtcttgaggttctagaacaggaacttagtggtgtgcatcagtgtatctatgttagggtgtgcctatttacagaataacagtggttggctagctgtgtgcagaagggagtttagcgttatggtttgtatgtgatacatattatgcctggtaatgtatttgctttcttgcatcgccagttgtggggtaaatgcaatgttcacgcattgtcctgatatctcgttcagttcaagttgcgttttctacatggcaatggaggccagctgcatcattttttttggtttggtgaaaaaagaaaggttgtaccttcgcaccagttaggcatgac

SEQ ID NO: 3347 - DNA, 1688 bp, Zea Mays
ttccgttttcctcttcttcgccaatccaactcccgtcttccttcttcctcttccttgttcgaatccaagtaacctacccaaaccgccaacccccaccccaaggaaggaaccctagtaccctacccgtgagaaccgccgccgcacaaccccggacgtggtggcaggcgaccgatccggatccatcatcccaagcttcctttctgtctcctcttcatccatctccacaaggataatcaaggaaggaaggccatggttttgttcgaacttgacccggacatcatccgatggggtcttcaccatctcctccccgctccggctggatactctcctcattgtcgcacccaaaccacccctaccacaccttgtacagcttttgctcgccctcctcatcagcccatcggagacatgggtacctcaagctccgttgagatcaaggtcgagcatgtcgatggggttgacaacgacgcgatcatcgcacaagccctccaggaggaattgtccaatgtcgccttcgccgaagcgtccgggccaacctctgccgctgacaatcaacaacattctgctgttctcacgcagcaatggcttcgcccacgcgccgtgcatgtagaaccagaggcagggaccagggaggaacctttcagcacctgctcaagccctggagatgacaataacgtccaggacagccagcaatgcttgatagagctcatggataacttctctgtcattgacggtgaagtgggcaaaagattgaacaacatggttcctgttcctcatgttcctaaaactaatggagagattccttctgttgacgaagccatttcagatcatcaaagacttcttgacaggttggtggtgtacggtttggttgatctcaaggttaaaggagatggcaactgccagtttcgagcgctgtcagatcaattttaccgaactcctgaacatcacagatttgtccggcagcaagtggtgaagcagcttgaatcgcatcctgagatttatgcaggatatgtccctatggactacagggaatatctcaaaaagatgtcaaagagtggagaatggggtgaccacgttacattgcaggctgctgcagactcgtacggtgtaaagatcttcatcctgacatcattcagagatacatgttatattgagattcttcctgttgttgagaaatccagaagagaggttttggctatctaaactcagaagtcctgttgtgcagttatatgcttgagtttttgggctgaggtgcactacaactccatatatcctgaaggagagttgccggttttggagtttgacaacaaaaggaaaaggtggtggcccttctagctaggattcccaggacagactagatagagcagctttaacagactgaggcctttctgttgggctgtgacactgactgatgacgaaaacgagcccatgggtggtggacggaactgcattggccttgccctccttgcccacacgatagacatgtacagtgcgtagtagatggtactatttgcctacttggtaacccattctcagatatatcttttatctctattactataataaagcaccaacacgtaatgggccgatacgggacgatacaatcggtctgaatgggccgatacaattggtttgagtagccaacgtgggccacctccctccttccggccaccacccttcccctcttctct

SEQ ID NO: 3348 - DNA, 714 bp, Zea Mays
ttgctttcttgcaatggggagggaggatccacttcatcctggctgttgtccggcaaattcccgaggttcagagcagtccatctgtgttcataacatttatagcttggagcatatctgaggtcatccgttactctcactatgctctgactaccttaaaagtttgtccagcatggctgacttatctcagtgtggacaatgtaccaagccctcccgtttgtgaagaagagggacctttactcaggtttcttcgagaagttctccatgagctaccgttcctttctagtgggtgtgctggtgctctacccgttcctgtggctgaagctgtaccagcacgtgttcaagcagcgcaagtccaagctggggaaggggagcaggaagaaacgggcctgagaaaatctggctctgctcagctcagctgccacttgttgctgtcatgtgaaacgctaacgggtcattgtggatttttgttttggaagaaaatctttgtgagttgttgtctgatgcgacgggggcagttattggattacgctttgggttctctgtttgtttcaattgctctgcgttttatgtctgtattaacatacatcaagcatatataatagtcatgttgctgctgcgagtctaatcaatcttgcgatcctggttttctcgctcaattgcctacactgaatgaggctgatcacgctgctctgtgcctacagcaggcgattgtca

SEQ ID NO: 3349 - DNA, 880 bp, Zea Mays
cggcggaccgttgcttccactactaatgcttcttttttttatctcctgaattcagacatgtgcgatccttgaaacggtccacgctgccatcggattggtgccgaccgcgccacttcttgctttcttgcaatggggagggaggatccacttcatcctggctgttgtccggcaaattcccgaggttcagagcagtccatctgtgttcataacatttatagcttggagcatatctgaggtcatccgttactctcactatgctctgactaccttaaaagtttgtccagcatggctgacttatctcaggtacactgcttttatcccgctgtatccaatcggggttggcccaggagaaatgtggacaatgtaccaagccctcccgtttgtgaagaagagggacctttactcaggtttcttcgagaagttctccatgagctaccgttcctttctagtgggtgtgctggtgctctacccgttcctgtggctgaagctgtaccagcacgtgttcaagcagcgcaagtccaagctggggaaggggagcaggaagaaacgggcctgagaaaatctggctctgctcagctcagctgccacttgttgctgtcatgtgaaacgctaacgggtcattgtggatttttgttttggaagaaaatctttgtgagttgttgtctgatgcgacgggggcagttattggattacgctttgggttctctgtttgtttcaattgctctgcgttttatgtctgtattaacatacatcaagcatatataatagtcatgttgctgctgcgagtctaatcaatcttgcgatcctggttttctcgctcaattgcctacactgaatgaggctgatcacgctgctctgtgcctacagcaggcgattgtca

SEQ ID NO: 3350 - DNA, 994 bp, Zea Mays
aaaccacagccacacaggcagccggtgctgggcctcggcactcggcagccatggttcgccttgcgaagttctatctcgtctgctacaactccctccaatcgctcggatggttcgtctccctcctccgcctcctgccctgcctcgtccctcccttccctgtccactccgcacatgtgcgatccttgaaacggtccacgctgccatcggattggtgccgaccgcgccacttcttgctttcttgcaatggggagggaggatccacttcatcctggctgttgtccggcaaattcccgaggttcagagcagtccatctgtgttcataacatttatagcttggagcatatctgaggtcatccgttactctcactatgctctgactaccttaaaagtttgtccagcatggctgacttatctcaggtacactgcttttatcccgctgtatccaatcggggttggcccaggagaaatgtggacaatgtaccaagccctcccgtttgtgaagaagagggacctttactcaggtttcttcgagaagttctccatgagctaccgttcctttctagtgggtgtgctggtgctctacccgttcctgtggctgaagctgtaccagcacgtgttcaagcagcgcaagtccaagctggggaaggggagcaggaagaaacgggcctgagaaaatctggctctgctcagctcagctgccacttgttgctgtcatgtgaaacgctaacgggtcattgtggatttttgttttggaagaaaatctttgtgagttgttgtctgatgcgacgggggcagttattggattacgctttgggttctctgtttgtttcaattgctctgcgttttatgtctgtattaacatacatcaagcatatataatagtcatgttgctgctgcgagtctaatcaatcttgcgatcctggttttctcgctcaattgcctacactgaatgaggctgatcacgctgctctgtgcctacagcaggcgattgtca

SEQ ID NO: 3351 - DNA, 1178 bp, Zea Mays
cgaaaccacagccacacaggcagccggtgctgggcctcggcactcggcagccatggttcgccttgcgaagttctatctcgtctgctacaactccctccaatcgctcggatggttcgtctccctcctccgcctcctgccctgcctcgtccctcccttccctgtccactccgcgtacgtggtcgccggcgacctcatctgtttcctacagacatgtgcgatccttgaaacggtccacgctgccatcggattggtgccgaccgcgccacttcttgctttcttgcaatggggagggaggatccacttcatcctggctgttgtccggcaaattcccgaggttcagagcagtccatctgtgttcataacatttatagcttggagcatatctgagcaatatcagagtagatagtctgttggaaacgaattgagttgatcagacggcaaactgttctcaaatctcaatgcattggcacacggatattcagatgaaaagcgtactaacatccattgatacacattgaagaaaacatcattaggtcatccgttactctcactatgctctgactaccttaaaagtttgtccagcatggctgacttatctcaggtacactgcttttatcccgctgtatccaatcggggttggcccaggagaaatgtggacaatgtaccaagccctcccgtttgtgaagaagagggacctttactcaggtttcttcgagaagttctccatgagctaccgttcctttctagtgggtgtgctggtgctctacccgttcctgtggctgaagctgtaccagcacgtgttcaagcagcgcaagtccaagctggggaaggggagcaggaagaaacgggcctgagaaaatctggctctgctcagctcagctgccacttgttgctgtcatgtgaaacgctaacgggtcattgtggatttttgttttggaagaaaatctttgtgagttgttgtctgatgcgacgggggcagttattggattacgctttgggttctctgtttgtttcaattgctctgcgttttatgtctgtattaacatacatcaagcatatataatagtcatgttgctgctgcgagtctaatcaatcttgcgatcctggttttctcgctcaattgcctacactgaatgaggctgatcacgctgctctgtgcctacagcaggcgattgtca

SEQ ID NO: 3352 - DNA, 3694 bp, Zea Mays
ctctcggcccaaacagccaccaaccagacacggcccagcctcatacacccgcgcccgctgacactgctccctgccaactacccttcggccttcgcggcttcgcgtcgcccacccacgactcgtcgtacacccggtccgccctccgtcgctgagttcgttccccttcaccctcccccaccccctaccccgatcgcgcagctacggcgaaaccctagcgacgaattccccaccgaatcgaggattccaaggttcctaccggggcgagcgcgggggcagcattccgggagcggttgatggcgacctgccgcaagacggcgcgcgtcgatgtcaccgagctgaagcagcgcctggtgaagcgcctgggtcgggagcgggcggtcaagtacttcgcgcacctcgccaggctgctgaacctgaagctcaccaaggtggagttcgacaggctctgcttggccaccatcggcaaggagaacatcgcgctgcacaacgcgctcattagggggatcataggcaatgctctgtcgggggtgcctccgctcagccggcaggcggtgacggggcagtcgggcaccaccaccgcccccagcgggcagtgcgtgggcgttgcgctgccggtggtggagaatgtgggggcagtggttgattcgggtgatggcgagctggcgagggagcggggggcgccggtggggaagctggtgtccgtggaagatggggaggaggtggagcaggttaggtatgctccgtgtgtccagagccggagcccgataacagcgccattggggatttcagtcgctgggggcagtggtatgagggtaaggaggaagttggatgattcagtggtgtcatgctatgattctggacaattgctggatacgggttctctgtgcgagggtttgcagcggtggctgtacagtaacggcactggagtgacggtgcaagccgtcgatgctttgaatcatgggttagatgagctgttgcgaagattgattaaaccgaccgtagatttgtcgagggtaagagccagcagtagaagaattagcaaagtcaatcaaaagtttgctggtagaatgaattctttgcaacatccaaatcagggtcagtgtacaacgttgcaagattttgcagttgctgtgcaatctgatccacgtttgcttggtccaaattgccccacgcaaatcgagaagatacaggcaatgacatttggaggggaatgatacatagtagcccgttatagctgatgaatttctcaaaaggagatgctgttagctggcattgaagtaaatgaagcggcagatccaacagcgctacaaaatctgagtattgcagcactcacggagtcacgggcaagaaataccaaggcccaacaagtgaacaaagggtgatgcaatggacagtgtagcataaattcttttttgggaatatatagcccgtcgataataaatcgaagaatcaatatggttggctgatgtccaggtcaagctgagtaactccttgacaaacatactctcaactcttggcacagactatgttccggtagtacttttagagatttgttgcgatgttgtaatagagcattttcctcttattacagacttaaatgtaatcatttttctcagtgatcaatgatcataaatgatgcctttaatggctcattgctcctgtacattgtattcagattatggcaatgaccgattgcaattaagataaaagtttaaccctgttgaataaatatatgttttttatgcccaaggacttcaaattctctcctatggctggaatataaatgttctaaacatgcattcatccaaatgagttacagttgagttgccaggaattatgatatgtacttttctaatcgaatcaaatttctggttctctggtgtgttgatttcgcgtctattactgtagtttcttttattctagcatcaaagagtttcatattctgttttggaattttgcttgaatacactatgcaccttgttctagtatccatgaactgcgcaaaagttattcaaatgtttttttgttaacattttttaatgttttcttggagttggtattctttgttgtgattttttcagcacccggttcaagccaaagattgcatcagttgctttgggacaaatgtcttagtttagtaatttgggttttattttgagtttttgacacaacttatgctttgtttctgtacgccattacaaaactttgcttgtcttgagcatatttttctttttattatctcactgaagtggtatagacatatagggctgtaaaaaaaaaaggattttaccctcttagaatggtaagctcgagttcagactatcctcttttgttgagaagcatggtgtctttgtcgaactttttgctatgttcttagcatgtcaaatgttgttatatagtctaatttttcttgcatatgatgtttatttatcagttgacttgtttttttgacgtttccacatatctatagtgcccgctaggaaccttggtagccaggatgacagggctgaatgctaccaggtgcttgctatccttattgaagctacctggaataaccagctcaaattaggtttggttcacaagcagcttacacggttacactgtacttgaaacccccaagtttctgctgtctcagatctaagaacccatatgtgattgagaaatattatccttttaacctagaggaaattacctgaattcttatgtttagctgaccattatctcgagatcttgtactttttcagttgtcttgcaggttagtggttcgtggattgcacgtcatgcccatggacagcgatggagattcagcaagggctctggagtcacacactgtcatgaagtgcaggatttctgattagtgctgcttaagcgtagcttatggtatttcactgttcccaggtgagtaaaccaagaaagttatgacattgccactaagaatgtcagagtggtaaactacaacacatttttctaaacagtaatactaagagaggttggaagagtaatgacaatttttgtgtttgtgctatcccataatcaaatgatcacatttccttcaaatgtgtcttaggtaagttgatttgacgattctgtaagttgttttcaaatgggaatctgtgcctcttatctcctaaggactttcctgagacttggctttagggcaaggggcctctaccaattagattaatcatgtttctggttttttttttttttttgcgctctttggatcactaggaacaagatgggcagatggtcatcgaaaagagattctcgaagtcacctactgatgtagtctatattgctatatccttgttgtagaagtggaatgtgttgctaaaggaggtgaatcaggagcgtagcatccatgtgaagcgcgaggttatctgctggatgaagaactttagcccttcggcttttatacccacggatgtctacgggatctaaacctggtaatagtagtctcttttacttctctctgtaaaactagagttcctagtattgtgtacctcatactgctttcataaaagctgggttcttcctctttaaaaaaaataataaatactcgtgtcattactgggcgttggtttagtttccttctattttcccatgtacgccatctcgagttatatagattccgcgatgtaatctgttgtaacagaatatacagttatattgctgattagcagtgaattgaggt

SEQ ID NO: 3353 - DNA, 2286 bp, Zea Mays
ggtggattgtggtgtaattgtggtgttaagcatgcacgcaggaggaggtgaacaaggcgatggacgcggccaaggtcgcgcagaaggcatgggcccggacgccgctgtggaagcgtgcggagctcctccacaaggcggccgcgatcctcaaggagcacaaggcccccatcgccgagtgccttgtcaaggagatagccaagccggccaaggatgccgtttctgaggttgtccggtctggggatttggtgtcgtacacagctgaggagggtgtgcggatactcggggagggcaagctgcttgtttcggatagcttccctggtaatgaacgaaacaagtactgtctgagctccaagataccccttggagtagttttggcaatcccgccgttcaactatcctgtcaacttagcagtttctaagattggcccagcactaattgcaggcaatgctcttgtgctaaagcctccaactcagggcgctgtggctgcacttcatatggtacactgcttccacctggctggtttcccgaaaggtttgatcagttgtgtgactgggaagggttctgaaataggagattttcttacaatgcatcctggagtcaactgcataagttttactggtggcgatactggtatagccatttcaaagaaggctggaatggtccctcttcagatggagcttgggggaaaagatgcttgcattgtgctagaggatgcagatctggatttggtttccgcaaatatagtaaagggtggcttctcatacagtggccagaggtgcactgctgtcaaagtagtgctgatcatggaatcgattgctgatgctgtggtacagaaggttaatgccaagttggcgaaactgaaagttggcccacctgaggacgactctgatatcaccccggttgtaacagaatcctcagccaacttcatcgagggtctggtgatggatgcaaaggagaaaggagcaactttctgccaggagtacaggagagaaggcaaccttatctggccgttgctgctggatcatgtccgccctgacatgaggatcgcatgggaggagccttttgggcctgtcttgcctgtgattaggattaactcagttgaggaaggcatccaccattgcaatgccagtaatttcggcctacagggatgcatttttacaagagacatcaacaaggcaatcctgatcagtgatgcaatggagactggaactgtgcagatcaactctgcaccggctcgtgggcctgatcatttccccttccagggactgaaagacagtggcattgggtcccaggggataacaaacagcattaacatgatgaccaaggtgaagagcactgtcataaacctgccgtcaccatcctacaccatgggctgagatattcttgttaagtgttctatagctccatgagcaatgtagagagttaaatgtttcatagccacgtgagatttggacgctatttacacctcagttcttcctgcagaagatcttttgcagtttaaagaataaagtgcgttgaaagtatggagtcgatgcttttatatccttattactgttggcggtcaaatcctactaggttatatattatgttatgtctagatacatagtgaaagcgatacatctaaacaatcaaaatgtcttataatttaactttgaacaggagtacttagatgttagataccatcgctggacttgtgcagtgtatgcctaatatttcacctagaaagagttttgcttcgatatgctgcaaaatcaggacatacaaatgcatgggaaattgcaggtaaactttggtccagtcgaaccgaaaacgaaatcacccctttgtgatggaaaccttggatcatttgtttgtttcatgtgtgttcacacaggaattctggttcttttgggcgttttggtctacaaatttttgcgccacaacctggaataatttcctttataatttggtggaaagttatcaatgaggctgcacctggtccttttaaaaaaaaggatcgattcccttattgctttggtgcttagatgacctagaatcaccggaacaaatacgtttttttgatggtttaagccccaacatggctctagtttcaaggcaggcgggagtgtaggatgtgggagatagtcagatagctcgagccaaaggccttgccttgcagccatctctcaagtgcttaatgcagctagccaggtagctgctgtagattcctaatcagattatggatccttttttgtttatttgttttcggccaccttatggaggccttgtacctgtcctgtattggtc

SEQ ID NO: 3354 - DNA, 1423 bp, Zea Mays
agcaaaaaaatgccccacactcccacggtcccacccggcgtggcggctggcgtacccgtccccactcgtcgcccatcttccgtgacgtcaccccattctccatcggttcccttcctcgcctcggttcgcgggtacccgagtcgcagacgcacctcaatcgcaaccttttggactcgaaggggggcaatagacagcagggaaagaactgagcgaggagattcccaaggatctcgtcggacgctagaggaagggacgggggacaggcgatggcgggggacgccggcagcggggtggactgggagagcctggcggaggccacctccggggcaatcggctcgctcgtcagcaccaccgtgctctacccgctcgacatctgcaagaccaagttccaggccgagcttcagacgcaccagggcgcgcagaaatataggaacctttcagatgtgttctgggaagcgatttataaaaggcaatttttgtccctatatcagggccttaacacgaagaacattcagtcttttgtttcctcgtttttttatttttatgggtatagctattttaaaagactctacctggagaagagtggagcaaagtctattggaacaacagccaatttgttagttgcagctgctgctggtgcttgcaatgcaatcgtgacacagccattagatacagcaacttctagaatgcagacgagtgcctttggaaagtctaaagggctgagggaaactcttgcagaaggtacttggatggaagcatttgatggcttaggcatttccattatattgacttgcaatccttctattcaggtgcaaggtgatgattcaggctgcagaccctgatgaggatgatgacgttgattctgaaaggccaagcaagtcaagaacaccaaaaacaatgctaggtgccttgcatgctatctggagcaaggaaggcattccaggcttcttcaaaggcctgaatgctcagatccttaaagcagttctgagctccgccttgctgctgatgataaaggagaagatctcgaagttcacatgggtctcgttgcttgccctgcggcggtatcttttcgtttctcagaagaggatcaagagtgtaactgtataaatactagctccaaacatagcgacatcgtgcttctgtagatgttatgccaaggaattaatctgaggaataatgagcagaaatactgaagcaagagagtgtgtaaagtgtgtatgtgtgatcgatagcatcagagggctcttcaataagtttgttcattcttttttcccctctgaatctctgatagctagtgacacaggtgttgcacggatctgaaactggactgtacttttggctttggttgtctgtaatgtgtaaaatgaattgattggcacataccaagaggggttgtaagtcttgtgatatcacaccaactacg

SEQ ID NO: 3355 - DNA, 1931 bp, Zea Mays
agagcgagggaccggaagtgagagacggaccgaggagagagatagagagacaaaggggagagaccaagcgccagagacacagagaggggggcggaggagagagagggagaggggaatcgcgggagggaggcggggttttggcgagatttgagtttccccccacgctcccgccatggtgtccgaccaggagatcgccagctgcgtcgagtccgtcctccgtggctccgccggcgggcccggggaggcgtcgctcgccgccgtgctgcagcaggcggaggccacgctcggcgtcgacctttcccacaaggcgggcttcatccgcgaccagatggacctcttcttcggcccgcgcctccagccgcagcccccgtccaagccccagccggcgccttccccgcctcaggccgtcgttgcccccgcggccgccgtgccgcagcctcatgtcttaccgcaggtgcaggcacatgcacaggcgcagcagatgcagccgcagcagctcgcgccgctccagccgcagctcatcttccagaccatccctcagctctccgccatggcccccgtccccgcggtctccgcgccgccggccgtgccggccatggcgttctacccgccgccgccgctcgccttccgctacaccaccggcctcgctggggccgccaccggtgggaccgtctctttccagcagccgacccctggggctgggggcactgcttcccctaccgctgcaccgcaggtcgccggcgacaacaaggaaagtgcttctaagcgaaaaagaggtggacctggtggtttaaataaaatttgtgcaatttcacctgaacttcagaccattgttggtgagactgctatgtcaagaacccagattgtgaagcagctatgggcatatatcaggcagaacaatcttcaagatcctgatgacaaaaggaagatcatttgcaatgacgaacttcgtgtggtttttgaaactgacaccaccgacatgtttaaaatgaataagttgttggctaagcacataaccccacttgacccaaaagatcagcttcatgaagtaaaaagaatgaaggctcccacagtggttcctcaaccacctcccattaatcagcccagtgtagttatttctgatgcacttgcaaagttcatcggaacagatggaacatttcctcaagatgatgccctgaaatacctgtgggattacataaaagcaaaccaacttgaggatgtcatcagtggatcaatattatgtgattcaaagcttcaagagctctttggctgtgagagtattcctatgtcaggactatcagaaatgcttggtcaccacttcatcaagaaaacatagcaaatcctcgttaactggtcagtttctggctgtatctcctatttctagtgtcacatttgctgatttctgtccagatgtcagggatgacagtaatttttcccataaattattttcatgacggcacattgttacaagttatgaatctgttttctacctgttcatttgaacatattttgatgtaagttgtgctttgtcttattctgattccatacattgtgtgcagatctaggattgcagtttggcagataggcctaacattacaatatggtgttcttgacagaatggacagcatagcgtctgtatttcttcaatgttatggaatatgaatggtgtctggcaaagatcatattatttgcggtagaggtagcctgtgctttgttacgtgtgcaggccaccgctgcggcgtctggtggaacctctttactgaattcgtagtgctagttcttaaatgtcaaaatgtcatttctgactatgtaaagttgctttctatttgagtgccagattgtactcttaaaaaggaatttgaaggaatttctgtaggtaccgataatcttgttacttccgaattgcgaagatgaaatctttgaaggtcagc

SEQ ID NO: 3356 - DNA, 3604 bp, Zea Mays
ttgcattgatgcttgtggcgcagacgttatctgtcttcaggaaacaaaaatgcaggaaattaacagaggaaaggtgctggctattttgggaacagattttgatcagtatgtaatgctgccgtccgagggtgctagggggggaattctgatttcctggaaaaagcatataaaggtgacagggctgaacagagtggattcttatagtatctccttgcaattccagagaaataatgggcagtcttggtggctgacttgtgtctatggacctcaaagtaattctgaaaagatcctttttcttcaagagttaaggcatttcagaagcatctgctctgagccttgggtaatagtgggagactttaatctcatctacaaggttgaagacaagaataatgataatattaatagatctatgatgggtcgcttcagaaaatttatcaatgatgttggtctgattgatactcccctaattggtcgcaaatatacctggtccaatcatcaatcttcaccaacactggtccgactggatagagttctctgcactactgattgggaagcgttgttccctaaccatctccttcaaagtgctgcttcagaggactcagatcattgcccactgattcttggacttaacagtatgtgttctggcaagcgtcgatttcatttcgaatccttttggccaaaattggaagggttccaagaggtagttctggaagcctggaattcggttaatgaaagaagttgccctttcctgacattcgaactgaaattgaaatcaactgccaaggctctgcagagatggagtgctaagaaggtaggccatgtgtcctcccagttggcacttgctagagaaattcttcatcagctggagattgcccaagactctcggctcctgtctcctttggaggtttggctcttgagagggcttaaaaaacactccttagcccttgcctccctcaaacgcactattgcccgcctacggtccagaatcagttggataaaggagggcgatgccaactctaagcttttccatatgcatgctaggcacaggcaaaggaagaactttgttgccaagattgtgtcagggatgaacactttcactgatcacggcgagaaggctagagcagtagatgagttttatttcaaacttttgggctgcaaggcggacagatccttgactgttgatttggattacctgggtctaccttctcatgacctgactgatttagatgcgcagattgatgaaaatgaggttctggaatccataatgcaactaccttctgataaggctccggggcctgatggttacacaggcagattttataaagtttgttggccaattatcaagacggatgtgatggctgttattgctgcaatttggtgcagaaaattccagcagtttggaagacttaacactgcatttgttactcttatccctaagaaggagggggctgaggaagtaaaagactttcgacctatcagtctggtacacagcattgctaaacttgtcaccaagttgatggccaacagattgtcccaacgactgcatgatcttgtttctcttaggcagagcgccttcatcaagggccgtttcatccaagacaacttcatgctggttcagcagactgccagattgcttcaccagcaaggccaaccgagggttcttttgaagcttgacatcactaaagccttcgattctgtttcttggccttttttgcttgaagtacttcagagattgggtttcgggcagatttggagggatatcttaagtggccttttagcaacttcctccacacaggttttactcaatggagttccggggaacaccatcccccacaagagagggctgcggcaaggggatcccctctcccctatgctttttattttagtgatggacatccttggttgcattgtggccaaagctgatgaggaggggcagcttgagcctctctcttccaaaccactgcaccacagaatttcgctatatgctgatgacgcggttctttttttccacccaagggagagtgaaattcatactgtcctaggtattctgaatttgtttggagaagcttcaggattaaaaactaatattcagaaaagcagtgtgtatccaatccgttgtgggcaggatgagctggacatcctcaatgattggcttccttgtgaactttcgtctttcccatgcaaatatcttggtctacctttgtccttaaaaaagctgtccaataatcagctgcagcccattattgacaaagtggctgatcaactttctgggtggaaagcggacctcatgacacgggcaggtagaagagtgcaggttcagtacgtgatgactggcatgcttatatatctagtcatggcagttgacattcccacaggctcgctcaaagctatcgacaagatcagaaaaggatttctctggcgtgggaggaaagaggtcagaggaggacattgtttagtggcttggggaagagtttgtagacctcttgaaattggtggacttgggatttctagtcttaaagaactaggatgggccttaagaatgagatggttgtggctgcgcaaaacggatccggataagccttggtcctcattgcccatgcagatatccaacaaaataaaggcctttttttgcaccgccctgctcactgaaattggaaatgggtcctcaaccttattttggctggatcgttgggtccacggaaagaatattgaagatattgctcctcgactgcttgcagcggtaccaaagagaattaggaacagcagaactgtgcttgaggccttgacagacaggagatggctaactgatattaaaggggccttgacagtaggtgtctttgccgatctcctagatctctgggatgaacttcaaagtgtccagcttcattcagacagggaggacaaacatattttcaggttcgctaatgatggaatttattcagcgaaagcagcttacaaaggtgctggacagcagatcgtttgcagaagagaggtcttagccatcctgacaaatgtgtcctgtgtgaccaagagcaagaaaccatagatcacattttggtggggtgtgtttttgctaggagtttttggtttcagctgctgggacaggtcaacttatctgcctttactcctgtgatgggagaaactaaaatgatggagtggtggagcagaagcagtgagcagttacaggggattgctaaaaagggattcaattctttgattacccttgggctttggactctctggaaccacagaaatggatgtgtttttgatagagctacacctagcatggagggtgctatcagaagagctgaagaagaaattattatttggaattttgcgggggccaaacatcttgcccttattacagctcccattccaggtgtcatgtagggatctaggagtaagttcagtagttaacctcactagggaagggtgttggttggttaagtttagattgtgggggtaggttggtctagtttgctttctttcttctcctttttctttttctttttctttatatttctttttctgttgtgtttgtaattggtctaatttttagacccttcttcttaatacaatgatacgcagctctcctgcgtgttcg

SEQ ID NO: 3357 - DNA, 1246 bp, Zea Mays
gcgtacgagtggacgttcacgcgaccacaaactgtcgtattactatcggagaactcgagcagcggtcgcggccggccgtgcagcacatcagcacatcagcgggcgggagcagctcagaccgcagcgatgcaggggagcggcgcactgccgggccttaccggcaccgggcgcggcggcggcttcctcccgtgcggcagcctcggcaagcgaactcccgctggccgacgcggcgccaccagcgttcgcgccgtcgacggggcttccgttgcggccgccgcctccgcggccgccgattccccgctcccgcccgtgcaggtcacctggcagattgccgtcggtgctctagctggagtgacgcctttcgtcgttgcaggagtcgagttcggcaaaagaatcaagaaatgccaagtctgcggaggctctggtcttgtaacgaagaacgactattacgttcgatgccaaaagtgtggtggttttcttccgtggcagtcttggcgaagattcttcacggggtgaacgtggtctctgatcagtggtcttcagtactcaactagcgctgtaactaaggccccgtttggtttgggctaactaaagtttagtgactaaagtttagtcacttttagccactaaagaagcaaacatattgactaaagtggagtgactaaactttagttctttagtcaccaaatgagtgactaaaagggactaaagtagtatttttaccatatttgccctctacactttctttttatagcaaacatccattaattaataggggtaaaacagtcattattcacagcaattaatactctttagtccggtttagtcactggaaccaaacgggttactttagcgcctaaactttagtcactaaaatttagtttagtgactaaaggaaccaaacagggcctaaagatacaatagatggacatcaccgtgctttaaatgcctcctcactagaccataaatgaagcaatatgccgtagtccgtagacatgtagaattactcatgcatgttgtattttacaaaaggcatcttacataaactatattttgccccttatgtatcatccagtgatacaggagatgtgtctgaagtttggtataatgcggttaatgaaaccaggcagacttatagttgctacacaaatacagcaaactgaacttttgctgcaaaagctgaatgagaatatatttccttgtttgttgggttgtgggctagttcttgccgtggctttaatccggc

SEQ ID NO: 3358 - DNA, 1858 bp, Zea Mays
cgcacccaaaccagagacacctacggcgggtcggcggccgaccccggggccgcgcccatcccgacgttttcccgattctccggctacctcctcccttatctccttgcgcgtgacgcgcccacgactcctcgtcgtcctcttgtgatctggtccccatctcgctgccgcctcctcccgacttaccaaactccaacacgccatgcgaccatgcgctcatgcatagcatagatatagctgtagccaagctgcccaagcacgagcaccactcgtcttctccgaccttccagctctagctctgatccgagccgaaacagccatccaagacgcccgcggccgccgtgagcgggtgaccctctgcgctgcgctgcgtcaccacccaaatggatgacatcgccagcgaggcgcccgtgggggcgttcgccatcggcccatccacggcgctgggcggcgccgtcgcgctccgggtgctgctctgcggctccgcggcgcgcctgcgtcatcgtctagccgcggcactgcgcgccgcgctgcccgtcgcggcggcgtggctgcacccgcgcgacaacacgcgcgggatcctgctcgccgtctgcgccgtcgcgctcctgctgcggggccgacgcggcagggcggggctgcgggcgagggtgcagtccgcctaccgctgcaagttctggcggaacatgatgcgcgccgcgctcacctacgaggagtgggcgcacgcggcgcggatgctggagctcgaggccgcgccgcgccgcgccagcgacgccgacctctacgacgaggagctcgtccgcaataagctccgcgagctcaggcaccggcgccaggagggatcgctcagggacatcgtcttctgcatgcgtgctgacctgctcaggaacctcggcaatatgtgcaaccctgaactgcacaaggggaggctgcaggtgcctagactcataaaggaatacattgaggaagtatctactcaactgaaaatggtctgtgattctgattcagatgagttgcctctcgaagagaaactcgcatttatgcatgagacaagacatgcctttggtagaacagccttgctgctaagtggaggtgcttcgttaggatcctttcatgtgggtgttgttaaaaccttggtagaacataaacttctgccaaggatagtttcaggatcaagtgtaggctcaataatgtgttctatagtagcaacaagatcatggcctgagctggagagcttttttgaagagtggcattccctgaaattttttgaccagatgggtggaatctttcctgtggttaaaagaattttgacgcatggcgctcttcatgatataaggcacttgcaggtgcttttgagaaaccttaccagcaatctgacatttcaagaagcttatgacattactggtcggattcttgttgtcactgtgtgttctccaaggaagcatgagccgcctcgatgcctaaactatttaacatcacctcatgttcttatctggagtgcagtaacagcttcctgcgcttttcctggactttttgaggcccaagaattgatggcaaaagatagatttggtcaaaccattcctttccatgctccattcttattaggcatggaggaacgaactgttgctccaacccgccgctggagagatgggagcttagaaagcgatttacccatgaagcaattgaaggaactattcaatgtgaatcatttcatagtaagtcaagccaatcctcacatagctccactattgagactaaaggaaatcatcagggcttatggaggcagctttgctgccaagaatgcagaaacactttttattggacatgcttcagtccatgtaaaacatgaagatatttcttc

SEQ ID NO: 3359 - DNA, 615 bp, Zea Mays
acgaactaattatgtctactgatacacaggagagagccattcacctgggagatgttaattcctttgctgaggtacctcgctctgtcctccaggaagcaattatgtctaattctcttgctaagagggtaaagaccgaaaagcttagtcaaggggattccagaataagcgtcaagaggactaatacggatgaagatatattgacaaaagcacagcgcttgggagcaaaacgtaatctggaaaccagtcattttcagaggtactcattggttaaggttctggagacttctacagaagaaggaaacacatcaacaaattcttgatgtgtgtcaagccttggaagtggtggcgatggaagtctttgcgaatcatggatggcgatcaaatgcaagacttgagtgtggctagtgttatacatagtcacgatatttagttctatcaagttagctttattattcaagcacatgttcattgagttaataattgacgtgtaatggctgtacacatttgatgcaaaagccggaactctttgtttccaaaaaaaaagctaagtggccagtagctccaataaaatgttgtagaggaggctgaatccgcacaggtgttttgtgggttgaa

SEQ ID NO: 3360 - DNA, 3189 bp, Zea Mays
acgatcccccttctcgatccctacacgtctcctgaaacgcacgccctcccttggctgccccccgccccttccctttcgccccctctcgcgcaatttccccagcccggaccccaaccccggcggcgctgcagtccaccgcaagtcacctccacctcacgcgaggcctccagccctcgtcgccccgcgcttctcccccacgacccggccgccttcgcgcttgcgccccgcggatcgccggcgcgaccctcaggtgtgtacgtctggcatggcaagggacctatcaactggccctgctttctcttttcatgaatgatgtccttccgttcgaaggacgcacatgcacaaacaagacttaactggccatggagaagccaatcgccgttatcagcgcagctgcttgttgatattccacctgaaatagagttgtccgactaccggagattgccaagttctcgaagcgagagcccatctggacttctccatgacgaaggcgtcaaggaagaacctatccctgatctggacattttctttgaaaggctttacgaatatttctgcgcaaaagggctcaggtgtatcattaccaaatggataatagagatcctcaatgtactttttatggtatgctgtatcgggttctttttcttatttgttgattgggatactcttattcatttgaaatgcggtgtggaggcacttgagtctggggagaaaccatgtgatcttatgaaggccattaagcatgatccattagttcccttcacattgcccaaaatgataactgttggatcaatggtcataatgacagcttatggacttaccaactttctcaagttctttgtacagttaagaagtacactcaatgttcgtcagttctactatgacagacttaaggtcaatgatcttgagattcaaactatatcatggcccaaaataattgagaaagttgtcctgctccagaaatctcaaaaactatgtgttgttagggatctctcagagcatgatattatcatgagaatcatgaggaaagaaaattatttgattgggatggtcaataaaggcattctttcttttccaattcattcttgtgtgcctggggctggcccaactggatcacatgagcatggcaggagaaactatctgatacttccaaagtcccttgaatggaccttaaactggtgcatctttcaaagtatgttcgatagtaaattttgtgtaaggaaagagtttttgacaagcccagatgtgttgagaaagcgacttatatttgttggcattgcaatgcttatcctatcaccctgccttgtgatatttccattggtgtacgtcattctaaggcatgctgaagaaatttataatcaccctagtacagcatcatctagacggtggtcaaacttatcaaggtggatctttagggaatataacgaggttgatcacttctttagacacagaatgaacaacagcgctgttcattctttaaattacttgaagcaatttccaaccccactggtttccatcatggctaaatttgtatcttttgtttctggtggcttggctggtgctctaataatcattggatttgtgggtgaatctattcttgaaggacatatttttggaagaaatcttctctggtatactattgtttttggaacaatagcagctataagtcgaaaagtagtggccgatgagcttcaagtttttgacccagaaggggccatgtgcctcgctgttcaccaaacacattacatgccaaagcgatggcgtggtaaagagaacagcgaacttgtacgaagagaatttgagacattatttccgtatactataatcatgctacttgaagagatggcctccattttcatcactccttacttgcttatttctgagcgagttgatgacattctgcgcttcatctcagacttcacaatatatgtagacggagtgggagatgtatgcagtctaagcttgtttaacttcaaaaaacatggaaatagaaactatgggtcaccattcaatgctcttaaaggtctcaggagctcccaagggaagatggagaaatcattcttaagtttccagagtgtctatccatcatgtgagccaaatgctgatggcaaacaattcttatctaacctccaaaagttcaaagaaaggcaagtacgtcaacaagctcttgcacaatatcaagcactggaggcttcaggctttgtggcaggcactagaggtcaaagggatgataccttccaacaactccatagcgatattcatggccacgctgaggccaccctgcctcctgtttataacttgagccccttgggattgcttgacacagaccaaagaatgcatccatatatcctggactggtattacacatgtcatccaccacactcggatagagctgagggcccccaatttgaccaagcattccctgagaccggtgtgagcacgagtccaccagcaagggaaacatctgaaattgaagaagtcggagactgggacaacgagttgtatgaaagggttcaaagtcatctgggggcatcaacatcaagtgctttgttctggaacactccagggaaggaccatggtacagaagaaaacactaacagcaattggtgggcacatgcccctgcatatccttctggtccccagggtagcttcatcgagcctccagattttggaaatcgatacatgacaaatcctcattccagtaatcacagtggcggtacatcggagggaagcacgtcggatctagagcagagcaatagcagaagcagaagttcctggaggagccctcaagcgttgtccaagacaagatatatggacgactctgatattgaggaagggctaagcctgcactttgctgatgtccatcagaaggatgaagacgatagacacctggtggtcagggatcatcaagatcccgcaccatctggtcttccagtaagaataatacctagaagcagtgaccctgtgtaagctggttaaacaccacaggattatcacataaaaaaaaactccacaggattagttgatgcatgttaacggttgtattttgttgtttgaaccacatcaaaatcaaatgctgcgtctcgcccgtgaactggcaaaacagtcacagattctttttgtacaggccagtaatgatagaaacattcttttacaagcgtgcttggtaggtgcaacacaagtcacaagtgc

SEQ ID NO: 3361 - DNA, 3191 bp, Zea Mays
acgatcccccttctcgatccctacacgtctcctgaaacgcacgccctcccttggctgccccccgccccttccctttcgccccctctcgcgcaatttccccagcccggaccccaaccccggcggcgctgcagtccaccgcaagtcacctccacctcacgcgaggcctccagccctcgtcgccccgcgcttctcccccacgacccggccgccttcgcgcttgcgccccgcggatcgccggcgcgaccctcaggtgtgtacgtctggcatggcaagggacctatcaactggccctgctttctcttttcatgaatgatgtccttccgttcgaaggacgcacatgcacaaacaagacttaactggccatggagaagccaatcgccgttatcagcgcagctgcttgttgatattccacctgaaatagagttgtccgactaccggagattgccaagttctcgaagcgagagcccatctggacttctccatgacgaaggcgtcaaggaagaacctatccctgatctggacattttctttgaaaggctttacgaatatttctgcgcaaaagggctcaggtgtatcattaccaaatggataatagagatcctcaatgtactttttatggtatgctgtatcgggttctttttcttatttgttgattgggatactcttattcatttgaaatgcggtgtggaggcacttgagtctggggagaaaccatgtgatcttatgaaggccattaagcatgatccattagttcccttcacattgcccaaaatgataactgttggatcaatggtcataatgacagcttatggacttaccaactttctcaagttctttgtacagttaagaagtacactcaatgttcgtcagttctactatgacagacttaaggtcaatgatcttgagattcaaactatatcatggcccaaaataattgagaaagttgtcctgctccagaaatctcaaaaactatgtgttgttagggatctctcagagcatgatattatcatgagaatcatgaggaaagaaaattatttgattgggatggtcaataaaggcattctttcttttccaattcattcttgtgtgcctggggctggcccaactggatcacatgagcatggcaggagaaactatctgatacttccaaagtcccttgaatggaccttaaactggtgcatctttcaaagtatgttcgatagtaaattttgtgtaaggaaagagtttttgacaagcccagatgtgttgagaaagcgacttatatttgttggcattgcaatgcttatcctatcaccctgccttgtgatatttccattggtgtacgtcattctaaggcatgctgaagaaatttataatcaccctagtacagcatcatctagacggtggtcaaacttatcaaggtggatctttagggaatataacgaggttgatcacttctttagacacagaatgaacaacagcgctgttcattctttaaattacttgaagcaatttccaaccccactggtttccatcatggctaaatttgtatcttttgtttctggtggcttggctggtgctctaataatcattggatttgtgggtgaatctattcttgaaggacatatttttggaagaaatcttctctggtatactattgtttttggaacaatagcagctataagtcgaaaagtagtggccgatgagcttcaagtttttgacccagaaggggccatgtgcctcgctgttcaccaaacacattacatgccaaagcgatggcgtggtaaagagaacagcgaacttgtacgaagagaatttgagacattatttccgtatactataatcatgctacttgaagagatggcctccattttcatcactccttacttgcttatttctgaggtacctaagcgagttgatgacattctgcgcttcatctcagacttcacaatatatgtagacggagtgggagatgtatgcagtctaagcttgtttaacttcaaaaaacatggaaatagaaactatgggtcaccattcaatgctcttaaaggtctcaggagctcccaagggaagatggagaaatcattcttaagagtgtctatccatcatgtgagccaaatgctgatggcaaacaattcttatctaacctccaaaagttcaaagaaaggcaagtacgtcaacaagctcttgcacaatatcaagcactggaggcttcaggctttgtggcaggcactagaggtcaaagggatgataccttccaacaactccatagcgatattcatggccacgctgaggccaccctgcctcctgtttataacttgagccccttgggattgcttgacacagaccaaagaatgcatccatatatcctggactggtattacacatgtcatccaccacactcggatagagctgagggcccccaatttgaccaagcattccctgagaccggtgtgagcacgagtccaccagcaagggaaacatctgaaattgaagaagtcggagactgggacaacgagttgtatgaaagggttcaaagtcatctgggggcatcaacatcaagtgctttgttctggaacactccagggaaggaccatggtacagaagaaaacactaacagcaattggtgggcacatgcccctgcatatccttctggtccccagggtagcttcatcgagcctccagattttggaaatcgatacatgacaaatcctcattccagtaatcacagtggcggtacatcggagggaagcacgtcggatctagagcagagcaatagcagaagcagaagttcctggaggagccctcaagcgttgtccaagacaagatatatggacgactctgatattgaggaagggctaagcctgcactttgctgatgtccatcagaaggatgaagacgatagacacctggtggtcagggatcatcaagatcccgcaccatctggtcttccagtaagaataatacctagaagcagtgaccctgtgtaagctggttaaacaccacaggattatcacataaaaaaaaactccacaggattagttgatgcatgttaacggttgtattttgttgtttgaaccacatcaaaatcaaatgctgcgtctcgcccgtgaactggcaaaacagtcacagattctttttgtacaggccagtaatgatagaaacattcttttacaagcgtgcttggtaggtgcaacacaagtcacaagtgc

SEQ ID NO: 3362 - DNA, 1157 bp, Zea Mays
agggaagcttcacctgatcacccttcaaacaaatcactcttcgctccggctccgactcgcactctttccccttcccttcccttcccactcccaggctcccactctcaccccttccgcctacccacgcaaacggcacacgaactaacagccacctctcacgtcccccaccctctggttcatgtcctgctgctccccatgtcgcctccactcgagctcgactacataggcctctcgccgccggcggcagccgccgccgctgaaaacgacgaactgaagggtactgagctccgcctcgggctgccagggtccgggtcgccggaccgccgtgtcgtggctgccaccgcgaccaccctggacctgctcccggccaagggcgccaagcgcgggttttctgacgaggcgcccccgccatcgcctgttgccactgccggaaagggaaagaaggtggcagaagaggagtacgacgagaagaaggtggcagcgaccccgcagccggccgccaaagcacaggtggtgggatggccaccagtctgcaactaccgcaagaacacgatgactaccacccagctggagggcagcaaggaggatggtgatgccaagcagggtcaggggttcctgtacgtcaaggtcagcatggatggcgcgccgtacctcaggaagatcgacctcaagacttacaagaactacaaggacctgtcgaccgcgcttgagaagatgttcagtggcttcagtactggcaaggacggctcatctgagtaccgcaaggatggtgaatatgttctgacttacgaggacaaggatggagattggatgcttgtcggcgacgtaccatgggagatgttcgccggctcctgccgcaggctcaggatcatgaaaggctcagatgcgattggactcgctccaagggcagccgataagtccaagaaccgcaactagaacggtggcttcctatccttacacagtccggtacgagggaggagatgcagtgacttgtagggatctgtacgaaaaccgaaaaagtctactaacagctatgacttgtgagaagaattccttgcctcgtttcagcgtgtgaaacagaacagacgaagctgatattctgccgggaggcaattaaaagaatgggtctcactagctgataacctacctgtttgtgc

SEQ ID NO: 3363 - DNA, 1342 bp, Zea Mays
caaattctctactttcgaaaatgcgctctttcaatttatctttcagaatccttgctttgtttttcactttttcttgcttgctcaagctcttctcatcttcttctctgctctccctgctttgtttttgttgtattttgtacaaaacattttgatccgtcattatcttgctcaaattctgtaactttcatcccaaagttcgccagaattcgtttcttttttattttgttaccagtagagcatctcctgatctacctcttcgtcgtgtttggtaaagactattgagctcaggtgtgttgcgttgtgcagagcacaggtggtgggatggccaccagtctgcaactaccgcaagaacacgatgactaccacccagctggagggcagcaaggaggatggtgatgccaagcagggtcaggggttcctgtacgtcaaggtcagcatggatggcgcgccgtacctcaggaagatcgacctcaagacttacaagaactacaaggacctgtcgaccgcgcttgagaagatgttcagtggcttcagtactggcaaggacggctcatctgagtaccgcaaggatggtgaatatgttctgacttacgaggacaaggatggagattggatgcttgtcggcgacgtaccatgggagatgttcgccggctcctgccgcaggctcaggatcatgaaaggctcagatgcgattggactcgctccaagggcagccgataagtccaagaaccgcaactagaacggtggcttcctatccttacacagtccggtacgagggaggagatgcagtgacttgtagggatctgtacgaaaaccgaaaaagtctactaacagctatgacttgtgagaagaattctggcttatggtctgcactagaatggcttggtacatcgtctatggacaaaacacgctattcgattaattgttgttaattaagccttggggggggtacgagtgctattcatgtaaatggtttggtgcatcgtgtgctgctgctgcctgctgctgttactacgattgagctcccctataatactatgatttgaagagagatggcgatgtcatatgatcccttggaatcgggctttactgcctactcctttcgtggtggtggtgcctgttagttggtggtgtgcatgtggtggagaagacgcttgagatgctggttctgttcttgaacttccttgcctcgtttctgccggtgctgtgctgtttgtgctctggggagaggatattccaatgacaagtcccagcgtgtgaaacagaacagacgaagctgatattctgccgggaggcaattaaaagaatgggtctcactagctgataacctacctgtttgtgc

SEQ ID NO: 3364 - DNA, 1119 bp, Zea Mays
ctttacttttatggagaagatggggttgagagtaacgtaatagaagccagaaaaaactcaccgggaagaaggaaccagaagctaaccggcacgtcgtgaagctaaccgggattccgggaagcagagacgtccgcccgtcgcccgtcgtccgtcgtcatggccgccgtggaggtgtgcgtgaaggccgccacggggaagcccgacacgctcggcgactgcccgttctcgcagagggtgctgctcacgctggaggagaagaaggtcccctacgaggtgaagctcgtcgacctcgacaacaagcccgaatggtttctgaagatcagcccagagggtaaggtgcctgtgttcaacggtggtgatggcgaatgcattgctgattctgatgtaatcacccaaaccattgaggagaagttcccaactccatctctggtcactcctgtagaatatgcatcagtgggatcaaagattttcccagccttcatcacattcttgaagagcaaggatgctagtgatggttccgagaaggcgcttctggatgagctgcaggcactggatgagcatctcaaagctcatggcccctacatcaacggggagaacgtatcagcagctgatcttagcctggggccaaagctcttccacctccaggtcgcactggagcatttcaaaggctggaagatcccagaaaacctaaccaacgtccacgcctacaccaaggctcttttcagccgtgaatcttttgtcaagactaagccatccgaggagcacgtgattgcgggatgggcgcccaaggtgtcacatctgtagcctagacacatgattcagttggaataaatgcagtgtcgtgtgatcgtgtctcgagtactcagttctggctgttgcaattgtgcgtgtctgttgccggtttcgttcgagaccatgggcatctcttgatctgctatgagagcatgcatatagtgtaacgtgggctccaaataatggaactgcttttatgcttgcggtgagccttgctttcatgattttctgttctctggtgaattggtggtagcctgagcatcaggttatcttctcttatggtcatatttctgacctggattttttcaagcgcatgttaatcgaaat

SEQ ID NO: 3365 - DNA, 2757 bp, Zea Mays
tggcaacctagcccaagacaccaaacacccatgcacacgcaacctatcaagatgaaaagaggcctcctggtactttggtccttgttctacttcagtgttgcaaacgctgacactagaaaccaggccaagcagcctcttgagttcaatcaattgagagtatcaaggaaatatgttcaaggaaaacaagattcaactcccaagaacggaaccagtccatcagtgcatagaggctcaacaagcaatcaacgggagcaggataagatcgtatgtatgcctgggcaaacaggggtagcagagtttgaccaatatgcaggatatgtgactgtggatgccaaggctggaagggctttgttctactattttgttgaggctcctcaagatccttcaaacaaacctcttgtcctatggctgaatggagggcctggctgttcatcctttggatctggggccatggttgaacttggacctttctctgttcatagtgacaacaagacactgtacaagaaaaggcatgcatggaacagaatggccaacatgttgttcattgagatcccagctggtgttggatactcatattcaaacactacatcagattactataacactggtcactatataccagaacttgcaaatctgattctctctaagaatagagccaccaatgtaactagtatcaagcttaaaggtgttgcgattggaaatgcagacttggatgataatttgactctaagagcatcatatgactactattggatgcatgctatgatttcgggaaaagcttataaagccgtcaaggataagtgcggctttaatgggacatacactgaagactgccaaaatgccatggacttagccacccaagaaaaaggaaatattgatgactatgacatctatgcaccaatatgccaagatgcctcaaacccttctaaatcaagtgactcgttagtgtttggtgatccatgcacaaaccactacgtctcctcttacctaaatcgtcctgaggtccaaagggcactccatgcaaacacaacagggttaggctacccatggatggactgtagtcagcagatatttgataattggaaagattcaccagagacaatgctgccatcaatcaagaaactcatttcaagtggcacgagaatatggctgtacagtggtgatatggatgcagtgtgctcattcatttcaacacaatatgtgctggacaatcttgggcttcctatagaagcagcttggcgtccatggcgcgtcgacaatgaggttgctggctacgtcattgggtataaagggctggtcttcgtgacggtcagaggagctgggcacatggtgccatactaccagcctcgcagggcattggcattattctcgtcattcctcgaaggggagctccctccacgctgatcgattaagctagcagggtttgtgaatgccatttactcatttcccacagcctatggaatcatatgtttttactatacttgtagctggcctttattttttatataaatatataaaacaaaccaagcagggagctgacgattatattaataaaaaatgagattgagaaaggggatctgatggagcagttcttttctactcattctcctatatatgacagacaggtataggttttagggaaagggactgcatttcctcagtcagtctcaaggagatgctcttagagtcttagttcaacttccctgcacaacacaagcatcgagaattatgtgattctaccctgattgtttggagtgcagcaaggagcccatctaactctggtttgtcgctagcacaagaagataagttagcactaaccctgagcacaatgttgtattatccgtacccaaaactgaacaatgtcagtgctaacgccatcacggagcctggattggcatccagatatccgcgcatcaaacgaaaaaaagagggcgggattcagaacttcgaaatagagaaaaggttcctcaaaagaagtgggggggggggggggggacagagaaggcgaagggctggggagcgatctcggagtcaggtcgcactgcgagagtgagtgaaggaggagggacagggaggagcgaacctcggagaatggatagcggcacggcacgagcccgcgacggacgacgagggatggcgaccgtggaacggcgcgtcgccgacgccgaccccgtctcgactgttgatcggtgtctggggctctgctgagtaaaatgtggagaactgcccggctggagttttggtagagtcaatgcgaagacagttcttgagaggaggaggcatgtatgcagaagatcgaccacatccacacttggtagccaaatgctgttgcacaaaagtgaacctcccttttgggaacttcaaaaacatggcatgcaagtcggttgtctgcttccattccattcacatttaacttagaaatgatactttagcagacactgttgttagttctacgtttttttttcttcttcaatttggtcgaaaaaaagttgtgcctgaacttcgtcgatcctctatatgcttgtgactagtcccttcaatctgaatagatgctggaaaacaaagggctctgagccccgcagcgatcatgggttttttttctctgaggaagaggaagctgtccttgattcgtgtttcagaaaacggcagaagcaagaattcaatctttagtctgcggtagtgacatgtacagtagactcgggaaagctaggcttccacatgtaggtgcgtcgtgctcgtgcatgtagtgcccgcttt

SEQ ID NO: 3366 - DNA, 1195 bp, Zea Mays
cttccttccttctccgctcgtcgtcgttctaccggcatggccggcattaccaagcgccgcacctccccggcctccacctcctcttcgtccggcgacgtcttgccgcagcgggtcacccggaagcgtcggtccgcccgccgcgggccccggagcaccgcccgtaggccgtcggcgcctccacctatgaatgaactggacttgaatacagctgctcttgatccggatcattatgctacaggattgagagttcttcttcagaaggagctccgaaatagcgatgtaagccagcttgggagaattgttctcccaaagaaggaggcggagtcttacctccctattctgatggcaaaggatggaaagagtttatgcatgcatgacttgctaaattcacaactgtggaccttcaagtatagatattggttcaacaacaaaagcaggatgtatgtgcttgaaaataccggagattatgtaaaagctcatgaccttcagcaaggagacttcatcgtgatctacaaggacgacgagaacaaccgctttgagcaaagaaggcaggagatgagcagaccgccactgtacctcaagtccatgaacacatgcacatctctgccgcactgccagctccacaagcgttccatgactatgcaggccccgtcgcagcagaagctggtatgctcgcgatcgtgccacagggtgacgagatattcgacggcatactgaactccctgccggagataccagtggcgaacgtgaggtactccgacttcttcgacccgttcggtgactccatggacatggcgaatccgctgagctcctccaataacccctcggtcaacctggctacgcatttccatgacgagaggatcgggagctgctcgtttccctacccaaaatccgggcctcagatgtgagatccgggcagaaaaactgccgcggtcaaaaccatcatcccctgcgtggaactcagagatcccctggttgacgccattgctgtacatccaaataaatggcgtcctcattttgtatgtttagtagtatatgattgggtacgcgtgttgtttatgtgtaaaagggtaactctgcaaaactgaactgagcgttacatcagatgcaacgctgtgacgactgacgaggaggcaggctctggtgtttcctgtcctgcaccctgtgaatgtgtgtgcaggtacataaacgaaag

SEQ ID NO: 3367 - DNA, 1917 bp, Zea Mays
agaagatgatagaaagacgctgatcctagccttagccaaacaaagctccgacgaggcagcggccacggccagctggcatgctcctgctgcggcgccttgtccgggccggccggtcgtggggcaccgaggcgagaggcctcgcctcgggggccccgcgggaggcggcggacgccgtggtggtgggagcgggcgtcgtcgggctcgcggcggcgcgcgcgctggcgatggccgggcgcgaggtagtcgtggtcgaggcggcccccagtttcggcaccggcaccagttcccgcaacagcgaggtcatccacgccggtatctactaccctccgcgaagtcttaaggcactacaatactgcatggagcccttaattaatgtatcacagattctacctgcggattgccttttgtaggctaggctttgtgtaaggggaaaggaaatgctctacaagtactgtgaagaacgaggtgttgcccacaaacgaatcagcaaactcatcgttgccactggtgctgcagaggttccaaagttggacatgcttctcagaaatgccaaagaaaacggggtggatgatcttcagttgatggagggttctgaagctatggagatggaacctgagcttcgatgtcttaaagctttactatcacctagtactgggataattgactctcattcactcatgctctcccttttggctgatgctgaaaacttgggaacaactatatcatataacacatcagttatcagtgggcatgttggatccaatggccttgaactccatgtttgtgaaagcaaagagctgcagaattatcatgaatttgtgcccactcctcactatgcgcgtgggtgttacttcaccctctctcaaaccaagagtcctttcagtcggttaatatatcctctaccagaggatggtggcataggagtccatgtcactttagatttgaatggccttgttagatttggtccagatgttgaatggatatctgatggtggaaaggaccatgtgtcatgttttctgaacaagtttgattactcagtaaatcccaatcgctgttctgtattttaccctgtggtaaggaagtattttccaaatctcaaggatgggtctttggaacctggttattctgggatccgaccaaagctttctggtcctggacaacctccttcagattttgttattcaggggtgggatgtccatggtgttcctggactggttaatttgtttggaatagaatcccctggtttgacctcaagcttggcaattgctgaacacattgtttcaaagtatttgtgatgggagtctcctatacaaagcttcattgccagatgctccatgcactgcagaatgatgaacctgacgtgtcaggaccagggttcaccaaagaaaatcgtacagtaaaaacaacattttgagctgttttttttcttgatcatttggatacttattgcatgtgactgttagaagatgaaattctatgaaagtttcagcgaaacattaatatgatggagattgaacgggtatatgacactttacgggcatggtacctggtctggactctgaatgtggactagagaattataccaagttgcttgatagatggcgcaactccacttctagttgcacaacggaaattgtaataagcccaacactgtgatacatgttggtgctagacctagacatttgtgtcggtcgggcatcacttgctgctatcgaaacatatcacgaaacagacgaattcaaaagaatgaagaactatgaattgggatatgatgcataggattggtcatattgaatcacattgagatcgactttcgttttatctatgaacgtgtggcggactggcggctggtgccatgtgtttactacctctttttgacatcttcacaaggacgtccatgatattcttggacttccg

SEQ ID NO: 3368 - DNA, 1966 bp, Zea Mays
agaagatgatagaaagacgctgatcctagccttagccaaacaaagctccgacgaggcagcggccacggccagctggcatgctcctgctgcggcgccttgtccgggccggccggtcgtggggcaccgaggcgagaggcctcgcctcgggggccccgcgggaggcggcggacgccgtggtggtgggagcgggcgtcgtcgggctcgcggcggcgcgcgcgctggcgatggccgggcgcgaggtagtcgtggtcgaggcggcccccagtttcggcaccggcaccagttcccgcaacagcgaggtcatccacgccggtatctactaccctccgcgaagtcttaaggctaggctttgtgtaaggggaaaggaaatgctctacaagtactgtgaagaacgaggtgttgcccacaaacgaatcagcaaactcatcgttgccactggtgctgcagaggttccaaagttggacatgcttctcagaaatgccaaagaaaacggggtggatgatcttcagttgatggagggttctgaagctatggagatggaacctgagcttcgatgtcttaaagctttactatcacctagtactgggataattgactctcattcactcatgctctcccttttggctgatgctgaaaacttgggaacaactatatcatataacacatcagttatcagtgggcatgttggatccaatggccttgaactccatgtttgtgaaagcaaagagctgcagaattatcatgtagggtctcatgtgaacgcacaacttgttttgcttccgaagcttgtgataaactctgcaggtctgagtgcagttctacttgccaaacaatttcatggccttgaccaggaatttgtgcccactcctcactatgcgcgtgggtgttacttcaccctctctcaaaccaagagtcctttcagtcggttaatatatcctctaccagaggatggtggcataggagtccatgtcactttagatttgaatggccttgttagatttggtccagatgttgaatggatatctgatggtggaaaggaccatgtgtcatgttttctgaacaagtttgattactcagtaaatcccaatcgctgttctgtattttaccctgtggtaaggaagtattttccaaatctcaaggatgggtctttggaacctggttattctgggatccgaccaaagctttctggtcctggacaacctccttcagattttgttattcaggttctttctggggtgggatgtccatggtgttcctggactggttaatttgtttggaatagaatcccctggtttgacctcaagcttggcaattgctgaacacattgtttcaaagtatttgtgatgggagtctcctatacaaagcttcattgccagatgctccatgcactgcagaatgatgaacctgacgtgtcaggaccagggttcaccaaagaaaatcgtacagtaaaaacaacattttgagctgttttttttcttgatcatttggatacttattgcatgtgactgttagaagatgaaattctatgaaagtttcagcgaaacattaatatgatggagattgaacgggtatatgacactttacgggcatggtacctggtctggactctgaatgtggactagagaattataccaagttgcttgatagatggcgcaactccacttctagttgcacaacggaaattgtaataagcccaacactgtgatacatgttggtgctagacctagacatttgtgtcggtcgggcatcacttgctgctatcgaaacatatcacgaaacagacgaattcaaaagaatgaagaactatgaattgggatatgatgcataggattggtcatattgaatcacattgagatcgactttcgttttatctatgaacgtgtggcggactggcggctggtgccatgtgtttactacctctttttgacatcttcacaaggacgtccatgatattcttggacttccg

SEQ ID NO: 3369 - DNA, 2202 bp, Zea Mays
gaaaggtagatattttttcccgtctcgctcaatgattcaccccatcgcagccatcgatcagaaaatttacggctcataattctcgtctgcttatccgctcccttctctccctcaacttcagcaagttccccgcaaaaccgcagccggaggtcgccggtcgccaccaccaatggggccacccgccatggcgttccaagccctcaccctcacgccactccccttctcactccacagctcgagccgccgcgtccgcgtgcttgccgttgcggccgaccagactcctccgcccgcccccccttcggagccggcgaacagccctagccgcctccttcgcgagctcgcgcagcggaagaaggccgtatcccctaagaagaagcatccgccgcgtcgcttcatcctgaagccacctctcgatgacgagcgccttacccggcggttcctcagcagcccgcagctgtcgctcaaggcgctcccgctgctctcttcctgcctcccctccgcgccgctctccaccgccgacaggacctggatggacgagtacctcctcgaggccaagcaggcgctcgggtacccgctcgcgccctcggagacgctcggcgaaggcgatgactgccccgcgcgtcatttcgatgtgctgttctacctcgcgttccagcatctggacccctctagcgagcgcacgcggatgcggcacgtacggaacggccactccaggctctggttcctgggtcagtacgttctggagctcgcgttctgcgagttcttcttgcagaggtaccccagggagtcacctgggccgatgagggagcgggtgttcgctctaattgggaagaaagtgttgccccgatggctcaaggcggccagcctgcacaatttggtcttcccctatgatgatttggataagatgatacgaaaggaccgggagccaccgtccaaggctgtattctgggcaatatttggagctatatatttgtgctttggaatgcctgaagtctatcgtgtcctttttgaggcatttgggatggatccagatgatgagagctgtcagccaaaattgcgtcgtcaactagaggatgttgattatgtttcagtggagttcgaaaagaggcagctcacttggcaggatgttgctgcctacagggcttttccgagcttgtgtgccaccaggcatgcatcggttcagaggaaatatttgggattttgacagtagacccaaggtcatgactaccctaggatatcccttgcccatgaatgacagaattccagaaatcacagaagcaaggaatatagagcttggacttggtcttcagctgtgttttttgcacccatcaaaacataagtttgagcatccaagattttgttatgagcggcttgaatacgtcggccagaaaattcaggatctagtaatggcagagaggctactcatgaaacacctcgatgcaccaggcaggtggctggcggagaagcatcggaggacgttgatgaacaagtattgtggacggtacctgcgggacaagcacctgcagcactacattatctacggggagacagtgcaagacagattcgaacacaatcgacgtctaaggaatccttcaacgacctctgtccagcaagcgctacatgggcttgcatactgtgtgtatggcaaacctgacgtgcggcgtttgatgttcgaggtgtttgacttcgaacaggtccagcctaaagcagtctgaggatcttctccattggtaccgatgctagagttgctgaatgctgaccaacaagaccccaatggcagtggtacaaatgctgtagattcttgaagtcgtccattcgacaggagatctttcgattctgaagcctgaagccctgaaccctgagctgggacagctgattagccactgggtcctgtctctcctgaaaccgtcactgttccaaccttcttgtccgtcggaaatggtagactagtgatgatgtggatcggaggctgctgttgtttgaacttacaattttgataattcgttgtaaattcctgtttgggcagaaacgcaaatagcagcagcatggcagattcatttcctatcagaattgtagtccgtaatcgagaagcagtaagatgaataatataaagatattcattcgtccgccacgttagcgcatgattcgtgcataggataattgtctgttatacttcgtttagatgtagatattggagcacgg

SEQ ID NO: 3370 - DNA, 1633 bp, Zea Mays
ggagcggcaggcacaatctccttctggtagcccgtacgcttcttctacaggcccttgcctgcccccctgtcccactgcctccacacaccattgtcatggactcatggtcaccaccaccacaccaccacacttcactcgactccacagcctccagtttatccgtttgctcgacaccattgctattatctcctcgctcgcctgagctgaccgtttcgtcccacacatcttgctgtttctagctactactctgcgtagatcgatcgggtcgatcaggctcgctcggctgaagttcatcggatcagaggctcgggctccggtttctcgcccgcaatgctgaagaaagcgtcagcaggaagagctgcggccgcgacggggcgcggcgatcccgcagcgcccgcctcgcgtcccagtcccacagccaaggtcgccgagggcggcgcctgcagcgccaggccggcctctcggctcctctccacgaggtcagtcccgagcctcttcgcggagtccccgatgacgacgagccccgccgcctccgcgcccgagctgctgtccagggccccgctccgctccggcggtagcccgggcgcggcgggcctggcgggcgtgctggtggcggaggaggccgacgagcgggggtccttgttgaggaacgggcgcagggtgctccgcgggacgcggctccgggtgcagctgccgccgccgccgccgatcgagttcggcgtgaagaacagggaggcccagctggcgctgctctcccccgtgcagcggtcgccggcgcggctggcaaggcggaggagcgaggtggaggaggagctggccggcgaggactacacctgcgtcatcgcccgcgggcccaaccccaggatgacgcacatattcgaggaccgcgtcgtcgagagctcgacctcgacctcgagctcgacctcttgcgatgggtgcaacaaggatgctgctctcttgctggtgctggaaagaggcgacagcgagttctgcatcgaccaacggaaggcgctgtttggcggcgaacgggctggcggcgagcgggcggtgacaaactgaactctccgtcctgaatcttggcacacccgcgctatatgtgaagcgacgaaccattccgttcttcatctcgtttgaagaaattttgatccgtgctgggaccaatgctatcgggttcagggtgatttgtccctgtgtcttttttggtgattcatctctctaagttttagagctaaggctccaaacaaatgatttacatgttacctttaaacattaagcccaccttaaattaaagttttagagcttttaaagcgagctaaagtgcactaaagcttttagaactctaaaacttagtcctgaggctctaaatttgtcgttaggacatgtataaccttatttaatatgaagtcttttgagcagtctctaaatgactaagtgtaaaaaaatataagagacaaactcttcacgaagaacctgtctcttcacgactttctatacacgttgtcttttaggtgcatttatgatccagagtctcagtgttgtaccacatagtctcttatccgtatcttgtacttaaaaaaacgaactggattctcagggttgtacatgcccttacgactcttcactataggacata

SEQ ID NO: 3371 - DNA, 866 bp, Zea Mays
gacgacaaggtaagatatatattttttggtgtcagcagtcagcaagtgtggcacatccggggccatgttcgtttaggctgttcccggccgggaacagcgaccaaacctcgtggatcccttcccatggaaataaacccggcccacagaaaaacaagcgttcggttaagtccgatgtgggctgtatccagatcgttcctcgtcgttccagcccgggaaacacgcccggtcgaccgggggtggaaaatatcccagcctggactgcacgcgaacgcgaagggcacgcgacttctcgtcggtgtcgatctgctccggcgaccgcttgtcatcgattatccctacatcggtttgacttggagaagacgagcttccaccatcttgggaccctataccctctcctttaggtacttgttaaatcctaaatgttcttattacatcattttctgcttctgttggtgtttatttctttttcgttagcaatggatgtggcactaagcctcttagaaagaggatgatgatgaggatgatgatgaattccatgacctgctcttaattgagagctgcacctgaagaaaccaatgaacattaggtattacaaataagggctgtattgtattaatgtggttcttgtaaactaatttttcctttgaattttgtaattgaatcatccacaggtgtgcgacttgcttttgtttatgtggatctattaattatgttcaaacagttgcttcataattggcattggcattggctgctcaattgtgtgcccctcgaacctcccctgcaccatctagagatattttgtgatgccattctagtattgcttttagcatttttatccataggcttaaccgaacaggattttggca

SEQ ID NO: 3372 - DNA, 1945 bp, Zea Mays
cgcccagagcttctgttcgatgccccctccttcaccacccgcctcgcaagtgcgcacgtgcgatgctggcgccgcgcagtcgcccacgcgcgggacggtgagtgagatggcgcgatacttccgcagcagcaacctcgcctctagggtcttcgagcgtcagctcatctccccgcgccctggcgctaccgttaacactattagacagttctatgaaaatttggtcccaagctatactatatatgacatagattgcccagattattcgtttcgcaagttcactgatgatgggaaatattttgtggcctttagccgaaaccatcaagatttgattgtataccgtccaatctggttgacatattcatgcaatgaagaatgtgatcctcatgagcttccgccaaaggcaaagaagtttgacagcttctttaagcagctttattcaattcctcttgcatctggcaatgagtatatttgcaaggactttttcctgtacatggaatgccatcgatttggtttatttgcaacatctactgcacaaagtaacgaatcaactgccactgagggtgcaatacatggggtgccattaattgagaaaataactttccatcttgtgaggctagaagatggtgtgatacttgatgaaaaggctttctgcaatgattttatcaatctggcacatagtattggtgcttacatgtatgaggaccttctttgtattgtttctttgcgataccaaacaatacatatcctacagatacgagattcaggcaaccttgttgaggtacgcagcattggtgcattctgccgggaagatgatgagctatttcttcactcacatgttcagagggtccaacatctaaagaagttctattttcacttccaagattatgttgatcttatcatatggaaggtttctcggagtactgaccaaaacctagctttctttgccgtgtacaacatggagacaacggatatcgtttcacttcatcagaattcttcggaggagctctatgccttgtttgaacaattttatgaccattttcatgcaaacccacaagcttcatcacatggaaaatttatctcctctcattccaatgatattcatgctctggatcaacttcgggttataaaaaataaagcaagtagctcctcacagctgatttcagcaattgatcggcatcgacattgcacagagcatccaataaaatttatatcagtgaggcaaaatgttgtcaaatttaagatcaagccaggttcagattctggtgcttctgacagcagaataaaaagaatctcgtctttcttgtttcacccatttttcccgcttgcactttcgattcagcagacttatatgcagccaactgttctcaacatccatttcaggagatagaaaaggtataacggttgccctaggtgtatctatgtcattagtgaacttgcagcattgctcgcggcaaaattttggccatatgtactctctagtagataagctgacagatgttacagtaggggataagatccattgtctggcggtgagaatggctagtttgatttctcttccaaaacaaagtacaaaatgcaaatgggctcaatattcatctattgatgtggcttcatgggctcatcagtcatcattgcggcttcacagtgttgatctatgctttcatatgcctagctcggagtgtcagatgtgcttgttattggatttgaggcataaggacacgtatattggatggcatggagttggtatattggatgcttcatgcttgaggcgagggtgatctaagctgcgaatttgttttcgaggatatataggaaatatagcattacaaatagttttgagttgtcatattatgatgaagtaactactatttactgaaactgttatgcaaagataataattatttttctgtgttcaatatattacaaaaaacttcataatctacaa

SEQ ID NO: 3373 - DNA, 2163 bp, Zea Mays
cgcccagagcttctgttcgatgccccctccttcaccacccgcctcgcaagtgcgcacgtgcgatgctggcgccgcgcagtcgcccacgcgcgggacggtgagtgagatggcgcgatacttccgcagcagcaacctcgcctctagggtcttcgagcgtcagctcatctccccgcgccctggcgctaccgttaacactattagacagttctatgaaaatttggtcccaagctatactatatatgacatagattgcccagattattcgtttcgcaagttcactgatgatgggaaatattttgtggcctttagccgaaaccatcaagatttgattgtataccgtccaatctggttgacatattcatgcaatgaagaatgtgatcctcatgagcttccgccaaaggcaaagaagtttgacagcttctttaagcagctttattcaattcctcttgcatctggcaatgagtatatttgcaaggactttttcctgtacatggaatgccatcgatttggtttatttgcaacatctactgcacaaagtaacgaatcaactgccactgagggtgcaatacatggggtgccattaattgagaaaataactttccatcttgtgaggctagaagatggtgtgatacttgatgaaaaggctttctgcaatgattttatcaatctggcacatagtattggtgcttacatgtatgaggaccttctttgtattgtttctttgcgataccaaacaatacatatcctacagatacgagattcaggcaaccttgttgaggtacgcagcattggtgcattctgccgggaagatgatgagctatttcttcactcacatgttcagactggttatgcgggttcctttcttcctggcataaagcaacggttgttgtcgtatattttttgcaagacgtggaatgagagggtccaacatctaaagaagttctattttcacttccaagattatgttgatcttatcatatggaaggtacagtttttggatcgccatcacctatttgtcaagttcggtagtgtggatggaggggtttctcggagtactgaccaaaacctagctttctttgccgtgtacaacatggagacaacggatatcgtttcacttcatcagaattcttcggaggagctctatgccttgtttgaacaattttatgaccattttcatgcaaacccacaagcttcatcacatggaaaatttatctcctctcattccaatgatattcatgctctggatcaacttcgggttataaaaaataaagcaagtagctcctcacagtttgtgaaaaagatgatgacgtcattaccttacacttgccaatcacagagtccatcaccgtactttgacctgtccctttttagctgatttcagcaattgatcggcatcgacattgcacagagcatccaataaaatttatatcagtgaggcaaaatgttgtcaaatttaagatcaagccaggttcagattctggtgcttctgacagcagaataaaaagaatctcgtctttcttgtttcacccatttttcccgcttgcactttcgattcagcagacttatatgcagccaactgttctcaacatccatttcaggagatagaaaaggtataacggttgccctaggtgtatctatgtcattagtgaacttgcagcattgctcgcggcaaaattttggccatatgtactctctagtagataagctgacagatgttacagtaggggataagatccattgtctggcggtgagaatggctagtttgatttctcttccaaaacaaagtacaaaatgcaaatgggctcaatattcatctattgatgtggcttcatgggctcatcagtcatcattgcggcttcacagtgttgatctatgctttcatatgcctagctcggagtgtcagatgtgcttgttattggatttgaggcataaggacacgtatattggatggcatggagttggtatattggatgcttcatgcttgaggcgagggtgatctaagctgcgaatttgttttcgaggatatataggaaatatagcattacaaatagttttgagttgtcatattatgatgaagtaactactatttactgaaactgttatgcaaagataataattatttttctgtgttcaatatattacaaaaaacttcataatctacaa

SEQ ID NO: 3374 - DNA, 3529 bp, Zea Mays
cgatcaccgaagccaaccatggccgccaccgtcgcctccgagcactccatcgatcgcaagctctccgcgctcgtggagcaagctcggccgagcgcggcggccatgctcgccgccgccgaggccgttgacgccgtcgcggagctcatcaagagggtgccacagcagcaagcgacgccggaggccgcgcggggttttttgagggacctgggactggaaaccgagaagctttccttcaccttccgtccgccggaggtggtgcgtctcgccgggagccacgcggccggcgcggtcgcgaggcccgaagtcgctgccgacctcctcgtacgcttgccaaaggaatgcttccacgagaaggatttcctaaatcaccggtaccatgcaaagaggtgtctttacctctgtgtcgtcgagaaaaacttgaggtgctctaaattaatccgcaaagtttcatggtctaccctccaagatgaggctcgaaagcccgtgcttcatgtatatccagcgaccgaaattgtagaccttcctggattccatgtaagaataatcccaactgcggattctttgttcaacgtttcaaagttgaatgtatcaacaagaaataatgtccgtgcatatacaaaagatggtgtaaacctacccacaccaaagtataattgtagcatattggaggatatgtttttggaggaaaatgcaaactttattagtagcacctttgctaactggaaagctttgcaagaggccttggtgttggtaaaggtttgggcacgtcaaagaacttcaatatacacacatgattgtctcaatggatacttaatttctgccatccttgtgtttcttactgtggactctggaggaagcatgattactagatcaatgaccacaagacaaattttccgtgtattgatgaattttttggggatatttgaccatgtttactcagttgaagcatatctgaattcctgtagcaacttccaaggcgtgggcaaagggattggtgattcaatcaatgaagaagcgtacggtcaccaaagaggacattgccacttgcctgaagacatttgatgttgccgtatttgatatatctggccacattaatttggcgtttcgtatgacaaggtctgcttttttagagcttcaagatgaggcagtttgcgcacttagttgccttgataaatgcagagatggtggacttgaagagctttttatgaccaaagtcgacttttgtgcaaagtttgacacatgtttgaggataaacttgaaagggaactctaaggttactggattaagctattgtgtggatgacgagtcttggagaattcttgagaaagatgttcagtctttgctgcaacaaggacttacagatagaacaaagatgatccgagccctatggagaagcacaccttctgaatggaaaatagtggaaaatttggcagcagtccgcttctggttggtatgatggttagctcattggaaaagagttttcgccttgttgatattggtccaaaccctgagaaccgtgttgaggctgttaaatttaggaaattttggggagagaaagctgagcttagaagattcaaggatggaaatattgccgaaagcacagtttgggaatgccaatcctgggagaagcatacaattattaaaaggattgctgattatgtgcttatgaaacatttgtcgctgcagaaggatgatttgattcatgttgttgatcagctggacttttgcctcttagttgatggccaagatccggtctcgtcttctggagctttgcttgaagcttttgatactattgctaagcagttacgtctcttagatgatattcctcttaaaatatctaccgtgcaacccctagactcagcttttaggcacacttctgtgtttcctcctgaacctcatccactggcatacggaaggaattctcagaggctaccgaaattcgcaacaacttgcataagatctttagaagttatgattcagctagagggatctggtaactggcctttggatcccgtggccatggagaagacaaagactgcatttcttttaaaaattggtgaaagcttggaggatcgaggaatgtttgtttcagccagtgaaaatgaggtgaatgtccttacatctggatattcattcttactcaaaatatttcatgaaagaggtttagtgatgcaaaagccagttggagatgacaagacacaaagtgttctatcagaagataagatgctttttcagcggagccagcactctagtatgatcaatggtttgcatggtcgttaccaggtgtatggaccagtagttaggctagcaaaaagatggatttctgcacatctattttcttcatttatctcagaggaggcagttgagctggtagttgcacatatatttttgaagccattcccattccatgccccatcttctcgggttgctgggtttctcaggtttttgcggttgttatccagttttgactggatcttttcacccatggttattgacataaataatgacttcaacctgatggatgagaaggagatcaatgataactttatgctgagcagaaaatcttatgagcgaaacccccatgatatagagcctgcaatgtttcttgctacgtcatatgataaaacatctgaagcatggacaaaacagtcaccaagcaagtcggttctcaaacgggtagctgcttatgctaaaagcagtgcggagcttttaacaaatcttatgcttcatggtccatcaggggaatatacatgggagtgcctgtttcgaacacctatgagcaactatgatgctgttattctcctccatcaagagaagctttgttgcccccaccacgtactttttcctgctgagaaccctgacggtaagctggtggtctggggcaaaccaagtaaagatttctgcccctatatgccactgaacaaaggggcagtgaaaggtttgcatgatgcaagagagaaactcttggtaaactttgacccgactacatacttcttgcgagacttgaagaccttcaagctgtggtatggttcagttggaggagacgctgtgggtcttacatgggagaacccaaagaagcgtggcagagaggaggctgatgaggctgctcccgagccgacatctatccttaaggaggttggagatgttggtaaaggtttagtgaggggtgtgtaccttgtcaaggcaccaaagtttcagtaaactgacagggcgtgtgcaactgaagatctgaccaacaaaccgatgcacaagaaggaagacttccaagtgttggtagtcttccttccatccagggcagtgtttggaggctagcaatgggggatggggagcacacgcggtagtcatggtcatggagttgtaaacgagtcaagatgtgctgtgtttagaccactattactagtacacagctgccaaaagagaaatgaaggttgtagaacctcttattgaaattttgactgtgtagtatatatgagatgtgattctgcaaacatttgctgcgatgaaaatgccaatcaaggtttgacgtgca

SEQ ID NO: 3375 - DNA, 2946 bp, Zea Mays
acggcgcgctttcggcccgcgattccctcctaacaacggagggagggagaagtggaaaaaatcgcctcgcttgttggcctccgtcagcccgcgcctccttcctccgtcctccggctcggcggtccgccgccctccttcatcctccggctggaggccctcctccacccccgcctcgcggccctacactctcgttgggtcggcacccgtgcctcccattctctcctcttctctcgctcgagcgccgcggcctctgctcgctcggtcgaggctgaaggacgggacaaagcgcagattgaccaccgggcgtcggaaccgccgccgctgccgccgaaggggttataagatcagatggggacttcggtgcaggtgacgcctctcagcggggcgtacggggagggccccctgtgctacctactcgccgtcgatggtttccgcttcctcctcgactgcggatggaccgacctctgcgatacctcgcaacttcaacccctcgcaaaggttgcaccaactgtagatgctgttcttttgtcacatcctgacatgatgcatctaggagctttgccttacgctatgaaacaccttgggctgtctgcaccagtttatgcaacagaacccgtgtttaggcttggccttttgaccatgtatgaccatttcctgtctcgatggcaagtttcagactttgacttgtttactctagatgatgttgatgctgcattccaaaatgttgtgagactgaagtactcacaaaattaccttctgaatgataaaggtgaaggagttgttattgctccacatgtggctgggcatcttttgggggggacagtttggaagattacaaaagatggggaggatgttgtgtatgctgttgacttcaaccatcggaaagagaggcatttgaatggcaccgttcttggatctttcgtgcggccagctgttctgataactgatgcttacaatgctttgaacaaccaaggctatagaaaaaagcaggatcaagatttcattgaatcattaattaaagttctggcaactggtggaagtgtgctacttcctgttgacacggctggtagagtgttggaacttcttttgttattggatatgtactgggatgaaaggcgattgcagtaccctatctacttcctgacaaatgtgtcgacaagtaccgttgattatgtcaagagttttcttgaatggatgggtgatcaaattgcaaaatcttttgaaagcagtagagccaatgccttcttgttaaaaaaggtcacgctgataattaacaaagaagagcttgagaaattgggagatgctccaaaggtggttctggcatccatggcaagtttggaggttggcttttctcatgacatatttgtggagatggcaaatgaagcaagaaatctagtgctctttactgagaagggacagaaaatatttgctctccagtttgggacactggctcgaatgctccaagtggacccaccccctaaagctttaaaggtcactatgagcaagaggattcctttggtgggtaatgaactaaaggcttatgaagaagagcaagaacggataaaaaaagagaaatcgctaaaggctagccttgtcaaagaagaggagctaaaggcttctcatggatcaaacacaaaggcttctgagccaatggtcattgatgcaagctcatctcgaaaatctgtgaatgcttcacattttggtgggaacaatgatattctcatagatggatttgtccctcctttaaccagtgttgctccaatgtttcccttctttgaaaacactgctgaatgggacgactttggtgaggtcatcaaccctgatgattatatgatgaaacaagaagaaatggataatactctgatgcttggccctggagatggattagatggtaggatcgatgatggctcagcacgcctgcttcttgattcaacgccctcaaaagtcatttccaacgagatgactgttcaagtgaaatgctcattggtttatatggactttgaaggtcgctctgatgggcgttctgtaaaatcaattattgctcacgtggctccactgaaacttatcctggtgcatggatcagctgaagcaactgaacatttgaaaatgcactgcgcaaagaatttagatttgcatgtttatgctccacagattgaggaaactattgatgtaacatcagacttatgtgcttataaggtacaactttcggagaagttaatgagtaacatcatttctaagaagttgggtgagcatgaaattgcttgggtggatgcagaagttggaaaagaagatgagaagcttattttgcttcccccatcgtcaacaccaccaccccataagcctgttcttgtgggtgatctaaagttgtctgattttaaacaatttttggaaaacaaaggctggcaggttgaatttgccggaggtgctttacggtgtggcgaatacatcatggtgcgcaaagttggtgattctatcctaaagggcagcacagggtcccagcagatcgtcatcgagggccccctctgcgaggactattacaagatcagggagcttctgtactcgcagttctacttgctgtgaggcaacgcttgtgttgtccgaaatttggcgtgggatgaccgtgacaaagttttggcatcagtttccggatgaccgtgctgactaccaagtggtccaagaacgatgacaatgcatccatccaaagaagaacaaaaacaacgacgacaaagcgtccacctattttccacctaggggtgcaatcaatcagatcggagatgggtaatgcttgtatcatattttctctttagatttagattagatatattttctttttagatttagatcagatacgaatattattggtctatgaccgtaagatttgaatggatatcaatatatcttaaatacctatactctatgcggctatgtttttgttttttatgttcc

SEQ ID NO: 3376 - DNA, 2985 bp, Zea Mays
cgcgattccctcctaacaacggagggagggagaagtggaaaaaatcgcctcgcttgttggcctccgtcagcccgcgcctccttcctccgtcctccggctcggcggtccgccgccctccttcatcctccggctggaggccctcctccacccccgcctcgcggccctacactctcgttgggtcggcacccgtgcctcccattctctcctcttctctcgctcgagcgccgcggcctctgctcgctcggtcgaggctgaaggacgggacaaagcgcagattgaccaccgggcgtcggaaccgccgccgctgccgccgaaggggttataagatcagatggggacttcggtgcaggtgacgcctctcagcggggcgtacggggagggccccctgtgctacctactcgccgtcgatggtttccgcttcctcctcgactgcggatggaccgacctctgcgatacctcgcaacttcaacccctcgcaaaggttgcaccaactgtagatgctgttcttttgtcacatcctgacatgatgcatctaggagctttgccttacgctatgaaacaccttgggctgtctgcaccagtttatgcaacagaacccgtgtttaggcttggccttttgaccatgtatgaccatttcctgtctcgatggcaagtttcagactttgacttgtttactctagatgatgttgatgctgcattccaaaatgttgtgagactgaagtactcacaaaattaccttctgaatgataaaggtgaaggagttgttattgctccacatgtggctgggcatcttttgggggggacagtttggaagattacaaaagatggggaggatgttgtgtatgctgttgacttcaaccatcggaaagagaggcatttgaatggcaccgttcttggatctttcgtgcggccagctgttctgataactgatgcttacaatgctttgaacaaccaaggctatagaaaaaagcaggatcaagatttcattgaatcattaattaaagttctggcaactggtggaagtgtgctacttcctgttgacacggctggtagagtgttggaacttcttttgttattggatatgtactgggatgaaaggcgattgcagtaccctatctacttcctgacaaatgtgtcgacaagtaccgttgattatgtcaagagttttcttgaatggatgggtgatcaaattgcaaaatcttttgaaagcagtagagccaatgccttcttgttaaaaaaggtcacgctgataattaacaaagaagagcttgagaaattgggagatgctccaaaggtggttctggcatccatggcaagtttggaggttggcttttctcatgacatatttgtggagatggcaaatgaagcaagaaatctagtgctctttactgagaagggacagtttgggacactggctcgaatgctccaagtggacccaccccctaaagctttaaaggtcactatgagcaagaggattcctttggtgggtaatgaactaaaggcttatgaagaagagcaagaacggataaaaaaagagaaatcgctaaaggctagccttgtcaaagaagaggagctaaaggcttctcatggatcaaacacaaaggcttctgagccaatggtcattgatgcaagctcatctcgaaaatctgtgaatgcttcacattttggtgggaacaatgatattctcatagatggatttgtccctcctttaaccagtgttgctccaatgtttcccttctttgaaaacactgctgaatgggacgactttggtgaggtcatcaaccctgatgattatatgatgaaacaagaagaaatggataatactctgatgcttggccctggagatggattagatggtaggatcgatgatggctcagcacgcctgcttcttgattcaacgccctcaaaagtcatttccaacgagatgactgttcaagtgaaatgctcattggtttatatggactttgaaggtcgctctgatgggcgttctgtaaaatcaattattgctcacgtggctccactgaaacttatcctggtgcatggatcagctgaagcaactgaacatttgaaaatgcactgcgcaaagaatttagatttgcatgtttatgctccacagattgaggaaactattgatgtaacatcagacttatgtgcttataaggtacaactttcggagaagttaatgagtaacatcatttctaagaagttgggtgagcatgaaattgcttgggtggatgcagaagttggaaaagaagatgagaagcttattttgcttcccccatcgtcaacaccaccaccccataagcctgttcttgtgggtgatctaaagttgtctgattttaaacaatttttggaaaacaaaggctggcaggatttttcagttgaacgtgagaggatcaaatatgttgagattcagtcgctaaggaaagagctgttgcaggttgaatttgccggaggtgctttacggtgtggcgaatacatcatggtgcgcaaagttggtgattctatcctaaagggcagcacagggtcccagcagatcgtcatcgagggccccctctgcgaggactattacaagatcagggagcttctgtactcgcagttctacttgctgtgaggcaaccttaggcttgtgttgtccgaaatttggcgtgggatgaccgtgacaaagttttggcatcagtttccggatgaccgtgctgactaccaagtggtccaagaacgatgacaatgcatccatccaaagaagaacaaaaacaacgacgacaaagcgtccacctattttccacctaggggtgcaatcaatcagatcggagatgggtaatgcttgtatcatattttctctttagatttagattagatatattttctttttagatttagatcagatacgaatattattggtctatgaccgtaagatttgaatggatatcaatatatcttaaatacctatactctatgcggctatgtttttgttttttatgttcc

SEQ ID NO: 3377 - DNA, 3115 bp, Zea Mays
ctttgctctgtctgtcccccacatccgtcccgtccccaaaacacatttctttcctttgcctgctttcctaccaataccatctcgcccgcttgcgttgcgtgaatctgcccattcctcaccattctaaacacccccctttccataacaatgccgccgtggaggcagcgcgcgcggggcctccggcggtgctagatccgcggcccagcacagcgacgcgagccgagccaaggtaccgggcggggacctccagcggcgctcaggaaggcgccgaagaaaaccgtggccgccgggacaggcgggggcgtccaatgcacgagcacacccgcgcctgggcgtgggaggcgacggtgcgcaaggtgcagcatccgcagcccgtgggcaggcgccgggtgtccccgatgtcggccgcggacgactacgagacggcgtcgtcgtcctcgtcggccgccggcgacgtctgcgagcacgtccacggctacatggagcgcggcctccccaacggcgacttctacacgggccagtggcgcgacggcgcgccgcacggggccggcaagtacctgtggacggacgggtgcatgtacgagggggagtggcggcacggcaaggccacggggcggggcaagttctcctggccgtcgggagccacctacgagggcgagttcaaggacgggttcatggacggctccggcacctacaccggcgccgccggggacacctaccgggggtcctggtccatgaacctcaagcacggcagcggcaagaagagctacgccaacggcgacgagtacgacggcgagtggcgcgcggggctgcaggacggctccggccgctacacctggcgcaacggcaccgagtacacggggcagtggtgcgcggggctcatccacggccgcggcgcgctcgtctggtccaacggcaaccgctacgatggcgggtgggaggacggctgtccgcgtggccaggggactttccgctgggccgacggcagcgtctacgtcggccgctggacgcgcgacactcccaccggcattgtccagcagaagggagtctactacccgtccccggcggcgtcctccccgacggcacgcgatccccgcgacgtgttcgccagggacctgccgggcttcatgggcgccagacccgactccccgtcgccgcgcaagtcacgcgcatcgtctgtcagggcggccaacgggcgggcgagctcagcgtccgggttgagcaacagttccggcggcgacaggaagtatgagaagatttgcatttgggagtccgacggcgacatcacgtgcgacattgtggacgggcccgccttgggagatgaggcggggaccgcgcggaggagcgtgaggacggacgacggcggtgacgaccggggcctgccgccaccatcgccggcgccgcacgtcacacagtgggtacctccacgggaggtgaagcgacaaggggagaccatcgccaagggacacaagcactacgagcttatgctaaaattgcagctcgggatcaggcatgcagtggggaagcaaggcccaattgtgcttgatctgaaatcgtctgctttcgacccaaaggaaaaggacgctgcgcaagctgttcaaggtggatgctggtgactatatgttatcgctatgtggaaatgaggctctcagagagctttcatctcctggtaagagtggaagctttttctacctgacaaacgatgatcggtacatgataaagacgatgaagaaatctgaagtgaagatgcttctgaagatgctcccagcttattacaatcatgtccgggcatttgagaatactctagtaaccaagttttttggtctacactgtgtcaagttagctggagcaaatcagaagaaggttcgttttgtcataatgggaaatctattctgctcggaatatccaattcataggcgttttgatctcaaaggttcatcacttgggcgcacaactgataagccacatacagagatcgatcagtatacaactttgaaggatcttgacctgaacttcatctttagattgaagaagcaatggttccatgagttccaaaggcaagtggacagggattgtgagttccttgagcaggagaaaatcatggattacagtcttcttgttggcgtacatttcagagataacacagagaagcttctgactgaaggttccattgactttgatatcatcaacaacgtaccgacacctcgcctttcaaaaggaaatacagatcggtttcttgctggtccaaacaggtctcctaaaatcaaacttggggccaacatgccttcgagagcagaactcactgcccgtaagagcgactgcgaaccgcggatgatcggagagcccaccggagagtgctacgacgtcatactgtattttgggatcatagacatacttcaggattacgatatcagcaagaggcttgagcacgcgtacaagtctttccagcacgacccaacctctatgtccgcggtggacccgaggcagtattccaggcggtttaaagaattcgtgtacagagtgtttcaagaagacgggtgcgcagctgcagacgcgttgagactttggagatgccgcagcctccatgtgtaggtgggtgaactctcaaaggaagcccatctgggtggactagagttgccagaagccagcctccatgttgagactttggagggtggcgtgggtgagcgtcagtcagtggaagcccatctgggtggactagagttgccagaagccagccgtcatctttgtcttccagaattatagttttagccatacacatacgtacatagctcatcactaatgttttgtagggtagggaggtgtttagcttacagatccagctcacagatagaaagattgtaagacaagagcgcaagccagtcgggagatgtagattcttcatcacccgtcccgaggtgtttagcttacagattcagctcacagatacaaagctactgtcttgatcgcaacctcttattttaacttatcgataggaaaccccttgtagacgacgagtgagatcgctgtaatgtacagggtttgtgggtggcctacaagtgatggctcagttttgttccttctttgttttctggaaatgaatgatcttgctaacttc

SEQ ID NO: 3378 - DNA, 3187 bp, Zea Mays
cccccacatccgtcccgtccccaaaacacatttctttcctttgcctgctttcctaccaataccatctcgcccgcttgcgttgcgtgaatctgcccattcctcaccattctaaacacccccctttccataacaatgccgccgtggaggcagcgcgcgcggggcctccggcggtgctagatccgcggcccagcacagcgacgcgagccgagccaaggtaccgggcggggacctccagcggcgctcaggaaggcgccgaagaaaaccgtggccgccgggacaggcgggggcgtccaatgcacgagcacacccgcgcctgggcgtgggaggcgacggtgcgcaaggtgcagcatccgcagcccgtgggcaggcgccgggtgtccccgatgtcggccgcggacgactacgagacggcgtcgtcgtcctcgtcggccgccggcgacgtctgcgagcacgtccacggctacatggagcgcggcctccccaacggcgacttctacacgggccagtggcgcgacggcgcgccgcacggggccggcaagtacctgtggacggacgggtgcatgtacgagggggagtggcggcacggcaaggccacggggcggggcaagttctcctggccgtcgggagccacctacgagggcgagttcaaggacgggttcatggacggctccggcacctacaccggcgccgccggggacacctaccgggggtcctggtccatgaacctcaagcacggcagcggcaagaagagctacgccaacggcgacgagtacgacggcgagtggcgcgcggggctgcaggacggctccggccgctacacctggcgcaacggcaccgagtacacggggcagtggtgcgcggggctcatccacggccgcggcgcgctcgtctggtccaacggcaaccgctacgatggcgggtgggaggacggctgtccgcgtggccaggggactttccgctgggccgacggcagcgtctacgtcggccgctggacgcgcgacactcccaccggcattgtccagcagaagggagtctactacccgtccccggcggcgtcctccccgacggcacgcgatccccgcgacgtgttcgccagggacctgccgggcttcatgggcgccagacccgactccccgtcgccgcgcaagtcacgcgcatcgtctgtcagggcggccaacgggcgggcgagctcagcgtccgggttgagcaacagttccggcggcgacaggaagtatgagaagatttgcatttgggagtccgacggcgacatcacgtgcgacattgtggacgggcccgccttgggagatgaggcggggaccgcgcggaggagcgtgaggacggacgacggcggtgacgaccggggcctgccgccaccatcgccggcgccgcacgtcacacagtgggtacctccacgggaggtgaagcgacaaggggagaccatcgccaagggacacaagcactacgagcttatgctaaaattgcagctcgggatcaggcatgcagtggggaagcaaggcccaattgtgcttgatctgaaatcgtctgctttcgacccaaaggaaaaggtatggacgaagtttcctcctcaaggctcaaaatacactcctccccacaattcttgtgacttcagatggaaggattactgcccacaggacgctgcgcaagctgttcaaggtggatgctggtgactatatgttatcgctatgtggaaatgaggctctcagagagctttcatctcctggtaagagtggaagctttttctacctgacaaacgatgatcggtacatgataaagacgatgaagaaatctgaagtgaagatgcttctgaagatgctcccagcttattacaatcatgtccgggcatttgagaatactctagtaaccaagttttttggtctacactgtgtcaagttagctggagcaaatcagaagaaggttcgttttgtcataatgggaaatctattctgctcggaatatccaattcataggcgttttgatctcaaaggttcatcacttgggcgcacaactgataagccacatacagagatcgatcagtatacaactttgaaggatcttgacctgaacttcatctttagattgaagaagcaatggttccatgagttccaaaggcaagtggacagggattgtgagttccttgagcaggagaaaatcatggattacagtcttcttgttggcgtacatttcagagataacacagagaagcttctgactgaaggttccattgactttgatatcatcaacaacgtaccgacacctcgcctttcaaaaggaaatacagatcggtttcttgctggtccaaacaggtctcctaaaatcaaacttggggccaacatgccttcgagagcagaactcactgcccgtaagagcgactgcgaaccgcggatgatcggagagcccaccggagagtgctacgacgtcatactgtattttgggatcatagacatacttcaggattacgatatcagcaagaggcttgagcacgcgtacaagtctttccagcacgacccaacctctatgtccgcggtggacccgaggcagtattccaggcggtttaaagaattcgtgtacagagtgtttcaagaagacgggtgcgcagctgcagacgcgttgagactttggagatgccgcagcctccatgtgtaggtgggtgaactctcaaaggaagcccatctgggtggactagagttgccagaagccagcctccatgttgagactttggagggtggcgtgggtgagcgtcagtcagtggaagcccatctgggtggactagagttgccagaagccagccgtcatctttgtcttccagaattatagttttagccatacacatacgtacatagctcatcactaatgttttgtagggtagggaggtgtttagcttacagatccagctcacagatagaaagattgtaagacaagagcgcaagccagtcgggagatgtagattcttcatcacccgtcccgaggtgtttagcttacagattcagctcacagatacaaagctactgtcttgatcgcaacctcttattttaacttatcgataggaaaccccttgtagacgacgagtgagatcgctgtaatgtacagggtttgtgggtggcctacaagtgatggctcagttttgttccttctttgttttctggaaatgaatgatcttgctaacttc

SEQ ID NO: 3379 - DNA, 2474 bp, Zea Mays
tgccgccatccatcctttttcccttcctcccctcaccccctcgtcggaatcggaacggctgtcgtctgccccttcgcccccctcttcgatccctcaccccacccagtgctagctagctagctagcttctagtggctagtagctcccctcccctgtgggctgcaacctggtttgggttcgcggatcgatcgcgagatcaatcaatccatggcgcggaccaactgggtggccgataagatgctcgacgtctacatctatgactacctggtgaagcgcaacctgcaggccaccgccaaggccttcatcgccgagggcaaggtcgccaccgaccccgtcgccatcgacgcccccggcggcttcctcttcgagtggtggtccatcttctgggacatcttccattcgtccaccgccaaagcctcatccacatccactgccgccgccttcatcgaccacaccgccaagcaacagcagccaatcggcgccgggaccggggcgcctcctcctcatccccttcacgatgacatcaagcccgatgttggtatgccacagagaacgatgcctgcagacccttcttccatgtatgcatcagggatgatgcacccaaaacctgcattacttgccactggactaaatcaaggtggtgttgggagtgtgccacttaaaggttggcctttaacggtcccaggtattgaccaactccggtccaatttaggtgtgcagaagcaattggtgccatcttcaaaccagttccaacttttatcgccacaacaacagttgcttgctcaggcacaaacacagaatgaccttaccagaatgggttctccagcaccatctgcttcgccgaatgttcgaccagatgacccggattatttgatgaagttgaagatggcccagatgcagcagtcctcaggccacaggcctatggaattgcaacagccgcatcagcagaacactagaaagcggaagccaacttcttccggagcagctaatagttctggcacaggaaatactgtcgggccttctcctccgtcaactccatccactcatacccctggtggtggagtaccagtggctagcaatgttaatattttacagaagagttcaatgatttgtggtgtggatgcaactggtggacttgcctcatcctcaaaccagatggatgctttggatagttttgttgattttgatgaaaacgtcgactcttttttgtcgaatgatgatgtagacggaagaggcatgtttgcagcacttgaaaaagggtcttcagagcacaatacagagtccttaaagggtctctctttgagtgaagttggtaacaaccgtacaagtaacaacaaagttgtttgctgtcacttctcttcagatgggaagttactcgctagtgccggccatgagaagaaggtcttcctctggaatatggacaattttaagatggataccaaaatagaagaccatacaaactttatcacagacataagattcagaactaattcaactcagttggctacatcatcttctgacggaactgttcgactttggaatgctgctgatgaaagtggcgctttacaaacttttcatgggcataggtctcatgtaacatcagtagattttcacccaagattgacagaggttctttgctcttgcgacgacaatggagaaattctcttctggacagttggtcagactacatctactcatgttttgcgggtgaagcagggtggaactggaagagtcaggtttgaacctcgaagtgggcagctcctcgctgtggcagctggaagcatggtgaacatttttgatgttgaaaagcaatccagcttaccctgccctccaaagggtcacaatagtgaggtaaactttgtgtcctgggatgaaaatggtgaatatctggcatctgtaagtcaggacactgtgaaagtgtggtcggtatcgtctggtgtgtgcattcatgagttacgatccaatggaaaccaatatcagtcatgcacattccatcctagatacccgaaagtgttgattgttggtggttatcagactctggagctgtggagcttatcagataaccagagaatcccaatccaggcgcacgaagggttgatagctgcactggcgcactccccgttcactggaatgattgcctctgccagtcatgacagatgtgtaaagctctggaagtagctatatatagaggtgatggaatagtcctaatcctaattatatatgccattattaacttatatgtagcgtttgtttcattccttggttaataacttatataatataatatatacataggcggagacgtgagatggatatacttttcaagggtgattggaccctgtgaggtggatggatgtagggtcggttgtacatgatatattgttgagctgatgattgggctgtatctgcgcctataccattatataacccaccggtttaaatttcgctgaacccatccaaccaaaccacgcccac

SEQ ID NO: 3380 - DNA, 984 bp, Zea Mays
cggagcaagaaacctctctgttgaagtgctgatgatggattacaatgaatttcagtccacagcagaaaaaaaaaaccccggttagatctgtgtagaaagagtaaagaaatacagataggcccggggtccacaggtccagtgaaatgcttgcccacgaacagaaacagcaagaaccaccacaaggcgagtccgattctagatcaagcgagtcctcccgtttcatcgcctcggaaaaaggcgagaaatctgcaacagaagaagcagcagcgacagcgattccttcctcgtacctttcgttgcgctcgcgcactcggatcgacccctctagggttttgcatcggcctcccgccagctcctatccctcccctctccctccgccgcgcgcccgcgcggggagccaccaaaccctaggacggcaaatccggtgcgatcacccacggtggaggcctcgtcggcggccgagaggagccgctcagggctcgggtcagggttccggtacctcgccggcgccgcctctggctggtgggaccggtggatggtcatgggagccagcggctccaagcttgagaaggccctcggagaccagttcccggaaggcgagcgctacttcggcctcgagaacttcggcaacacctgctactgcaacagtgtccttcaggcactttatttttgcattccattcagggagcagttactggaatattatgcaaataacaaaactccaggagacgctgaggaaaatcttctgacttgtttggccgacctttttatgcaggcacctttttggctttaacatattaagagtttcaaaatccccaattatttggcccttttctgatggatatatgctgcatttctgcttactaatttttgttagctgcattgaagttttaacatgtacagtatcctagatgtatatctatagctttctttgaataaccctgtcgatatagccatatgtgtccatttatggatttgtagttc

SEQ ID NO: 3381 - DNA, 1881 bp, Zea Mays
ttgtctgtcctcagtactgaaggtagacttaattccaaatgatctctattgaacaaccgtggtttactatttctaaccaccaggcagcccaacaagaaagatcaattttcttatcttctttgcttcctcttctgtccgaatatgatgatctccagccttcagttcttgatgctcagtcaattgttagtaatttaaaggttttgtttaaacatttgcaggaacgacttattgttactgaggacagattaagggagtctcgataccagattactccatggcatactgaattgtcgaataataccagcaatcctgtgtctactaatcctcctgctggaaaagcattgagcaaaagcagccttgatattgtctcccagatggtgtatcctcacgtacaatccccaatgtcttcccctgttcaagctagaggtgattggggtgcatttggtaacaaaaaccatcaagatatttcaaatgaggttcctataagaaatgctggacatgatgacaagggagggacctctctttcaagcagaagccaatataggactgatgttcctcctcaagtatctcaaggtgattccagtgctgtccattttgactttgagactcagagtcaaaacccaccattcaagggtcttagcagaaatgatgtactggatggttcagatagtgctgaagcccaaaacacacaagaaccttctactcgatggggtctaggggactcatctaatttggcatctggccttgaggatgcaaacccttcatatccttatcttcctacagttcttgaggaacctggttcttctttctccgaagctgcagaggatgatccattgccaggcatagaagggcttcgaatcacaggtgaaccttttcctggacaagaacttcaagcagtgggtgcgccatttagaagacggctcagtaaatttcatagaaggagcaaagcagcctagctatgttgttactgccgatgatgtggacactttactcgccattgaagtccagcccctagatgataggaaaaggaagggagactttatcaaggtttatgctaacgggcagaggaaaatttcatgtgatcctgaaacaaaggagcttattaagagaacccttgacattgggcatgtgacctatgaagtccaagtccaactgcctcaggtcagatttttagacatatgggaaccagctgttctagcaataaagagggaaggttacagcattaaatgtaatgggcagcgtggtgttctaatcacagagaagtttcagcaaggaactgctattcatattccatatgggcgtccaacagagttctcgattacatctgctgcgtctgctgatggtgtcagttataatctgaagccagtagaaaatacactattgcgggataccattgttctagtactaaggttgttcaaaaatatggctcttgagagaagaggaagaagaaagaagggtcttttcttcaagtagtttcagctatattacacttgtttctacgctgcttctaatgtatgtatgtagcattttggttgatcggcgtggtgcacaagtgttctgtttctgtaaaatactagacgattgtgttgtaaaactaaccaaaatgccaagtacacatgttaatattttctgccccactcagaagagctagagttttgccataacgagtgcagctccgcgtttggcttccaggcacagctagatatagttcaataatgtaatcgggtgaaaaagaattgggcggccccagaagatgctctttgagattttatctttgccaggagtcgtccgccctacacctggtgggcggtgtctgcctgcctggcttgtgacttcaaaattggcagcgtggagatgatgaggtcacggttcacgcccgag

SEQ ID NO: 3382 - DNA, 937 bp, Zea Mays
gcaaatcaatccatttcgtttgacaagcattttggattttccagtctcaaagcattccaaaaggaagtcttggatgcttggtttgctcacggggattgtgttctcctagcagccacaaggttttctataatgctcctctttatcttctgtaatttattacaactgctgatgtgactttgctttttatatgggctgtaagtttcagtaatattttttcataacttctatcattattgaatacttatattttgtatccttttttcgctgaaccttcttgccttatgtttgaacatgcaacattttgattggggtagaaggtaccaaaggaaatgagcaaaacatatcatacagtctcagatgctgcaggatcacatgaaaattattgaagacgacggtccaggtgcagccttctatgccagtgctaaggccttgactaatggaaatcacactttctatgtgagcaaactgatacagaggttggctagattaagtaaatatgatacaatgtatcacctgcacagggacctgtcaagcaacaacctcaatggataaggtatattaaatagtaatgctccttccatttcataatgtcattacttcttcagcatcatgggagaaaatcttactgtcagggttcagaggatgttgtacgtaacttttaatgaagagctttgctggtgttgcgacaaagatacatgccaagagcagtatggtcggaggtgaagcagtgagtaacatctgcgctatagtggcattcaacgttcaaagcaagaaatgtatttggtttaattattgcaagcagtgatctgaaatatgtaaattatctttatatggtctttgcaagggaacacattttctggctctataccatcagtgattagcctatacaaattttattgaaagaaaaactaaaggaatgttttttattgctcttgca

SEQ ID NO: 3383 - DNA, 1604 bp, Zea Mays
cgtaaggagacaaatctgcaagccaagaacaggtggtgcttgatgagataaaggatccttggaactcattcgctgcacccagtcactgcctcccagatcctcaacatatggatttccccaattttagtgttgacaatcctcacttctaggaggtccattgtgatatctactttgaagtgcatgccatcaacaatactttgacgccactatttgtggcactaaactttgaaggggttgtagctaactgattgcaatcaattgaactcagggccactcactatttggaaacgtcagcagctaatttggacaacttgcaccttctatctatcttcaacaactaatttcgacaatttctgactttcatttagaacaatcatctactatttcggaattggaagaagagcgcacatccctcctaaacctcatttcttactcgctgtttcgaatcaagaacaaccgttttggacagcttgcagcttctatacagaacaggtcatttgtacatcttgcaacctgtacatactccagatacgctttgtccgataagcacaaatattacctttatagtatgcatcttcaggtttttccactcacgcctcaaattttattccagcctttgtatctcatttcaataagtagctgtgctcagctgcttaccacacatcaaaaaggtaactcctatctatatacctcccagattttacccacttgcaaaatgtttgcttacacgcataatatttactcaacttataatgaaactaacattaaaaaaagtaaatgttatattcagaagatgtactccccatttgtatttgcaaactcaaatgaacatattttacccttatttactgctttgtaaaaggatacgtagactccacaaataaagttcactcatatactcaattagaacataatgaactgacactttatgattacaaccaacatactctcaaatctgattctaaataacatgcttccaaatctgatactgaagaagaaactacaaaggtacaattcgtccaccttattttaaaaattgataaacacaagtacatttgtaaaatgagcgtataaaaatgctccttttcccttttataggaccaaacaacgatcgatggacaactcaaaaggaaaaaaaataatatgccctcaatggaagctcctccaaaaagaattggagcatgcacatacgagtagcagagtagcgacattacattatgggggagaagatctcccataggtggggagctgggaggtacagttgttgatggcgcccacgacgcacaggcccttgacaccatccttgtccttgtagtcccctgacaaaacagaaaaaacgacgcatgatgaccatgagcacaagattgcgtgtcagattcatcttggaacgaggggcgtggtcgcttaccgtcgtagttgtaggtgcagaggaagtaagaagaattcgttaattactgttatagagaataaaatgaagtagatggcttaatctaggctgtcgaatgtcattatcataaggcatatccactatgctgcaagcctggaaccttttattcatgtaaagtaagcatgtgatgtgaactccgtcatgctagcttcataca

SEQ ID NO: 3384 - DNA, 2730 bp, Zea Mays
ggtggtgtttgtggcgtttaaatctctacttaagtcacttagggtatcatacacagtttgggttctttggtaggtaaatcctcctcaagacccattaatctgacaatgacacttggatatattatctttgacaattttactcttcttctttagacatatcattatttatttatttcattattcacaattataagtagtaatccaattgcaggatgatgactatcttgctcctatccaagctgatcgagaaaaagagttgaagtttgtgcagtaggttgaactccacagggtagaggaagctgcagcaagagaggctgctcttgaaaatcaaaagaaagaaaagaagctaaaaaagaacacaagggagaggttagattccccaacatgtccagtttgtccgcaaggtttttgtggggatttcaaacaaacattaaccccttccgggttggattggaaaatggactgcggactgccttataatccttgggggcatgctgtgcacgacatggccaccgagagccgatggatgccagatgagaagaagctggcttctgctgccactgagaaattcgaagaggaagataatacctcctattgtcaacagtgatgtgtcaatggagtgtgtatagcatgaaaaaaccaaacatgacagttcaagagagacatttcagaactgcttagtttgtatatcccatgagttatctcctaacatcttttaactgcttcaacattgcatcgaaagcaatataggcatgcctgatgatggagagatagatattttcatcgaagctgtcggtgacatgctatttgagttgcagaaacatttcatattttctattattatatacataggtttttgtatggaggtactgaaagccccctcctgaaatatagtatgattaccaccttctctacaatcctttttttgtttttgttttatttttacgttgaagcaaagaaccataaaatatctgtttggaagggacgagatttgaaggtgatgaggctccttaaagaaggtttaatggaacaaatattagcataaggagtttgctggccatgtcaaaatctctatgggcagattctaactagagacctctaaaggttcaatgagatgaacattcatcaagtcttcgtctagatagaatctcatggtttcaagactgccttcaggttttggatccttggaactcattcgctgcacccagtcactgcctcccagatcctcaacatatggatttccccaattttagtgttgacaatcctcacttctaggaggtccattgtgatatctactttgaagtgcatgccatcaacaatactttgacgccactatttgtggcactaaactttgaaggggttgtagctaactgattgcaatcaattgaactcagggccactcactatttggaaacgtcagcagctaatttggacaacttgcaccttctatctatcttcaacaactaatttcgacaatttctgactttcatttagaacaatcatctactatttcggaattggaagaagagcgcacatccctcctaaacctcatttcttactcgctgtttcgaatcaagaacaaccgttttggacagcttgcagcttctatacagaacaggtcatttgtacatcttgcaacctgtacatactccagatacgctttgtccgataagcacaaatattacctttatagtatgcatcttcaggtttttccactcacgcctcaaattttattccagcctttgtatctcatttcaataagtagctgtgctcagctgcttaccacacatcaaaaaggtaactcctatctatatacctcccagattttacccacttgcaaaatgtttgcttacacgcataatatttactcaacttataatgaaactaacattaaaaaaagtaaatgttatattcagaagatgtactccccatttgtatttgcaaactcaaatgaacatattttacccttatttactgctttgtaaaaggatacgtagactccacaaataaagttcactcatatactcaattagaacataatgaactgacactttatgattacaaccaacatactctcaaatctgattctaaataacatgcttccaaatctgatactgaagaagaaactacaaaggtacaattcgtccaccttattttaaaaattgataaacacaagtacatttgtaaaatgagcgtataaaaatgctccttttcccttttataggaccaaacaacgatcgatggacaactcaaaaggaaaaaaaataatatgccctcaatggaagctcctccaaaaagaattggagcatgcacatacgagtagcagagtagcgacattacattatgggggagaagatctcccataggtggggagctgggaggtacagttgttgatggcgcccacgacgcacaggcccttgacaccatccttgtccttgtagtcccctgacaaaacagaaaaaacgacgcatgatgaccatgagcacaagattgcgtgtcagattcatcttggaacgaggggcgtggtcgcttaccgtcgtagttgtaggtgcagaggaagtaagaagaattcgttaattactgttatagagaataaaatgaagtagatggcttaatctaggctgtcgaatgtcattatcataaggcatatccactatgctgcaagcctggaaccttttattcatgtaaagtaagcatgtgatgtgaactccgtcatgctagcttcataca

SEQ ID NO: 3385 - DNA, 1542 bp, Zea Mays
gtaaaaaggtattcacagtacatgagtgcctttcagtttctaatagcatcacaaatattcatgtggattcttttgttcataccttcggtaggtccaaagaaagcatgtatacaaccttaggcaggtgatattatctggtgactctgaaagctgcagtgaacaaattttccagtacatgcaagcggtagctgatgaaattgttttggtaaatgttgacccccaaaagccacccaaggcatggaatctggtaaagcttttggatgaatttgttagtctaggcggaaaactgagtgaatcattcaaggacatccgagagcaaaacctccaatcagcacttgagcaaatgcaaggttggggtcctgtgaaggctgatagtttcgcccttccaaacatgccgttgccgcccgattcattcagaggaattcgaaaaagaacatcttcaataacgcggtggttttccatttgtgttgatgatacgtcaaatttgtatgttgcttcttttcgataaatcaatccaggaaagggagatatacaaacactgtgaatctgctccggaaatattttggggattttctaatagctacctacttgaatgccgtgcaagagtcccgttatgacgatgcttatataggtggaattgagagggaagtactattgaagactcttgatacattatggaaagaccatttggtaaacatgaacaagcttagttctgctgtgaacgttcggagttttggacacagaaatcctctggaagagtacaagatcgatggctgccgcttcttcatctcaatgttgagcgccacacgacgtctcaccgtggaatcccttgtgcactactggtcgtcgcccatggagtccgaggagatcttcaacacagaggatcaatagcagaagacctgacgtggactggtgctgcaagttgtgggcaggttaattagcagagaggcacaggtataaacaggagccgcgcgcggcgtgtgttaaccctgtaaaatcacaagctgacatggccacggttgcgtcgatttcgcgctgtggctgtgcacctacatataaaactaagtacatctcaatgcacaagagggtagtaactggataggtgtggactgcaagacagtctgatccatcccacatcagcaatacggcgttgccgcaaagttggcatctcgttcacagtgtactgtggtcctttagcctgtcatgatgatgaaaaagtccgctctgtacctttttctttcatcgctcgtcagacggaacaggagagtgcggaatctcttgcttgtggatgacgaactcttcgtgcaggtaggtacgcagcctagtggtcatgctttgacattgccaaatatttggtttttaattttttttcgggcgtgtgatggtggcaatttgtaagtaaaaaactctagggagtatggtaccgatttaacctgtgtgtactgctgcagttgcaacaatatactgtacaaaaagtagaagcccgtgaattaaagcttaagtctcctggatgctgctggttcgtttttttttcctttaatt

SEQ ID NO: 3386 - DNA, 1486 bp, Zea Mays
cttgcaccatttcctcaaaccaaaaagcaccttggaagaactacaaaacacaacaggtctgacagttcataagaggtacccttttgggaaggtcctcaccatggatctatcccaggcactgacctcatccagtgatgatgaaaccagggcacttggtacattgcttgatatgttcagcagttccttttcacttgatgatatagctgatgcatatatcaaagcaaatggcgatgttaacaaagctggagatttcttatacgaccttcaacattcattgcctcataccaaagatgttgagtcaagtgtcgaggctaacctttcccatactgacaaggcagttgaagaaaactgtatggacaattcaagccaaccaagaactcttctccgtactgagcaggcagttgaagaaaatcatttcgagaattcagatcacacaaaaatgcctgaaaatctgcataagtctagtgctgcatttggtactgtctccagcatgttaagaaaagagtctatcagggctacaacaacagcgagtagagcatcaaaaaaaggcaaacctcttagggttgaactgccagagtacatgcgggatgattttaaggtgacatctgatgaatctgactctgcaccgaggagagagactttgaataacagggatgttgaggagtttctgttttgcatgcttggtgaaggatttaagctcagtaaagaattgatccatgaagttctaggcagctgtggatatgatattaagaaggctgctgatgctttcagggagggtaaccagaaagaagtcgattatcttatacaggaaggcaagcgctattatcagatggctcgactcgctgatgagaaatctgctagggagattatcaagcccagggaaacagagtcaaaaaatgaattttgtcttgatctgcgcaaacaagatgcaggaaatgtatctaatctcttgagactccatcttaaacagttggcaaacattccatcttttgattacctgagagttattattggtattgacgacagcagtttcaagatgggacaaagaagaagaaaggtgatgaagtatgtggaaaagaattcactccagtggactgaagaagaacctcgctctgggaacatcctcatccggattaatcaggtggaaaatcggcagggataggttcatgtatacaaaggtggcgtgacacaaggtgacagaagatggatcgtagatcttaataagtgccgttttgaatcaaggtgatgttctttcggcacagggagtcatgtaattgctgcattgctgacgtaatgtaaccagcaatgcagcaattaactcgaaacgtctgcaatgtatgcacaaaaagaataccattcatggcaacttgaacatgtggacaatggtttctgatatctcaagggtcctttgcagtttcgaaactggtttcttctttctaggttcataattcagaaactgattttcaatttagcatcttgaacgcag

SEQ ID NO: 3387 - DNA, 1637 bp, Zea Mays
aggagcccactcttgggcatacctcagttccaaaaagctcgcaacagccagccctaggtctgaactctctcggacgggtgacaggctgacagccgccgcccgccagctttggagagccacggtgacaggccgccagcagccatcgacggccctccctccacctcgccgtcgtccctcttcccccatctcgccgagccatcgtccctccacagcaggaccacctcaccgagccgtcgtccctccacagcaggagtgcaggaccgcatcgccgagtcgtcgtctctccacaccaggttcgccgtcgcggcgcggctacctcgctccggctcccagctcgtccggtccagctcactcgcggtcgcgaccatctccgtccacctcatccctccggcaagcagttgctaaactcatccagggtcagcagatcagcagctcttgccttatcccgctggctggccgcagcaccggtggtgtggtggaggatggcatcgaaatacgtggccagggtaccgtctccatggtgggcgccacaacgtcgtttggttggttcatgggtttccgtctgctcggtaaaatgcggtgcattgggaggacgggatgttgtgtgcgctgctgttagcttcagaccatgcatcgacattcacaaggggaaagttaagcagattgttggttctactcttcgggattcatccaatgatggcatggaacttgtgacaaactttgaatcagacaaatctcctgcagaatttgcaaaatcatataaagaagatgaacttcttggaggacatgttataatgcttggctcagatcctgcaagccaggctgctgcactcgaggcactacatgcatatcctgggtaaagtattattgcaatccggtgctcgttttgttctctacggtcacagccaacagccttcttgtgatggagatttttacatcttccagtgtttcttctgtggcttgcaagttggaggtggaataaatttgcagaatgcaatgtcttaccttaatgaaggggccagtcatgtgatagtgacctcttatgtgcttagcgatggcaagatgaacattgaaaggctgacaaaacttgtcgagctggttgggaaacagaggcttgtgctggaccttagctgtcgaaaaaagatatactattgtaactgacaggtggcagaagttcagtgatgtgtttgtggatgaaccggcattagaatatctcgctgccttcgcagatgagtttttggttcatggtgttgatgtggagggcaaaaggttagggattgatgaggaacttgtggaactattggggcatcattcaccaatcccagtaacttatgctgggggtgtgtcaacaatggatgacctagagaggataaagaaggcaggcaaaagtcgagtagatgtaactgttgggagtgctctagatatatttggaggagatttaccctacaaagatgttgtcctttggcacaagaagcaaagtatggttggccaagtgtcaaggaacatgtggtagcgatcagtattgccagaatttattgtgtatcgctcgctaaaagcatatttattttcattacaaaacttcattgtgcgtttgaattactgagctttcttttgcttttgcttttggttgtttagac

SEQ ID NO: 3388 - DNA, 3962 bp, Zea Mays
ttcgcttggggcattgacctcacccaagtcttcgtcttccttctttggcagctgccagtttcatacaccactatttttatccagatccatccttggatttctcttcattccagatacatcttctctaaagcctaaaccccttgctctcttttcttccgatgtatagttggagagggcagtttcacctgcgaggctgaggtgagcaaccattgttggagagcaagcagccacatggccagcaccgctgccactccggaagcaggcagcaatcacagtgaagacggcaccacagtggagcttcccatcgtcgtcaccggcagcaccagccaagaatccattgatactccatccaccaggtacttgttagcccctagccatgtatccagctccagcttcaccgcagacattgagctcctgtggagactgcggaagtacctgctgcttcttggcatcttagctgttggtgttacatacaatgctggattgaccccacctggagggttctggtcgaagaacacacaagggcaatctggacatgaagcgggtgaccctgtcctccgggctctcttcttcccacggcacgaggtattcttctactgcaatgcaacagcctttgcagcgtctcttgtcctcatcatcttgcttctgagtaaaaacgtggcaaggcagaggctatggctccgctcaatgcaactcaccatggttctggacctgttcagcctgatgggggcctatgctgctggaagctgcagggcagtgaagtcctccatctacatctgggttctggtgctctctgttttcacatatattatgatccacatcctagtgttcatgaaagttgttccaagatttgtgtccgagaaaagatttgttccaaaacggctgaaagatgtggcgcggtctgtggagcgctggatcctatcccggtgtggtgttcacaggagtgaaaagaacagctctcacgagaaagatctagaggaagctcgcaagttcactctggtgcttgtgactttcgctgcaactgtggcataccaagcagggttgagtccaccgggtggtttttgggctgaaaatgatgagaacaaaactccagctacatctatgcttcgctctggaaaccttcctcgatataatacttttgttgtttgcaactcgacttccttcgttgcgtctttggtcacaatcatactgcttctaagcccagaactgagtcggcatggcatcagatccagagcggtgaccgtgtgtgttgttgtcgacatattgggccttgttggagcatatgctgcaggaagctgtaggagtgtggtcacatctgtctctgctgttttagtggctgttctagtatggatctgctttgcagttttagctgggatctttgttaacagatctgtagcagagtggtttgggaagaagatcaagccagatattatgaggtgcatcgacagatttggccgggtcttttcgtcgaaccatggcagaaagagatcaagaaatccggagggagagaattctattgcaagtcatcagcaaactgaagagagcataaaaggtgaagcagaagcagaaactgctagagtgccagaataccagcttccataccatcagctagctccagatattgaagagggtgaatgccctggggagcagcagagtccaggcaaacaacaacctacaaacattgaggttgtgtccatctcagagcatgcatctgtaaatgagaagcaagcagaaaatagcagcagtgtcatgtgcaagctgggaagtcagtctacagacccaaattcagctgcaaacgaggctatgactgaaactgaaacagaaaacatacaagatgcaaatatggaggaacaacaatcttccttggtggatggtcttaaaactcccactactgtggctgatcaagaatccacaaccgtggagtgcttgtccgacattgcacccaataaccataatggagccaccaacagtttcaaggaagagaaagaagcttcggagcagcatttgcaagccaatgagattgagagtttcagaaccaataatgtggccagacctgttgaaaatggcaacgttggcatgtatgaagtaactcccagacaagacgacggtgatgtaaatgctggtgccaatccaactgatgaacatctgaagaagtcccggacatacctccttcttctagccattcttgcagtatccctggcgtatcaatcaggtttaaatccaccaggtggtttctggacacaaagagggtcttacattatggggagtagtagggggacgaagagctccatatacatatggctgttggtatgccttgtgctggtttatgttgctgttcatgttctgatagcaacacatgtaatccctgaagggtgcaagaaggtcgtggcacagaagattgagaatttctcctgcagatacatatggacaaaggcttcgtttcggaaccggggaattgatggtaatggtagtgattgtgaggctgggcaaagccagaggagtgatgccgatgacaagacctgggagcggaggcgcaatctactgttgatgcttgctgttctagctgcaacagtcacgtaccaagctggcatcaaccctccaggaggtgtatggtctgatgatagctcagccagtggtaaaccaggagacccaatccttcagcacaacaattccaagcgctatgatgttttctactactcaaactcactctcattcgtggcatctgtagttatcacaatactgcttgtgaacaaggaatcctgcgagcatggtatcaagtcctatgcgctaagagtgtgtttggtggtgggcttggtgagcctcttgattgcctactctgcaggaagctctaggaaagcaagagaatctatctatctcatcgtcattgctgttgcagttctgattgctcttgtgattcaagtgcttcttctctcctgtacgcaagacagtctcagaggaccaactggacagtttatagaacgtctgctccagctgctttttgggacggacaaggcctggcatggagacacttctaaacagaaagaaagctcaggtcgtcccgagaaaaaagttcggaagaggcacaagtatttgatgctgcttgcagttttagctgcctccatcacgtatcaagctggtctcaacccacccggtggtttctggtccgacgacaatgaaggccatgtggaaggcaatcctggcctgaaaccacctggtgccttgtggtctgataacaaaggtcatttggcaggcaatcctgttctccttgatattaatcctcggcgctacgaaatattcttctgcttcaactctatctcgttcatggcatctattgtcgtagtcatgttcctgttgaacaaatctgcccggaagaaggccgtgccacttgaagtactgcacttgatcatgatactggacctgctggccctcatgactgcttttgctgctggaagctgcagaaaattcaggacttcagtctatgtgtatggtctagtgctcggtgtcgtggtataccttgtgatcgcagttcttttgtcaagtggcattgcaaaatgtctgagacccatggatagaaatagggtttcctctcagagaagtcctattcgcgctcctacagcaagcacaaggatacttggagaccatgcttgatggttccattcctttggtaatagtactagtttaatagtagtgtatgtatttggcttttcagtgtacgttatgttgtgggagtttgaattgaactgaaattcgacgctttatgttgttcatttcttttagaatgtaaaatcagtgcaatcatgaatctacatgtgtatgacgaaggttccaatgtatgcgatggaatgaaaggaaaattggtgccatagtttgtctaaggttagttgtctaaattgaaaaactaactttagccaaaaaagttaggtaaattatagcaagttaggcaacaaatcaaacaacatatc

SEQ ID NO: 3389 - DNA, 2795 bp, Zea Mays
gtatctcgtatcctaataatctccaaagagcatcttgctcgcatatatatctgcagtctagatattcttgtatctcatctatagtttctgcttctttgtttacatgtgattcttctcctttttggatttttttgaatataacctttgctctatcaggtcctttgtttacatatttgcataaatatttcaagactgtactcttgtttacatattcaacatttatatgagcttggtatctttttaatagttttaaattatgtggcacaacccatttgttgtctaagttgtgttgttctcttctgatgaaaatcccattgttcctccttcgatatattgtaaagccattttcagagaatgtagtgttttcttcaaaatctttggggtaaattttggagcatttgccttttttcatgcatggacaattccaatttttatctccgcacggtccatgcatcatatgttcagcaacaagagcatatcccaaaggatctaactcgggatctggtatttcagcagatatccacgaatctattgtttctgtagttatttcacaacctttcttgtctaaccaaattaatgtgtgcacatgtggtagacctcgtttttggaattctatagaatatagtagtgctagtacaaggccaaatacctttcctgattgtaagtcatccaaaagttgttgtagtttcatatgaaaaacacggacaataatatcaggtctatcatttggatgctcacctggtaataaacatgttgttattttaggccatttagggttacaagtgcatgtaataaaaagatctggtggcccataggcacaacaaatagcaatgccatcatggtaattttgtatcatataccgttttgatccaacatggctagatggtaataacaccttttttcctattcgactggcgtcatatattcctttttctactgcatcaaaaataccttgtacatattcagctcgtaattttgattgatttctaacaatataatcaagcctgtcttcatcctccattgctcgaccgtctactactacttgttttgataatcggccataacataaccagggattaggctgattaggtctatagtgcacatgatatttcaaaaattcatgcaaagttactctatctcttttggagtcatctctgttttgactaatgtgttgtccatggtatttaatacctagttgaaagcctcgttcgccatatggaaataggagcgggtattgtagaggcatatatgctggatggaaaatagatatcctttgaaggctattttggtgtgtgctaacaatgatgtcccgtttgtagttctcaagtgataaatcacctacaatcagcatagctaattcttcctgatgtggcatctcatattgaattctatcagtttcgtcagcgcctactattctaatgcttacatctatgcctttgtgttcttcgagaaaatcacgagcttggcggaatatttttactaatggattatattcgtcgagcatttttttagccctctcactatttctggatctatgtcttgctcacctggttcttcatttgttagagccctaattctattttcaatttcattctttgtatcaaaaatatatagttctgcaaatttggggcaattgtctggtaagggtagtaatgatcctattcgatgatgtatttggccattgacacgaaacacatatggtccctcaccatcatttatttttttatcaatatttccccccatggaagtaaatgcaaacatgctattatattgtcttattttttgtagaaaatgtttacatcttgtgtccatttttcgttgtattaattcattaagaaaagttgggggttctttatattttggtattctgattttgccatttttgcagcagttcgaatatattggttcctgattattgtgtctcgtcatggatttattgcgttcattgaaccagaaaattgcatcgcagtgtctacatttgtattctagtttaccaagatctttttgttggagggttcacagtttttagacatcttcctctttctaatcctttcaccgcgtcttattttactctcttctccaaaaaagttactgctctagaggtgttttgaaatagaagagagggtacatatttgagcatatgtagagcccaggtacctcgctctacaacatcaaggattatcttgtcattcataagagttaaaggccctttcttcagtctttcactattaagacacaatttcatgttgcaaagatcttcaatggatgatattgatgacgatatataagggatatcactcttgagccacataagcttgatgaagagattgttgaatctaatcttgagcttgaagcagactttgtacaatttaaatatgatgatcgatcacaaaagatgggaaatggacataaacagtgaacatgaagaagggtgtgctagatggaaaggaaaccggtcaagctgattgaataagaagaagtctcttaactactataaatccatccatgaaatggagaagattaatgctaagccacttcaagaaaaaaggttgggtctagtcgttgttgtctctatactggcaaagggaatgcggagatacatttcgagaagaaaaaggcaatgatatggaggtgttttgtctttcattgataaaaaattagaaatgagcaggtgatgaatgtcacatgaatatatttagctatttcaaatggaaaccaactttgttattgtactggcttttgttcataataaaaacacagaaggcaatggaaaatctacatgcaaatgttttgct

SEQ ID NO: 3390 - DNA, 2140 bp, Zea Mays
gagagctatctcactaagtcaccatgtcacggatgaatatggttaactatttggttcactataattctaaacatggaccttaacacaactgaattccaatagtcattttattttgagagacaaattttcttttgtttgttttcatttaaaagttccatttgtggtattctgatgccaatttcgcatttacaattttttgctggagtagaatttactaggagctgcagaagcaaagatatcctcaaaacctcctagagctttgccaagagttgctatgatgaggtcatcaactaccacagctgtcacctctggggtttcagacaaaagaagcagcactgggggtgctgccaacaggcaggcagctggtaaaactgccagtacttcagctggcctgagatctggcgggggtacaaagtctagttcaatctcaaaatcaggtcccttcacatcagcagcaacttctcatggtgtgtcaatggacactaagccggaagcaaaaaccaaatcagcaaccttaagcaacaaaaataggactgcccagagggtccctgttcatccgccatcaaaatctggtatcagcaaaactattccctcaagatcatcagggaacacgattccagctaagggccatgctgaccgtgcatcaccaagcatttcacctagcagctccatggacagcatgagctctgtcatatctggggcttcaactgcttccaccgtagggaggatgagccatacatctgagagtttaaatggactgtccccctccctcaggaagagcaatgactgccctccaactccaaagcttaggcctcctgttgtcacagagggtcattcatctggaacagcagcacctggagttaatttaaaagctacttctgaaatgaccaaccagagaaaaggttttaagccatctgggcttcggaggcccacacccaagattggttattttgatgctgtatgtgcatttttttaaaattccttagcttgcagtaatagtgatttcctttattattgtgcttctaacaatctcactgtatgtctcaggagaaatacattgaccaaaacatcggtgcacagctacaaccacaaccttcaaaggtccagtgtctacctgacacaacacaatttcagagcatgaatgtggatgccgcaccagctacctacgtccaacaggattcaaaactgacagcaacacctcatgaggaaagttgtgcttccgaaagtaaggtcgtgaagctgctgcctcttaaggtggaagtagagccttttaaggtggcggaaccatgcacgcaccagactgatccagttgtggtcagacccgaagcagtgcaacagcaatccatggagatccagtgcttgctatatgccacaccaaactctcagcaaacctttggtcaacaagtattagaacctatagtagcacctcatgaggttagtgcttgcaaaagtaacacagtaaagacgcctttggaaactgtgcaaatggaagtagaagcgcctctagaagcagtgcaattggaagcagaagcttttaaggtggacaaacctgaagcgtgcagacacctggacaaattctgtgatcaaaatgctagagctcttgtcgctgaacgtgaagattgcacgctcatgactgaggcagtggtggcactggctacagactattcaaaagagaacattccggttttgcatgagaatatacaagctaatgtggatgcgagttcattagttgaggtgctgacccagaagttatcctccatttctcttggggaggataactctaacgtggctctcaggtcctgcagtgaatgaggtttggatggtatgctggttgttattttattaccctcttgttatctgtaggcaaccgtaccgcagctgacgagtccaattcccttaacctgcttgtggtgtaaaatccttgtgcacagagctttatagaactaagattttctattgtatgcatgaaaacctcatctttgtctattgccggtttgcaagtaaagtgtgtttgtttggtaattatattttactttgtttagtaattcacaatggatacctagagagcctgtttgtaactgctatacgagtgggtgattttttgtgggagagggtctaatggtatatgttttgatgtcgg

SEQ ID NO: 3391 - DNA, 1843 bp, Zea Mays
gagctcacggaagtttaatgcaagaatggtatgtgccgtccaaacgagcgagcacacatatcctttgtggtcgccgtcgctctcctccacatgacttgcttatgccagtatgctgactgtagcctgtaccggagctaccccagcataccacgctgtgattttgctgacaacttcttcttcatcccaggcatcgctgcaccagtctttgctggagtttacacagcgcacagtcttctcagcagaggcaacgaggctccgtctgatgaaggaaccaatgaatcagatacggttcaagaagagacaaagccacctgaaacagggaactgtgaaaagaggaaggtacgggtgcagctatataagctccaggaagcagagagccaggcatctctacttgaaagctgcttgaagagtttgtgcacagtgggtctcctactcggctattcagttctcctgctctactctccggaaaccatggctctaggttgtggagctgaaggttggaatgcactgtgagaggtgcatcaaggccatcaagaaggcaatcaaaactattgacgacatggagagctatcgccttgagacggagataaacaaggtcacggtgacggggagcgttaccccagaggaagtcgtcaaggctctccacaagatcgggaagacggcgacatgctggacccaagactgaggagggcctggttgattcggacgtccctgagaatgagattttgttggctgtgggttggattggatggagctggagcctgcctgggcaggcaactttttcagaccatcagatgtataggaataaccacggacagatgctgtgacttgtactatatgtgagatcctacctaccactaccagcttgttcaatcatgctccacgcacgcgcgatgttcgagaccgtgtctaccaggttgcctgatagcctttccttgaccatttcttctctgaaggcgttgattcagctgtgcgataaatctcggctgacctgcctccattggcccgacatctgctacagctacagtacgtgagaccagacgcgtcagctcaagtacgtgccgcgtgatgaacgaacagctccgaagctccggtctccggactcttccacccgtctcgtatttcgtctagctagcagcactagcaggctagcagccattaataaggagttggagtttcgtgtcgcggtgttttatctgaggagctgtgggataagcacgtgtggcacgggcagagcggtgcaagtgcaatcgggatcaggagcagaggtcggcaggtcgctccgcttgcgcgaaaagaagcatggcggtgtgcgcatgggcaaaaggcagaatggctggagataggtgtcgatccgtcatcgtccatgatgaggactgcttctcgcttgcgagtttcgttgcgtgcggacgaattgaccagacgccgttcgtcctctccagtcgagtctgtgtttgtcctgtccgcgggttggaagagtgtcaacaactctacaccacgcgaggatggcgccagcccgactacagaaaacctgatgggaggaaagccgacgttggaagcggaagctgatggagctgtgaagcggagaaggagcaacagagttaagaagccgaactccaaatatattggtgccaactggctgtaacacaggggatgagcgtatctctggttcgggtttcagtagcaaatataaaaggcgaactgctgccatttctgtaatttggcttttggcttttggttgttgaacaaacccgaacagatttgaaccgcaaggaataacacctgtccacatcgccaatcccagatcgcgagctcctccctgtgaacgtgctaacaattggta

SEQ ID NO: 3392 - DNA, 430 bp, Zea Mays
ccgactagcttcaagattaattattcagactagcttcaagattaattattcagacactgtttgtgttcttcctattttccctaggcttcagaagtgaaaatagcataagttccaaaagacaaggccgaacttgccgaactccaggcccggctgaggaagcgtttccctgtggatgcatataacaaggcacgtatggagctggaccccaacaaggtgctctcaaacgccaagttggagaagatgttcccagtgttggagcctgctcaccagacaaagtaatctcaactactccttcccggcgaggaatggtcgcagaaggaactgctccacgatggaggatggaggacgagaagcatttaaatgacacatcaggtgtatccgtttgaattataagaccttgtagtagtttttgaaggtctgtataagtttg

SEQ ID NO: 3393 - DNA, 2266 bp, Zea Mays
aaaggaagcagctccggttccctcctccccctcctctcccacctcatcgtcttcctccaccgtgccggccagcccagacgtacacgacggatacgacgtaacagccttctccccactcccccgaccggtctcgtcgcagcggagcaccgcggggttgattccgtacgctcgccgatgaccacctcgtcctccgggagcatcgaagcaccggcgaactcgaggcccggctcgttcgcgttcgcgagcacgagcacgagcacgagcacgagcttcacggacatgctgggaggatccacggacgcggccggtggggcgtcgaggtacaaggccatgaccccgccgtccctgcccctgtcgccgtcgtccttcttcagtaacaaccccggcggcctcaaccccgccgacttcctcgactcgccggccctcttcagctccagtatcttcacctcgccgacgacgaacgcattcgcctcgcagcagttcagctggttggcgacgtcgggcgcggagcaaagcggcaaggacgagaggaggccgtcgtcgtacccggacttctcgttccagacagcgccgacgaccgaagaggccgtgcggacgacgacaaccttccagccaccgattccagcggcctcactgggtgaagaggcgtatagaagtcagcagcagcagccatgggcctaccagcagcagcaacctggcatggacgccggatccagtcagcaggctgctccctacggcgagccgttccaggctgcctcgtcggacgccgccacgatggcgccgcacgtgccggcgagcggcgggtacagccaccaagcgcagcagtcgcaaaggcagtcgtcggacgacgggtacaactggcgcaagtacgggcagaagcagatgaaggggagcgagaacccgcgcagctactacaagtgcacattcccgggctgccccaccaagaagaaggtggagcggtctctggacggccagatcaccgagatcgtgtacaggggcacgcacaaccacgccaagccgcagaacacgcgcaggaactcgagcgcggccgcgcagctgctgcaaagcggcggcggcgacgcgtccgagcactcgttcggcgggatgctgggcacgcccgtcgcgacgcccgagaactcctccgcgtcgttcggggacgaggaggccggcgtgggctcgccgcgggcaggcgggaacgccggtggcgacgaggacgagccggattccaagagatggaggaaagacggtgacggcgtcggcgagggtatctccatggccgccaaccggacggtgcgtgagccgagggtcgtggtccaaaccatgagcgacatcgacatcctcgatgacggctaccggtggaggaagtacgggcagaaggtggtgaagggaaatccaaacccaaggagctactacaagtgcacgacgcccgggtgcccggtgcgcaagcacgtggagcgcgcgtgccacgacctgcgcgccgtgatcaccacgtacgagggcaagcacaaccacgacgtgcccgccgcgcggggcagcgccgcgctctaccggcccgcgccgccgccgggggacaacgccggccactacctcggcggcgcggctggcgcggcgcagacgggcatggcctaccagctggcggggcagcagtacgggttcggcgggcagttgggctcgttcggcctcagcggcggcgcgccggctcagagcagcggccccagcgggagcctcgcgttatcctccggcttcgacaacccgatgccgatgggttctttgtacatgagccagagccagcagcaggggcagcacgacgccatgcacgcgccgagagccaaggaggagccccgagaggaggacatgtttttccagcagtccatggtgtacactgactgaggactgaggacattgcagaacatggcaaggcatatgacgtgatgtccatagactgtttcttttacttttgcataggagggtggttgttgtaccgtatctgggcagggttggacagatttatttatttgtttggaggcctccatgttggcagcgatgcctgccgcaagggtgtctcccttgatacgtggacgagaaagcatggatataggacactagagtctaggacacatagcaatacatattggacaaaaagggtaagaagttttgttcctcgatttatccatctctggtacatatgcttgtctgtaactaaccataaattaatgtgacctcacggttctcattttcttgtgagaagacatgatttgaagacttg

SEQ ID NO: 3394 - DNA, 1206 bp, Zea Mays
aatcccccaccaaatctgaacctccaattttattttggccatgtcgtcgtcttcgccttccctcctctcatcgcggctactctccccagccatcctcttcacaaagaagccggcttccctgcgctccatttcctctgcgacagcgagacacggggttcgggtggtggtagccgcggcgtcagcggccgcagcgtcaccagtgtccgcggcgcgggtgcgaccgtcggcggcggaggtagcgcggactgtcgtggagcttgccgcgtccgggactctctccatggtgggcccagacggctggcctctcggcgtcggcgcgcacttcgtcgcggattctgccggtgcacccgcgctctgcctgtctgccgctcgggtcgccgcgcccgatgcgccggccagcttccacgtcgagtttcgacagagtggggctaggacaccacagtgcactatgcttggtgccttaactaagcctagtgatgaatctgtgttgaagaagctttctactaggtggcaaaagaaatttggggaagagattgatcaagatcttttgtatttaatatctgttgaccggatcttgcacatggaagatttcaatgaggcaggacatgatggcatgtgggtagttccatcagactacaccagtgcagaacctgatcctctacgcaattttgctgaaaacatcgtggaggaatttaacaacaaaaatgctgaagacgtccgtaggatatacaacatatatgtcgaatcagatttacagacgtgaagatgatatgggttgacaggctaggtttcgatctccacgctcattctgcggaaggcgttttggctgttcgggtcccttttcctagggaggtctccgacgagaagggggtgaaatcgtcgttcaacatgatgtctcatcatgcgtgggaggtggagaagagctacgcgagcccagagtttgagaaggtgcagttcttgaagaaggtcagatagcattgcgaattctgtttccgtggtggacgatctttcgttattgagaggagtgatagtttgaagttttgtttcctttatcatgaactgtttgtcttgtatattggtcatatttttttgtgcctaatacattggatgcaattggcatcttgaattatctgctagtaatttatttgagaagggcaatgagttttgaccgtaagaataactctgggccatgagatgacaagtaaa

SEQ ID NO: 3395 - DNA, 3407 bp, Zea Mays
atgacccacccacccacagccacacaggccgagctgaagggagggggactgcctgcgggctgcggcttccggcgcaagatgccatgtggactccggatgactcgaaagtccatccatctcctctctatctctctatctatctatttcacgcctccacggctccacggctgctgccagcctgactagtgaggtgattgccgcagcggcggtcggccagagcgcgtgtgctcctccccagcataatcccaccaccatcgcgcacccgcccacctcaagcgagcggccccaattcccagccaccgcaagtggcttaaccctcgctcccgcacccccactcttccaccgcacgcacccgcgcgagcgagtgcggcagatcgcggccggccgctgggtccggtgcagttccgggctgcggcgccgggccacagttgatgcggacgatccgaggaggacgggacgggatggcggcttcggcggcgcctgggtcggctgggaggcaggcgcgcggagtcgcggcagcggcgaccggaaacgcggtatttaagagtggccctctcttcatatcatcgaaaggaattggatggaaaacgtggaaaaaacgctggttcatcctcacacgaacatcactggttttcttcaagagtgatcctagtacgttaccacagagaagtgaagtgaaccttacattgggaggaattgaccttaataattctgggagtgtagtagtcagggaagacaaaaggctactgactgtcctttttccagatggccgtgatggccgtgccttcaccttgaaggcagaaagttctgaagatttgtttgagtggaaaacagcgctggaagaagctcttgcacaagctccaaatgcagctcttgtgatggggcataatggaatatttcgcaatgacacaacagatgtatatgaaggggctattccgaattggggaaagaagagacctatcaaatcaatagttgttggcaggccaatactgcttgcactggaagatatagatggcagtccttcttttctggaaaaagctttgtgtttccttgagaaacatggaatgaaggtggaaggaattttgcgtcaagctgcagatgtggaggaggttgacaggagattgcaagaatatgagcaaggaaggacagaatttgcaccagaagaggatgctcatgttgttggtgactgtgtaaagcatgttctccgtgagcttccatcttctcctgttccagcttcgtgctgtacagcattattggaagctttccgtctggaaaccaaggaatctcagatcaaatccatgcgtgcagcaatatctgaaacatttcctgagcctaataggcggctgctacagagacttttgaaaatgatgcataccattgcttctcatactgccgagaatagaatgactccatcagcagttgctgcatgtatggccccgctcttgttgcgtccccttcttgctggtgaatgcgagatggaagatgacttagacatgaatggtgacagtgctgctcagcttattgccgctgcaaatgctgctaacagtgctcaaggcattgtaactactctattagaggaatacaagagtatattcaatgatgagcactttaggtgctccttatcacctgattctcaaacaggagatagtggaagtgaagaatcaactgatgacgaaactgtggataccaagggtaatggatttcatgatgcggaaaatgatgtagatcaagaattagatgatgccgagcgaatgctgagtggaaaattcactgaaaccagtgcaagtgcttgtgctgacctctatgaccacaaggaagttaatggcaatagttcagacactgagctctttgttgaggatcacacatttgaatcaaatgtagatttaaatgatgctcccctaagtcgtttaacagaaaatggaaagggtccatcaaatctgatgtccgctcatgaaactccattatcagtgggagagattcttctgtctttggatgctggaattccattaccttgtcgtgcagctgaatattctagcaaacccaatggaactcagcagcatgtgaagcgtactaacttatggggatggagcaatgtgagaaagggccaacgatcggagttagttgatccatcaggtgaagaagagcttgctattcaacgacttgaggtaatgaagaatgacttgcagatcaggattgcaaaggaggctagaggcaatgcaatcctacaggcaagtttggaaagaagaaaacaagcactacacgagcgtcgtgtggctctggaacaggatgtgtcaaggttgcaagagcagctacaggctgaaagggatcttagagctgcactggaggttgggctaagcatgtcttcttcacaattttctagctcactctccatggactcgaagacaaagtcagagcttgaggaaattgctctcgcagaagctgatgttgcaagattaaaacagaaggttgcagagctgcatttccaactcaatcaacagcgccagcaccagtatggctcttccgtagatgcaaatgatcatcctcaacaccttctaaatcatctctcgcagaacattgtccaaacaggatttgataggagcgttgctttctgtaatcaagagaagcaaagaaatgaggagagcctgccgagcacatcccactggagaagcatcaaacagcatgtgctatctcatggttcttcaaggcctttctcccgaaagcattcctcggacacctccttgagtgattctacaagtgtgcctgcagagggcgggccaatgttggtgaacatccctagaacaacgaaacagggtgtcgaatatgggagaccgccgtctgtgtcgtcatccactctggttgaactaacaaccaggctagatttcttcaaagaacggcggtcacaattgatggaacagctccacagcctcgatttagggcatggatccacgtcccatggtttcccatacaaaccttcatctccctggaacagcccaaagtaaagtaggggatgatcatttgctgcagtacgacgtctctgtatattcttgcggcgacacataggatctgccacatatcttaacgagatgaacttttccaacagttttcataaataatgtcaacaacgtcttgaaaggtcatagctatcgatggaagaccagacgactctggcgataggcacacaccgtccacagaggttctcacgacgatggcgtggaggtagcacatgatgtgctttggtgacaacgtcaagagcatctagaatagtggagatgcatttgtggtcattgaaacggtgggacgacgcaaaacagttacgggggtatactttttatcatggacttggcgccaacattgatttcaagagtctcaaaaaggttggtaaatgtagagataaaattgagtttgta

SEQ ID NO: 3396 - DNA, 652 bp, Zea Mays
taattattcttaggtatgtgactttggcctttcaagactgaaagctaacactttcctgtcttccaagtctttggctggaactcctgaatggatggcacctgaagtgcttcgagatgaaccatccaatgagaaatctgatgtctatagcttcggtgttatcctatgggaactaatgacactgcaacaaccatggtgtaacctgaatcctgcccaggtggttgctgctgtaggtttcaaaggaagaaggcttgaaatcccaaaagatctgaatcctctagtagccgtattaattgaatcttgctgggccaatgaaccatggcgaagaccctcgtttgcaaatattatggacactttgaaaccattaataaataaggttccggcacagttgatccgttcagattcgtagcctgttctatacgggtacgggaagatgtattttactgagtggtcctgataacatcaacatgagtgtcctaatactgatctgctataattgaataatccttggatggtattactcattatgataatacaattctcataatctttcaaatgaagtgtgcctggcaatttctttccatggcttaagggcttgggttgacacaatttatcaaggcagcctgtctgcaaatattcatctcatccactcgac

SEQ ID NO: 3397 - DNA, 653 bp, Zea Mays
taattattcttaggtatgtgactttggcctttcaagactgaaagctaacactttcctgtcttccaagtctttggctggaactcctgaatggatggcacctgaagtgcttcgagatgaaccatccaatgagaaatctgatgtctatagcttcggtgttatcctatgggaactaatgacactgcaacaaccatggtgtaacctgaatcctgcccaggtggttgctgctgtaggtttcaaaggaagaaggcttgaaatcccaaaagatctgaatcctctagtagccgtattaattgaatcttgctgggccaatgaaccatggcgaagaccctcgtttgcaaatattatggacactttgaaaccattaataaataaggttccggcacagttgatccgttcagattcgtagcctgttctatacgggtacgggaagatgtattttactgagtggtcctgataacatcaacatgagtgtcctaatactgatctgctataattgaataatccttggatggtattactcattatgataatacaattctcataatctttcaaatgaagtgtgcctggcaatttctttccatggcttaaggtatgcactaactattttattccaaaaaagaatgcagtcatgtctaaataaagtgagtatttat

SEQ ID NO: 3398 - DNA, 677 bp, Zea Mays
taattattcttaggtatgtgactttggcctttcaagactgaaagctaacactttcctgtcttccaagtctttggctggaactcctgaatggatggcacctgaagtgcttcgagatgaaccatccaatgagaaatctgatgtctatagcttcggtgttatcctatgggaactaatgacactgcaacaaccatggtgtaacctgaatcctgcccaggtggttgctgctgtaggtttcaaaggaagaaggcttgaaatcccaaaagatctgaatcctctagtagccgtattaattgaatcttgctgggccaatgaaccatggcgaagaccctcgtttgcaaatattatggacactttgaaaccattaataaataaggttccggcacagttgatccgttcagattcgtagcctgttctatacgggtacgggaagatgtattttactgagtggtcctgataacatcaacatgagtgtcctaatactgatctgctataattgaataatccttggatggtattactcattatgataatacaattctcataatctttcaaatgaagtgtgcctggcaatttctttccatggcttaagttgtgactttgagggaagggcgtacatccagcagcaactgctttccttattgcccattcagggtgaggagcaacgacctgagcataag

SEQ ID NO: 3399 - DNA, 839 bp, Zea Mays
taattattcttaggtatgtgactttggcctttcaagactgaaagctaacactttcctgtcttccaagtctttggctggaactcctgaatggatggcacctgaagtgcttcgagatgaaccatccaatgagaaatctgatgtctatagcttcggtgttatcctatgggaactaatgacactgcaacaaccatggtgtaacctgaatcctgcccaggtggttgctgctgtaggtttcaaaggaagaaggcttgaaatcccaaaagatctgaatcctctagtagccgtattaattgaatcttgctgggccaatgaaccatggcgaagaccctcgtttgcaaatattatggacactttgaaaccattaataaataaggttccggcacagttgatccgttcagattcgtagcctgttctatacgggtacgggaagatgtattttactgagtggtcctgataacatcaacatgagtgtcctaatactgatctgctataattgaataatccttggatggtattactcattatgataatacaattctcataatctttcaaatgaagtgtgcctggcaatttctttccatggcttaaggaagtaaagcaatgctgatgttaagcaaactatgttgatggacaagttaaacgaggctaaatatcaaacacggactgtgctagctgtagttccttagtgtccattttgtcttgtgttaattttcagttgttctcttgcaacctatgttgtataaaaggttgactgagttaaaaccattttgttcatttatataattatatgtatcaagttcatagctacggactgcagcaattcattgattactcaaaat

SEQ ID NO: 3400 - DNA, 888 bp, Zea Mays
taattattcttaggtatgtgactttggcctttcaagactgaaagctaacactttcctgtcttccaagtctttggctggaactcctgaatggatggcacctgaagtgcttcgagatgaaccatccaatgagaaatctgatgtctatagcttcggtgttatcctatgggaactaatgacactgcaacaaccatggtgtaacctgaatcctgcccaggtggttgctgctgtaggtttcaaaggaagaaggcttgaaatcccaaaagatctgaatcctctagtagccgtattaattgaatcttgctgggccaatgaaccatggcgaagaccctcgtttgcaaatattatggacactttgaaaccattaataaataaggttccggcacagttgatccgttcagattcgtagcctgttctatacgggtacgggaagatgtattttactgagtggtcctgataacatcaacatgagtgtcctaatactgatctgctataattgaataatccttggatggtattactcattatgataatacaattctcataatctttcaaatgaagtgtgcctggcaatttctttccatggcttaagtcctgggagtgggcgctggttgcgctgccctcgaagggggcaccgccggctggaaaggggtgaccaccaggcgccgggcgctagtcgagccgccggggctggggcgagtgcgccgggcgcctgcgcgactgtgtggctgcgccggaagtagacggggcaggggcaccgccgtgccgctgcgccagccgccttgggtccgcccctgctcattggcgttgtttgcacttcaaacttactaggcattatttgatcagagaattttctgttcctaccatgttcctcctatggagaaatacttc

SEQ ID NO: 3401 - DNA, 3025 bp, Zea Mays
ggtcggcccgcgggctccatccattgatgccgctcctccccacggctccttcctgcagcctcctccttcctccctcgccactctcccctccaccgctgcctggtgtgtagcgtagcgtagaggcgcggcgcggcgcggctgactggttggttccagttgttctagacaacgctggcttaaccgcgcgaggcccgaggaaagttagcttgtttcttgcagctgaatgcgggaagcaagcaactgcattttactaacctcaccacaccagacccaccactgacttcccggcctccggctctggagcagagcaggtggcagcactagcacggccacgtgcggcatgaaggggcaccagcaccagcagcagtcgtcgtctccgctgctgccgatgccgccgcccagcaagcgccgctgtagcgcgctggcggcggccgtgccggcgctcgtcgtctgctccacgctgctcccgctcgtctacctcctcgccctgcaccgccccgccgggtatggatcggacgaccgcgccgcggtggtcatcagcaccgagctcgccggcctcggggcgcgtggcagccggcatctggagaacgggggcgccatgaagcacaagctgctcaaggatgtttccaaaaaggtgtctggatctgatggggtttccgctgagagatctactagatcgaggtttagccaggatcatgctgccaaatcaaaagcaaagctcaagggcgctttctctttacttggactgaacaatgataccttcaaaggacctcgtacctccaaaaggtttcagttgaaggacctgtcctggagatcaaaggatactactgtcaatgggaaagagaaccatgatcaagagacagtgcatgaggagaataccaagtcctgtgaacatgaatatgggagttactgcctctggtctactgaacacagggaagtaatgaaggatgccattgtcaagaagcttaaagatcaactttttatggcaagagctcattatcctagcattgcaaaattgaagcaacatgaagcatttacacgtgaactgaagcaaaacatccaagaacatgaacgcatgctgagtgacaccatcacagatgctgatcttccaccattctggagaagatggagcacacaattgtgagagccaagtctagtgaagtaggatgctccaatgttgaacggaaacttaggcagctacttgatataactgaagatgaagcttatttccatacaaggcagagtgcatttctatatcatcttggagtgcagactatgccgaaaactcaccattgcttgaacatgagattgacagtagaatatttcaagtctggatcaaatcatgtggatcagttaaatgaccagaagcttgaaagtcctgccttacatcactatgtaatgttttccaggaatgtacttgcagcttccaccactatcaattcaacggttatgaactcccaggattcggaccacatcgttttccatgtattcactgatgcacaaaacttttatgcgatgaagtattggttcgataaaaattcatacttggagtcgactgtacgcgtaactaacattgaggacaaccagaagctctctaaggatgtagattcccttgagatgcaacaattatggcctacagaggaatatcgtgtcacgattcgtaatcattctgaacctttccagaggcagatgaaaactaagtacatatctatcttcggcctttcacatttcctcttgcctgaccttcttcctggcttgaatagagtagttgttctggatgatgatttgattgtccagaaggacttgtcacctctatggaacctcgatatgggtggtaaagtgattggagcagtccagttctgtggagtgagattagggcagctgaaaccttatatagcagaccataacgtcgatgatgattcatgtgtgtggttgtcgggcctgaatgtcattgaattggataaatggagggacaccggcattaccagtttgcatgatcaatcagtccagaagttgcgaaaggacagcctgaaatcacagcgactgcaagcactccctgcaggtctacttgcctttcaagacctgatatatcctttggaagattcatgggttgagtcaggccttggacatgattatggaatcagccatgtcgatatagagaaggctgctactctgcactacaatggtgtgatgaaaccttggcttgacttggggatacttgattacaagaactactggaggaagtacatgaccagtggagagaagttcatgacggaatgcaacattcactaattaacagggcatgaaatgcaccaaacactcattttttcgggcatttggacaacagacttcatgggctttgttcatcatgaaaataaacagaatcacgcctgacctgcaacatccatgatgacacaaattcacccctgacgtgacgagggagtgctcagtccaattccaagaggagaataagatgaaatgctttctgcggaacgttgccataacagcatccacgatgtctgaaggacgctagcacgaaacctgagttatgttgcagagtaccaagatataacgtagaatatttcacactgttcattatggtttgatgagtttttttccctatattcagcttggcattgcaaaagtgcagttccttgctgttcatttttagtataagatctttggtgctattctttttgctcattgtgcaagagcaatactgagggagttcaatgttgacggcggcacatcgtgtataggaaacagcaaaccatgactgaattagcgagtatttccttgtactctttgcagcaagtcgtgtgtttgttatcgtcagatgttgatgtcccattgacgacataccaaatggtggtttgttccgctcaatggcagtctctctcaatctatctgatttgttgggatctttttgtttggaaaatctcaaggtactagaattcagatagttatgtctacgtcccgtttggatcattggtttggatccttggaactgaattttattctaata

SEQ ID NO: 3402 - DNA, 3107 bp, Zea Mays
cagagattgggggataaagacgcgtccaaagcaaaactgcaaaagcagaggcgggtccgggacggtcggcccgcgggctccatccattgatgccgctcctccccacggctccttcctgcagcctcctccttcctccctcgccactctcccctccaccgctgcctggtgtgtagcgtagcgtagaggcgcggcgcggcgcggctgactggttggttccagttgttctagacaacgctggcttaaccgcgcgaggcccgaggaaagttagcttgtttcttgcagctgaatgcgggaagcaagcaactgcattttactaacctcaccacaccagacccaccactgacttcccggcctccggctctggagcagagcaggtggcagcactagcacggccacgtgcggcatgaaggggcaccagcaccagcagcagtcgtcgtctccgctgctgccgatgccgccgcccagcaagcgccgctgtagcgcgctggcggcggccgtgccggcgctcgtcgtctgctccacgctgctcccgctcgtctacctcctcgccctgcaccgccccgccgggtatggatcggacgaccgcgccgcggtggtcatcagcaccgagctcgccggcctcggggcgcgtggcagccggcatctggagaacgggggcgccatgaagcacaagctgctcaaggatgtttccaaaaaggtgtctggatctgatggggtttccgctgagagatctactagatcgaggtttagccaggatcatgctgccaaatcaaaagcaaagctcaagggcgctttctctttacttggactgaacaatgataccttcaaaggtaaaggacctcgtacctccaaaaggtttcagttgaaggacctgtcctggagatcaaaggatactactgtcaatgggaaagagaaccatgatcaagagacagtgcatgaggagaataccaagtcctgtgaacatgaatatgggagttactgcctctggtctactgaacacagggaagtaatgaaggatgccattgtcaagaagcttaaagatcaactttttatggcaagagctcattatcctagcattgcaaaattgaagcaacatgaagcatttacacgtgaactgaagcaaaacatccaagaacatgaacgcatgctgagtgacaccatcacagatgctgatcttccaccattttttgcaaagaagctggagaagatggagcacacaattgtgagagccaagtctagtgaagtaggatgctccaatgttgaacggaaacttaggcagctacttgatataactgaagatgaagcttatttccatacaaggcagagtgcatttctatatcatcttggagtgcagactatgccgaaaactcaccattgcttgaacatgagattgacagtagaatatttcaagtctggatcaaatcatgtggatcagttaaatgaccagaagcttgaaagtcctgccttacatcactatgtaatgttttccaggaatgtacttgcagcttccaccactatcaattcaacggttatgaactcccaggattcggaccacatcgttttccatgtattcactgatgcacaaaacttttatgcgatgaagtattggttcgataaaaattcatacttggagtcgactgtacgcgtaactaacattgaggacaaccagaagctctctaaggatgtagattcccttgagatgcaacaattatggcctacagaggaatatcgtgtcacgattcgtaatcattctgaacctttccagaggcagatgaaaactaagtacatatctatcttcggcctttcacatttcctcttgcctgaccttcttcctggcttgaatagagtagttgttctggatgatgatttgattgtccagaaggacttgtcacctctatggaacctcgatatgggtggtaaagtgattggagcagtccagttctgtggagtgagattagggcagctgaaaccttatatagcagaccataacgtcgatgatgattcatgtgtgtggttgtcgggcctgaatgtcattgaattggataaatggagggacaccggcattaccagtttgcatgatcaatcagtccagaagttgcgaaaggacagcctgaaatcacagcgactgcaagcactccctgcaggtctacttgcctttcaagacctgatatatcctttggaagattcatgggttgagtcaggccttggacatgattatggaatcagccatgtcgatatagagaaggctgctactctgcactacaatggtgtgatgaaaccttggcttgacttggggatacttgattacaagaactactggaggaagtacatgaccagtggagagaagttcatgacggaatgcaacattcactaattaacagggcatgaaatgcaccaaacactcattttttcgggcatttggacaacagacttcatgggctttgttcatcatgaaaataaacagaatcacgcctgacctgcaacatccatgatgacacaaattcacccctgacgtgacgagggagtgctcagtccaattccaagaggagaataagatgaaatgctttctgcggaacgttgccataacagcatccacgatgtctgaaggacgctagcacgaaacctgagttatgttgcagagtaccaagatataacgtagaatatttcacactgttcattatggtttgatgagtttttttccctatattcagcttggcattgcaaaagtgcagttccttgctgttcatttttagtataagatctttggtgctattctttttgctcattgtgcaagagcaatactgagggagttcaatgttgacggcggcacatcgtgtataggaaacagcaaaccatgactgaattagcgagtatttccttgtactctttgcagcaagtcgtgtgtttgttatcgtcagatgttgatgtcccattgacgacataccaaatggtggtttgttccgctcaatggcagtctctctcaatctatctgatttgttgggatctttttgtttggaaaatctcaaggtactagaattcagatagttatgtctacgtcccgtttggatcattggtttggatccttggaactgaattttattctaata

SEQ ID NO: 3403 - DNA, 366 bp, Zea Mays
ataggtttggaggtagaaatcataattatacatgaacaatataatgcttttgatgtggtgatgctgctgttctacttccatccttccagtgactgctggttgatgcaaatcggatggctactcctatttaccaaagttctaattatggttgtgtgccttctttcatcattttcatctatttaccaaagttccaattatggctgcgtgccttctttcaacattttcatgtaattcaataacaatggctttgtgccttgtatcgttgttttcatttagatcaataactatggctttatgccttttattatttaaagagtactgttgtaatgggcaattgttgatgttgacgtgaaatgactttatcta

SEQ ID NO: 3404 - DNA, 1377 bp, Zea Mays
gtttatattcaaatatatggaaataaatctaaacacatatattaaacaatatttaatttgaaacggacgaaatattatttataatacaaaatagtattttggagaactatatacaccatctgacaccatatctccgagcagatagtctgacttactgcactggcttgcagtatagctgcatccaccgtcccttccgcgccccccggagacaggctaaaaagtgatgtgttgtgcacagtctaaagtccattttgttgctttgcccgcaacttttgcttgccacgatggaggccagatccagctcctgcctcttgggcgtccgtcatccttccatctcccgccctccctcgtcggagcacgagcaccaaaggtccccgtactgcccttacctctgctctccttttcttctcctgttcacccctcgtgccataactgggcgaccgccgctcccgccctacgccaggtgcccagatcttcgtcggccctgcccctgcttccttcaactccaccaccaggcgatgccctagacttaattgaatgggctctcttctcaccaggactggcgtcctgccatggctccacgccaagattgttgatcccatgctgcaggtcatcagaaggggagcagaacccaagcaactagccttctctgctgcccttggtatcacgattgggatctttccgggacaactgttattcttggtgctgttgctgtagcagtgttgggaagtcgttgcaatgctgttactgttatggttttaaatttggccgccactccaattgagctaagcttgatcgtccctttcttgcgtttgggggaaaccatcactggcagtgggcacttccccttgacagccaacgcactgaagaatgttctcactggtcatgcatcaaaggatgtgctgctgagcatcgtcaatgcgatgctgggttggcttattgctgcaccatttgtacttgccgtgctgtacgctgtttcgttcccttgtttcaaggtcctggttaacaggtttggcggcattccatcgagccccaggaccccactcaaggcggtgtaggtagtgtgtagcatgctgaatgctcctgaaattgtgtacaccaaattctttgtgatgccgttgggttgagatgggttccggcgtcatgttgctcggccatcccaggcactggcgaataaatccgacttgagaggcacgtgtcctctataattctgtatgctggcttggtaatcatatagtgagatgtgtatttatgaatttacaaactcttcatgaataaagccatgtttggataaaggattaaattttagtctctattctatcggatgttttggatatagttaaaagtattagatagagcctaattataaaactaatt

SEQ ID NO: 3405 - DNA, 1186 bp, Zea Mays
cgcaaaaggacaagagccgccatgtggtcatggtggcacagagcatgagacatcgatccctgtagaagcagatgctgctccgcctccaccgagcagcaaggcaagaaacccgacagataatgaagcgacatcatcggttctgaagaacatctactggaaggagctgggtctccttgcgttcgtgtggatagcattccttgggcttcagctcacaaggacgaactacgccgcttcctgctccgtttggtactgggtgctgaattctctgcaggtcccggtggcagtgggagtgacagtgtacgaagcctgtgggctaagaacagggagaagggcgctgtcgtctaataagggaggaagccagcagcagcaaagcgccctaaggattcgccagctgctggtgtactgcctgttcggcgtcctggcaggactcgtgggcggcctgctaggcatgggcggtggcttcattatggggccactcttcctggagctcggaatccctccacaggtgtctagtgctacagccacgttcacgatgatgttctcgtcgtccatgtcggtcgtggagtactacctgctgcaccgcttcccagtgccttatgctgcttacttcacgggcgtggcgttcgtggccgccatcacggggcagcactgcgtgaggaagctgatcgcgtggctgggccgcgcgtcgctcatcatcttcatcctggcgtccatgatcttcgtcagcgcgcttacgctcggaggggtaggcatctcaaacatagtccacagggtggagcggcatcagtacatgggcttcgaaagcctttgcaaggtctagttagggttagggacccaacgcaaaatgcaagcaaaccaaagacgacgtacactgtacaagtggtgaacatacacatgattgaattgaaggagagatcgatggggtcgaaattaaagatatgccaacaaatcgaattcagcgcaccgcagctgaacatacacatgcatatgattgaaatatttttttccacatgtggttaattgagtaaaaattgatttgttctggcggttcagttacgccaccaaccgcgagtgtagagaaatcgatttgcgctggcctttgtaagcggtaaacgaattcaaacaaaaaggttgtcgactacaaagtttcgtaaacttttctaagttctgcaacttttattttggc

SEQ ID NO: 3406 - DNA, 1911 bp, Zea Mays
caaagagtagacgcaacggcacaacgcaagcgcgcgctctgcaactaaccaagaagaggggagaggcaaagcgcagagcgaagccaagaagatggccgcggctgccgccgtcccggacggcgtctcctcctgcgggagcaccaacatgcgccgcgccgaccaccttcctcagctcccgattccgctgccctgcatgggcgagcccaccgccgcctcccgcgtctcgccgggctcctccccggcccgctccgaggcctcgcgaggcgccccctgctacaacgccgacgccgagccggacccggacccggagccggagcccgaggcgtccgtggggcggagcacgcagatgctgctcgcgatggccgccatgggcgggcacggcgggcactacggccgccgcccggcctcgtcctacggcagctgcgccgcgtggagcgccgggtcgctcaccaggcaccgccccgcatcgccgtccccgatctgcagccccgcgaacagccacgacggcggcggcgaggaggaggaggaccgcgaaccgcacggcggtgacgacgcctcctcgtttgtcacgccacgggtggaagaagagcaaggcaggaccagagcagatttcatgaatccttctgctatgccacggaatatcagactgcagacacccaggcacccttctctgctggataggagagttgaaggcgccaatcaaatgcctccgagattcatccacaagaccacaccagctagatttatgcgccgagttcgctcctcacgtaatttccgacagcgcgtggatgcattagatgctaccaatgaatggagattgcccaaagtcagtgaaggggatgacgagggaggtgataaaaaagactggcagagcaataccgtgtcatctcgcgtatcttcagcccgtgattggaattttgagtctgacggtgcctatcagggtagcaatcgtagtgatcgtgcatttggcgattcagatggtgagaactgtccagttgaagtgcaaaggacagagagatggaccccgagctccgtgttaaaaccccaaggcaatttagtccatgctaagttggttgcctggaaggatgcgcagattgcaaagctcatagaaaacctgaaattgtgttttgaagttacaagctcaattcattactggtgttatggtgtgggtatgaaaacatggactcctgctgaaaaagaaagaagccgatattgatgattggcagaggaagaagaccataaaggccaggcagaagatgagaagcgctgagttgaagctggagaagaagagagcggaaatcgcagaaaagatgcaaaaggcaataaagcgtgcacaaaaaaaggctgataagaagaaagtcaaggagcaggtagccactaaagttcagattgatggtgttgagagagcattggataagatgtcaaggacaggaaaactcccctggtcactggcttttctgtgatccagctcttcgtatgtgcctgtcctagataagctggtttgccgaactgtggaagctactggtggtggcagcatggcaagagcaatacgagtgaaatcagctgctaaatgattgaaatcggcaaattgcgtattaaggaaaagagaagaggatatgctggtgattgaccattctttggcaatgaaagttttggcttatgtaacactatgatttgtttgaggcaatagttactagcaatcgaacactgtttttgaacacgacatggataactcgaggtgaattttttggtacattactgtatgttgtccgataactcttctagtgttctgacatctgagacaaacattcttgatccttacagctgtgctgtgatagtgtacatcacttcaactttgtgagtatgatgcgatgaacaaatgaacaatgctatgcttattcatatttgttt

SEQ ID NO: 3407 - DNA, 1586 bp, Zea Mays
tgaacaggacaacaaatacagagatatcttgaagcagtagaaatgtattctcagttgggattgcgaaccttatgtttggggtggcgtgatttaaaagaaaatgaatataaggaatggtccaaaaactttcaaaaggctagctgctcattggacaatagagagtttaaaattgctgaagtttgtaatagcttagagcaagaccttcaaattcttggtgttactgctatagaggatcgtcttcaggatggtgttcctgaaaccattaaattgttgaggaatgctggaattaatgtgtggatgctaaccggtgataagcaaaatacagcaattcagattggacttctctgtaacctcataacttctgggcccaatagtcaattgttatctatcagtgggaaaactgaagaggacgtgctaagaagcctagagagggcattatttattatgaaaaatacatctgaaacaaagggtcttgcatttgttttggatggttgggcacttgaattaattttgaagcattccaaggagtcttttactaggttggcgatgctgtcaaaaacagcaatatgctgtcgaatgacacctttgcagaaagcacagagttcaagtttcttaagagattgatacttattcatgggcgttattcatacaatcgaacagcatttatttcacagtactccttctacaagtcacttcttatgtgctttattcagattctgatatctctgaaacaacggttatgcagtacccccagattttactgcattctcaagctgggaggcttttaaatctcactacattttgcggatggtttgggcgctcgctatatcacgcactcgtcgttttcttcattacgatatgcgcctactcagatgagaaaagtgagatgcaggaactgtcaatggtagcactgtccggttgcatttggttacaggcttttgttgtgacaatggatacaaactcattcacttgcccgcaaatccttctcatctggggaaactttgtggccttctacatgatcaacttaatactcagtaccgtcccaagtctccaactgtacacaatcacgttccgcctgtgtagccaaccttcctactggatctccatggctctgacggttgcagtaggaatgggaccggtggtggctttcaggtacttgaagaacctgtatcagcctagcgccgttaacatactccagcaggtcgagcagcgcaatggatctatcagaacttctgggaatctggagtcggcgggagccaatctcactaatctactgactggctcacgtaaaaacagggattctaattatcgccctctgctttcagagtctgcggagtctgtaagtgcaagcggcagctaagaattgtctaggctttccgtactagcatgacagtcatacactcatacagacggcagaacagtgaactgtaacagaatcatgcttgtactaaaaaatatttcgtcggggtcaaagccaataattgttttgttggcctaaatttgatcatttttctcagtctgcgctgtggcaccgtctgtgctgtccgctgtcgcacgtagggatggtaataggatctaaattttac

SEQ ID NO: 3408 - DNA, 3578 bp, Zea Mays
gtcgaatcgtcgggccctttgctggcgacgagcaaccacagcttgcaatggcacaatagtgacatcttgggaaacaatgaaacgttttgtctatatcaatgatgattcgtgccggtattcctactgtgacaaccggatatccaataccaagtatactctgtggaattttctcccgaaaaatttatgggagcaattcagtatttcaggcgtttcatgaatcagtattttctactaatagcctgccttcagttgtggtcccgtatcacccctgtcagccctgcaactacatggggtccacttatcatcatcttcattgtttctgcttcaaaagaggcttgggatgattacaataggtatctttctgacaagaaagcaaatgagaggaaaatatggttggtaaaggatggcgtccgcatacagatcaaagcacaggaggtacatgttggagatttagtgtggctccatgagaatgatgagataccatgtgatcttgttctcattggcacttctgatcgacaaggcatttgttatgttgagactgctgctttggatggtgaaactgacttgaaaacaagaaccattcctccaatttctgctaacttgtcagtagagcagctaggaaaaggtgtaattgagtgccccaacccagacaatgacatacggaggtttgatgctaacatgcgcttgttcctccctataattgacaatgaaaaaagtcctttgactatcaacaatacacttcttcagtcatgttaccttcgatacactgaatgggcttgtggagttgcagtttacacaggcaatgaaacaaaatctggaataagtaggggagctgcggagcccaagttcactgctgctgatgtaataatagacaagctcactattgcaatattcatgttccaagttgttgttgtacttgttctgggttattttgggaatacttggaaggacactcaggggcttaagcaatggtatcttatgtatcctatggaggtagagggcccatggtatgatttcttgattatcccgttacgctttgagctgttgtgctccataatgattccaatctccataaaggttactcttgatttggctaaaggtttgtatgcaaagtttattgactgggatgagcaaatgtttgattgggaaacaaatacacctgctcattcagctaacacagctattagcgaggacctcggacagattgaatatattttgagtgacaaaactgggacactcacagagaataaaatgatcttcaaacaatgctgcataagtgatactttgtatggaaatgacaacggagatgcattaaacgaagcaaagctgtttttcgtccactgacaattctctcaacttagatgtcagacttgtaaatgcggtctcaagtaatgatcctgatgtcatcaaatttctgttggttatggctctttgcaatacagtggtccctatcaaaagcaatgatggtactgtgtcatacaaagcacaatcccaagatgaggaagctttagttaacgctgcagcaaagctgaatatgatgctcatcagtaaagacaccattacagctgagatttgtttcaatgggtctaagttttggtatgagttgttggacattttggaattcacttctgatcgcaaaagaatgtctgtagtggtaaaggaaggggagactggtaagatccttcttttatcaaaaggtgctgatgaagctctcctgcctcgtgcctgtccaggacaacaaatacagagatatcttgaagcagtagaaatgtattctcagttgggattgcgaaccttatgtttggggtggcgtgatttaaaagaaaatgaatataaggaatggtccaaaaactttcaaaaggctagctgctcattggacaatagagagtttaaaattgctgaagtttgtaatagcttagagcaagaccttcaaattcttggtgttactgctatagaggatcgtcttcaggatggtgttcctgaaaccattaaattgttgaggaatgctggaattaatgtgtggatgctaaccggtgataagcaaaatacagcaattcagattggacttctctgtaacctcataacttctgggcccaatagtcaattgttatctatcagtgggaaaactgaagaggacgtgctaagaagcctagagagggcattatttattatgaaaaatacatctgaaacaaagggtcttgcatttgttttggatggttgggcacttgaattaattttgaagcattccaaggagtcttttactaggttggcgatgctgtcaaaaacagcaatatgctgtcgaatgacacctttgcagaaagcacagcttgttgctatcctaaaatccgttggctacctaactctagcaattggtgatggtggtaatgatgttagaatgattcaagaggctaacattggagtagggattagtggtagggaaggactgcaagctgcaagagctgctgattatagcattgggaagttcaagtttcttaagagattgatacttattcatgggcgttattcatacaatcgaacagcatttatttcacagtactccttctacaagtcacttcttatgtgctttattcagattctgtttgcctttttgtcggggctatctgggactagcttattcaactcaattagcttgatggcttataacgttttctatacaagtttacccgtcatgactataatctttgacaaggatatctctgaaacaacggttatgcagtacccccagattttactgcattctcaagctgggaggcttttaaatctcactacattttgcggatggtttgggcgctcgctatatcacgcactcgtcgttttcttcattacgatatgcgcctactcagatgagaaaagtgagatgcaggaactgtcaatggtagcactgtccggttgcatttggttacaggcttttgttgtgacaatggatacaaactcattcacttgcccgcaaatccttctcatctggggaaactttgtggccttctacatgatcaacttaatactcagtaccgtcccaagtctccaactgtacacaatcacgttccgcctgtgtagccaaccttcctactggatctccatggctctgacggttgcagtaggaatgggaccggtggtggctttcaggtacttgaagaacctgtatcagcctagcgccgttaacatactccagcaggtcgagcagcgcaatggatctatcagaacttctgggaatctggagtcggcgggagccaatctcactaatctactgactggctcacgtaaaaacagggattctaattatcgccctctgctttcagagtctgcggagtctgtaagtgcaagcggcagctaagaattgtctaggctttccgtactagcatgacagtcatacactcatacagacggcagaacagtgaactgtaacagaatcatgcttgtactaaaaaatatttcgtcggggtcaaagccaataattgttttgttggcctaaatttgatcatttttctcagtctgcgctgtggcaccgtctgtgctgtccgctgtcgcacgtagggatggtaataggatctaaattttac

SEQ ID NO: 3409 - DNA, 3615 bp, Zea Mays
ctcgaccgtacggggacaggacatcagtgcaactgtgcaagcgaccgccaccgcattacccggaactgcccagatcttcgtcgaatcgtcgggccctttgctggcgacgagcaaccacagcttgcaatggcacaatagtgacatcttgggaaacaatgaaacgttttgtctatatcaatgatgattcgtgccggtattcctactgtgacaaccggatatccaataccaagtatactctgtggaattttctcccgaaaaatttatgggagcaattcagtatttcaggcgtttcatgaatcagtattttctactaatagcctgccttcagttgtggtcccgtatcacccctgtcagccctgcaactacatggggtccacttatcatcatcttcattgtttctgcttcaaaagaggcttgggatgattacaataggtatctttctgacaagaaagcaaatgagaggaaaatatggttggtaaaggatggcgtccgcatacagatcaaagcacaggaggtacatgttggagatttagtgtggctccatgagaatgatgagataccatgtgatcttgttctcattggcacttctgatcgacaaggcatttgttatgttgagactgctgctttggatggtgaaactgacttgaaaacaagaaccattcctccaatttctgctaacttgtcagtagagcagctaggaaaagtcaagggtgtaattgagtgccccaacccagacaatgacatacggaggtttgatgctaacatgcgcttgttcctccctataattgacaatgaaaaaagtcctttgactatcaacaatacacttcttcagtcatgttaccttcgatacactgaatgggcttgtggagttgcagtttacacaggcaatgaaacaaaatctggaataagtaggggagctgcggagcccaagttcactgctgctgatgtaataatagacaagctcactattgcaatattcatgttccaagttgttgttgtacttgttctgggttattttgggaatacttggaaggacactcaggggcttaagcaatggtatcttatgtatcctatggaggtagagggcccatggtatgatttcttgattatcccgttacgctttgagctgttgtgctccataatgattccaatctccataaaggttactcttgatttggctaaaggtttgtatgcaaagtttattgactgggatgagcaaatgtttgattgggaaacaaatacacctgctcattcagctaactattagcgaggacctcggacagattgaatatattttgagtgacaaaactgggacactcacagagaataaaatgatcttcaaacaatgctgcataagtgatactttgtatggaaatgacaacggagatgcattaaacgatgtcagacttgtaaatgcggtctcaagtaatgatcctgatgtcatcaaatttctgttggttatggctctttgcaatacagtggtccctatcaaaagcaatgatggtactgtgtcatacaaagcacaatcccaagatgaggaagctttagttaacgctgcagcaaagctgaatatgatgctcatcagtaaagacaccattacagctgagatttgtttcaatgggtctaagttttggtatgagttgttggacattttggaattcacttctgatcgcaaaagaatgtctgtagtggtaaaggaaggggagactggtaagatccttcttttatcaaaaggtgctgatgaagctctcctgcctcgtgcctgtccaggacaacaaatacagagatatcttgaagcagtagaaatgtattctcagttgggattgcgaaccttatgtttggggtggcgtgatttaaaagaaaatgaatataaggaatggtccaaaaactttcaaaaggctagctgctcattggacaatagagagtttaaaattgctgaagtttgtaatagcttagagcaagaccttcaaattcttggtgttactgctatagaggatcgtcttcaggatggtgttcctgaaaccattaaattgttgaggaatgctggaattaatgtgtggatgctaaccggtgataagcaaaatacagcaattcagattggacttctctgtaacctcataacttctgggcccaatagtcaattgttatctatcagtgggaaaactgaagaggacgtgctaagaagcctagagagggcattatttattatgaaaaatacatctgaaacaaagggtcttgcatttgttttggatggttgggcacttgaattaattttgaagcattccaaggagtcttttactaggttggcgatgctgtcaaaaacagcaatatgctgtcgaatgacacctttgcagaaagcacagcttgttgctatcctaaaatccgttggctacctaactctagcaattggtgatggtggtaatgatgttagaatgattcaagaggctaacattggagtagggattagtggtagggaaggactgcaagctgcaagagctgctgattatagcattgggaagttcaagtttcttaagagattgatacttattcatgggcgttattcatacaatcgaacagcatttatttcacagtactccttctacaagtcacttcttatgtgctttattcagattctgtttgcctttttgtcggggctatctgggactagcttattcaactcaattagcttgatggcttataacgttttctatacaagtttacccgtcatgactataatctttgacaaggatatctctgaaacaacggttatgcagtacccccagattttactgcattctcaagctgggaggcttttaaatctcactacattttgcggatggtttgggcgctcgctatatcacgcactcgtcgttttcttcattacgatatgcgcctactcagatgagaaaagtgagatgcaggaactgtcaatggtagcactgtccggttgcatttggttacaggcttttgttgtgacaatggatacaaactcattcacttgcccgcaaatccttctcatctggggaaactttgtggccttctacatgatcaacttaatactcagtaccgtcccaagtctccaactgtacacaatcacgttccgcctgtgtagccaaccttcctactggatctccatggctctgacggttgcagtaggaatgggaccggtggtggctttcaggtacttgaagaacctgtatcagcctagcgccgttaacatactccagcaggtcgagcagcgcaatggatctatcagaacttctgggaatctggagtcggcgggagccaatctcactaatctactgactggctcacgtaaaaacagggattctaattatcgccctctgctttcagagtctgcggagtctgtaagtgcaagcggcagctaagaattgtctaggctttccgtactagcatgacagtcatacactcatacagacggcagaacagtgaactgtaacagaatcatgcttgtactaaaaaatatttcgtcggggtcaaagccaataattgttttgttggcctaaatttgatcatttttctcagtctgcgctgtggcaccgtctgtgctgtccgctgtcgcacgtagggatggtaataggatctaaattttac

SEQ ID NO: 3410 - DNA, 1377 bp, Zea Mays
cctcccccattccatcgtagtaccaccgccggtcgtcacccacatctcaagcttcgtctcatgtcatgcaacgcagcgtgctataatacggcgccacacaatcacagccccggccggtcggctcgcgctacccctatatatcgtcctcattctcattccctgaccactgagtcactgaccacctccctccccggccggccatctctcccgagctaaactgtggcaggcagctagctgttacgagctagctccgcgcgcgctaggcggcgtcacgtacgtgctgtgatcaactgtctagttctccactcgacgcggacaccctgacccgcgcgcgcgccgtggccatggtcgccgccgccgggcgcaggcggcgccgctgcgcggccgccatcctcctggtcctgcccgtcgtcgccgtcctcgcgtcgtcgtccgcggcggcggacgggtcgttcataacgtgggacgacctcagcacgccgtccgccgccgccgtgcagggcggcgtgaaggcggccagcgggggaggcgcccgcgagctggacacgatcgtggtggcgcaggacgggacggggcactcgcgcaccgtgcagggcgccgtcgacatggtgcccgccggaaacagccgccgcgtcaagatcctcgtcaggcccggcgtgtacagggagaaggtgacggtgccgatcacgaagccgttcgtgtcgctcataggcatgggcagcggccgcacggtgatcacgtggaacgccagggcgtcggacatggaccgctccggccaccaggtcggcaccttctactccgcctccgtcgccgtcgaggccgactacttctgcgccagccacatcaccttcgagaactccgcgccggcggcgccgccgggggccgtggggcagcaggcggtggcactgcggctgtccggcgacaagaccatgctgtacaggtgtaggatcctggggacgcaggacacgctgttcgacaacatcggccgccacttcctctacaactgcgacatccagggctccatcgacttcattttcgggaacgcgaggtccctgtaccaggggtgcacgctgcacgcggtggcgaccagctacggcgcgatcgcggcgtcgcagcggagctcggcggaggaggactccgggttctcgttcgtggggtgcaggctcaccggctccggcatgctgtacctgggcagggcgtggggccgctacgcccgggtggtctactcctactgcgacctcggcggcatcgtcgtgccccagggatggagcgactggggcgaccagtctagaacaaaatgattcagattgtaggaagtaggtaggcggttgcctagcaggacaggctcaccaaacggtctttacagggaaatgcaac

SEQ ID NO: 3411 - DNA, 3634 bp, Zea Mays
ttatctcaccgctatttttgactttgttctttctgtcgttatcacatcacaaccttaccggtcacgagtcacgaaccgaagccccaaacgagatgcgctgccccccgaaggaaaaccaccaaccgtttgccctacccgtgcggcccggcgccgctgcgctctcccgaaagagaggtgccgaagcgcagtagattccccttcctctccatcgacccctctcctcaccatccttgcttcccacctgtccgtctccttcctcgctccgcgcctcgccgcctcctctccccgcctccgcggagagggagagagcacgtcctgcccacgagtgcccccgccccgtgaggaaaccctcgcccgccccttccgttcgcccgtcctgccactggtctccctgaacccccccgccgccgccgccgccgccgccgttcggtttccgtgtggcgtcacttctgagggattttctgggtctgacaaggatcagcgctggagtggcctcgccgctgccctccgttacatggaggagttcctgctcaccctgaacccgttccggttcaagccgctctggccgacgacgactgcccccaaatccttctgaggccctaggaaatcctactcccgcccggcttcatagaatccccgggccgcccccccttccccgactcccttttgtcctcagatagtcatccgggttttccgagaggcacccctcctcccctgcgaatcgagagcccctagggccgtaagcccgtaaccataagtcctcctccactttccgaggccccgccgcccgcgccccggacctgctgtgagcgtccttccttggtggcgttaagcgttgcggacggggatggcgagggaggaggacggcccgcagttcgtgcggtggagggaggagttcgtgtctcaggagcgcggcagccgcgtcgtgcactactacctcgaagacgcggccggcgtgtcacatctcgccgtcatcggcaccgagaggagcctgcgccatatgctctacgtggtctcggaggacttcaacgccgcgtgggggtgcggcggcagcgctgacggtggcggcgcgccgccagtgtttgcgcgcaagtggcggtcacgccgggaggtggtggattggctcgggtccttcctcccggtgaaggcacttgactcaaaattctcaaaatatggatcttttgcggataatgacattgggtcagatggatacggggaaacaaatggttttttgcaccaaaatctgggtaaagactgcagctcagacattacatggtctggttcgttctggacatgtagcaagcagcttcggcactatcaagctttttgtcgcaatggaaccacaatatctacccacacttttgtgctggtcttgtcagaggaacaaaaccgctatcttgcatacttggaagacatgtatgaagataagaagggacagaagaagatcaaagtgcgatggtttcatcaaaaccaggaaattgcttgtgctatacctcctccgcctcatccttgcgaagttttcatcactcctttcacacaagtaatcagtgtggaatgtgttgatgatattgcaactgttttaactcgtgatcattatgaaaaatgctcccatgcaatgtcaattatgactgggatccgtttctgctctcgccagtatagtaaaaataagttcaagtattttgatttaagaacgttgcgtggatattttagtcaagcagttgttaggtccatgaaatttccagctgagtcagaaaaggacagtgaatattgtacacctgggaaagctaaatttccaaagcaattagagaggctttattcaaaatgtttgggcactaaaatttgtcgaagcccccaggcagactccataccatcttatcaaatattaagtaacgagcagcctcctgggaagcatctctcaatcaagtttatagtgccccagaatcaactaaagccgacatataatactggtgacagattagagatcttatctcaagacagtggcattattggttgctggttcaggtgcactgttctgaagtcatgcactaatcataacagattgaaggttcagtatgatgatctccaaaatgctgatgatagtgggagattggaggagatggtacctgcctctgcattggctcttcctgataaactgggactgagacaccaagaccggctaagaatcaggccacgtcctcaagaaaatagttttgttgatggggctgctcttttacctggaactgctgttgatgtctggcaatttagtggttggtgggaaggagttgttgtcagtttggacaacattgtggcagatagccttcaagagagaactttttccgtgcgtgccagctaaggaacattagaatctctaaagattgggtcaagaaccgatgggttgatattgaaacaaagtcagatgtgttgtcacagataccttcagatagtatccaagcaaagcaaactgataatcatgcactgtctgttggtgtgacgggctccagcagttctgcaatgcctgagcaagagattgcagctacccaagcaaactccaatggagatgcagcggtgcctaagcaagagcttacagttgcccaagcaaactccaatggagatcaacctgtgcctaagcaagagcttgcagctacccaagcaaactccaatggagataaatctgtgcctgaccaagagcttgcagctatccaagcaaactccagtggagataaacctgtgcctaagcaagagcttgcagctacccgagcaaactccaatggagataaacctgtgcctgaccaagagcttgcagctatccaagcaaactccagtggagataaaccagtgcctgaacaagagcttccagctacccaagcaaactccaatggagataaaccagtgcctgagcaagagcttccagctacccaagcaaactccgatggagataaaccagtgcctgagcaagagcttccagctacccaagcaaactccagtggagataaaccagtacctaagatagagcttgcagctacccaagcaaattctaatggagataaacctgtgcctgagtttacagctacccaagcaacctccaatggaaataacagacaaatagaagcaagcaagcaatccgaagttagtatgacagatgaagcctctcctttggcggaggatgacaagcgaacaattctagggaagcgtcccagggatgttagtatgactgatgaagggtcagctttggtggaggatggcaagcgaacaattatagggaagcatcccagggatgaaggtaatgctgaacagagatgcaacggggaagtaggtgtagtcgttagcaagacatgatgtttgggacgcccaaactcattagactcgtgtacatagctatagatatggtgattgaaacctccaatggcgcggggttttttgctacgctgctcgtatcaagagcgtattgccgcttctttggcatacctctcctagtcttcttattttgctggtagtttgtgtttatgttaagggacacatggattgcaagctgaatggtacccttcccagttcccggacacgttgtgctgcaatccgagtatatgattttttttatctgccggtgttttctgctttgggtatagttcaatccgcc

SEQ ID NO: 3412 - DNA, 3314 bp, Zea Mays
cgccgtccgccgatgccgagctgcctcctccctggcatcgcgccacgcccaccgccggccgctctccgcagcctcctcctccgccgcagcagaatggcctcctccgggccggcacgcgccttccagctccgcctcaacccactcaccggcgactccgagtggctcgtcgtcgacgaggcggaaacggaagcggaggtggctgcgcctgcgccgacccaccataagcagctccttgccgccacctcctacctcgacatgctcaacgacgcctcccgcaaccgcgcgtaccgcctcgccattgacgccacggtaacggaccccacctctcgcgtcctcgacatcggagctgggaccgggttgctgtccatgatggcggcgcgagctttggcagctgctggaggtgaaggtaggggaagcgtgtcagcatgcgagtcctaccttccaatgggcaaactaacacggagggtactcagagccaatgggatggaaaataaggtcaaagtatttcacaagcgatcagatgagctcggagttggagtcgagcttgattctcgacctgatatattggtaagtgaaattcttgattctgagctgctgggtgagggtctcatacctactctacagcatgcgcatgacatgctattggtgaaaaatccaaagacagttccatatcgagctactacttatggagtgttggttgagagcacgtccttgtggaagatgcatgatctgcacagcaatgaagcaaatgctgaagatggtgtgaggcttattcccagtggaacacaaattgttctttctgtgaagtcacagcaacatgcgatgcaatgtgatgcgctggcagatgaaataagattggtgggtgcttcagttggattcttctggatcagtcttttactcaactgctcctagatgggtgagacaatccagtggtgtcgatttaccacaatatgccaatggcacgaaggattggtgtgatcattggaagcagtgtgtttggtttatacaagggacaggggctcctgcaaagaaagatcaaactctttctttgagcgctagccataatcaaactagcatctcatatcagttgaatataaatgatgaaggaagtagaagccccaaaagtaatcatctaacactgttaccagaaagggtagcactttatggtgataaagtttggagatcagcgttgataagtgtaatcaggaattatacgagcgaaagatcctctccgatctgcattgtggctgatgacagcgtgttcctagctctcattgtttcttttctgttaccatcttcaaaagtcctcgctatgtttccatgtcttagagacagtggcctcaactatcttcaagctgttgcagatgcaaataatttatccatggaccggattaaagtgattggtaaaaaggcatcgtcccttactacaaatgacttaaatcatgaaaaggttaatatgttagtgggggaacccttttatcatggaagtgaagggatgctgccatggcaaaatctgcgtttctggtttgtataagatactttaattcatattaatcattatccactgaatcaagttttgtgccgtaactaatggctaccgccttttgttttcctcattcccctccagttatttgctataaggggccacccattgtaacactctaatccaagttgatccatgtttggctggaagtagtggtctaagtcccacatggttagttatagttgcatatagttgcatatacaaaccatggagagccatccatgccagcctggttaaccggtttaggagaagcgagagcagaagtttgagactcttgtacatgctggattaagtcatggctgtcaaggcataatagtcaagggtattagtgtaatcttcttctttttttactcaactagatggttacattgaggcctagtggggactgtatatataagaatatacgagggacacatgaggaaaatcctcctggacttggagattacactaattcccttgactattatgtcttaacaagggtgttaaatgacctagtttgtagggtttcactcgtccacattgatgaaatttcttaacaatttaatttactaatatggaatttgccattcaagtcaaagggcaacctgaagcttatttatcttatatgatgtgaaactcctttgtttttcattgtttctagttaaaaaaatatgttgttctgacactaggaatgaaaggactctgcttgatccgttgctctctgaggatgcattcatcatgccttgtaagggaatattaaggttctgtgccatgtcacttccggttagcctatcgaatatctacctttcctttatttctttgcttgggcataaagttattctttttgtgctgagaattacgatgatgcaggacttgtggagaagccgtcgtagccttaaagatgttgagggttttgaccactcagttgttaatgatactttaggggcctgtggtgacctgcctggagagcaacaaggcccttgcctaccttattatgtgtggcaatgcggttataccaagaaattaagtgaagtttactctctcatggatttgaacttttctgagcctatccactcttgttttggtgaaacaaaggttgagtttgcccacgatggaacatgccatgggttcgctgtttggatcgactgggtacttgacaaggaaaattccatagtgataagcaccgggccagagagcagatactggaagcaaggggtgcagctgcttagcacgcctgtacaagtgaacccagcgaattcggtgatgcacgtggaggcgaatttcgatgctgacattggggagctcacgtttaaatccaccacgctctcatgatgccaactgtaatgtgtggacaaccaagcctcatgcgtgtgttgttcttaaaagttagcatttgtcgctgcgttttgttcgtcggagctcctgatgtgagtcaagcactcaagctcatgattacgtgtgtgttctgtcatgctagcacaagcaactgcctcctcggtggagctgttttttcatggtcttgtttgttagcccctcacgtcgtgaggaagatgctctagctgctgtcaagaatcccctaccaaaacagagcctgccagagcatgtctctggccagtctccctcgaccctctttccttattccgtgtgtatatcattttcccaggtcccctctccgcctcttcctcgtcatttttctcaggtccctcttagcacacaagttcaaggagagaatgcaggctccatccatgtcatgggtgctatttaagttaggtttggcctatttttaactaat

SEQ ID NO: 3413 - DNA, 1300 bp, Zea Mays
gcaaaaggtagccgcgcccccgcaaggcgaggggccggatttcggcggaccattcacgcgcatgtcgtgcgcccttcgccccgcccggcccggccaggccaggcgaggcgaggcgagcgagcgcgcgcgcgcgtgtggctctccacacactctcctctcatccatgacttggtgagtgagtgtggcttacatatttaagctagctctactccactagagctagcaatatggtgctattggtttcacctatccctttgccatccacttatatgggcttttgagattttcctgggatttattagaaattcttaattgggccaagcccataaatcctaacaagtttttccagctacccactatttttccagggttgtgcttcttatagtgctgatccatattatggcggggtgtgggcaggatacgcttcaaatggaattgtccatccccaaattagtggtgcagcaaacactagggtaccattgccagttgggcctgcagcagaggaacccatatttgtcaatgcaaagcaatacaatgctatcctccggaggaggcaaaaacgcgcaaaactggaggcccaaaataaactggtgaaaggtcggaagccatatctccatgaatctcggcatcgtcatgcaatgaagcgagtccgtggaccagggggcgtttcctcaacaaaaaggagctccaggagcagcagctgaaggcactgccttcacttcagactccaacaggtggggtcagcaaaatggcctttggcaggaacctatgccctgaaagcagcacatctcactcgccttcgacgagctctacaatctcgagtgcttcaaactggagtggcacgctagctcatcaagagcacgttagcttcgcatctgctaataaattcctccccagcatgaacttccacgcggagaatggaggtgaaaagatggccatcaatggcgtccgccaccacacccctgtcctgaggtgaacaacctcaactgtgggggtgctgtgctggtaccatcactggcgcgctccggtgtgcccgtggcaattcatccttggcttatgatgtatcttatagtaatttgctttcactttcatatggaacttgtctcagattaaactcggtgatatttattgcaactggatgactgaaataatctcatgtttcttacaagtgtgtgagccaagacccgtttatcttgtaaaagtttacataggtcaatgcccatttatgttgctagaaggctatctccagtagcttactcatccacatacttatattcaaacctcactctatgaatgatgc

SEQ ID NO: 3414 - DNA, 1304 bp, Zea Mays
gccggatttcggcggaccattcacgcgcatgtcgtgcgcccttcgccccgcccggcccggccaggccaggcgaggcgaggcgagcgagcgcgcgcgcgcgtgtggctctccacacactctcctctcatccatgacttggtgagtgagtgtggcttacatatttaagctagctctactccactagagctagcaatatggtgctattggtttcacctatccctttgccatccacttatatgggcttttgagattttcctgggatttattagaaattcttaattgggccaagcccataaatcctaacaagtttttccagctacccactatttttccagggttgtgcttcttatagtgctgatccatattatggcggggtgtgggcaggatacgcttcaaatggaattgtccatccccaaattagtggtgcagcaaacactagggtaccattgccagttgggcctgcagcagaggaacccatatttgtcaatgcaaagcaatacaatgctatcctccggaggaggcaaaaacgcgcaaaactggaggcccaaaataaactggtgaaaggtcggaagccagcatattcctgtcatgcaaattaagttggatacaccatatctccatgaatctcggcatcgtcatgcaatgaagcgagtccgtggaccagggggcgtttcctcaacaaaaaggagctccaggagcagcagctgaaggcactgccttcacttcagactccaacaggtggggtcagcaaaatggcctttggcaggaacctatgccctgaaagcagcacatctcactcgccttcgacgagctctacaatctcgagtgcttcaaactggagtggcacgctagctcatcaagagcacgttagcttcgcatctgctaataaattcctccccagcatgaacttccacgcggagaatggaggtgaaaagatggccatcaatggcgtccgccaccacacccctgtcctgaggtgaacaacctcaactgtgggggtgctgtgctggtaccatcactggcgcgctccggtgtgcccgtggcaattcatccttggcttatgatgtatcttatagtaatttgctttcactttcatatggaacttgtctcagattaaactcggtgatatttattgcaactggatgactgaaataatctcatgtttcttacaagtgtgtgagccaagacccgtttatcttgtaaaagtttacataggtcaatgcccatttatgttgctagaaggctatctccagtagcttactcatccacatacttatattcaaacctcactctatgaatgatgc

SEQ ID NO: 3415 - DNA, 1171 bp, Zea Mays
aatcgaaacagctgcaacaacccgaccggactcgacccaacccaacccaacccgtccataaccccaccggcccctccgcctcgcctgtcccaggctccccagctcaggtcctcacgccacgcacgcacgagccggagccgagggcgcgcccatccggacccagacagagctcgccggcgcctgcgcctccaccgttcggcaagcgggagggagatgaggggttcgtcgcggaggccggtggccgtggtgatggcctgggtgcgtcgccagccgcccaaggtcaaggccttcctcgccgtcgtcgcggggatggccgcgctcgtcttcatccgcttcatcgtccacgaccacgacaacctcttcgtcgccgccgaggccgcgcacgcgctcgggatcgccgtgctcatctacaagctcaccaaggagaagacctgcgccggtattgccctgtgctgtgctagcgctacttgttcatccttcaacatcgcacaacattgtgaacagaatctgctgggccttctgtgtttatttggaagcagtttcagtgttgccccagttgcgcttgatgcaaaataccaagattgtggagccgttcacagctcattatgtgtttgcgctgggtgttgcaaggtttcttagctgtgcacactgggtccttcaggttttggacacccgaggcggattgttgactgcgctgggctacggtctgtggccttcaatggttctcctctccgaaatcgtccagacattcatccttgcagatttctgctactactatgtgaagagtgttttcggcgggcaactggtgctgcggcttccgtccggggtggtctgaaaaactgcagcgagaaagaaaagcatactgttcgtcccttctgtgttagatcatacaaagcgacagtcattgtgctcctagcgcccaaacttttgcactcgtaaagtggattagcagagggccgttaattttttttttcagttgtaaactgtttacgtgaatgctgtaccgataccgtgataccgtctgactttttcatccatgctagagttgaagcaggtagcatccacatcgagttgtcgcattttcagactagagatcagattctccgatgccagtgactgtttatctttcattctagtttttcttgtgtcgtcgaaatagacgaaatgtgag

SEQ ID NO: 3416 - DNA, 728 bp, Zea Mays
attgtagatacggtcgagttataaaacaaagtacaaaactgaaaccacgtagtgtatatattttaaaacgaatggtgatagaaatgaaattacttactactactaaacagcaaaaagctcatgtgtataaatataggcagcgcgagcaagcatcatcaggcgtagctcagcagagaagaaagagggagaacggagaagggggagcggacagacaggcaccgcgagcgcgccttgcaatccatgattccagaaccaattcaattaagcatggtggcgcaaccggcgggtggcggaggtgcggaggaggaggtggtggtggacggcggcggcggccggcatgggcggaggagcggcgacgaggaggcgtggcggcggtgggcggtgctggtggcgacggtgtggatccaggcggtgacggggaccaacttcgacttctcggcctactcgtcggcgctgaaatcgtcgctgggggtgtcccaggaggcgctcaactacctggcgacggcgtcggacctgggcaaggcggtgggctggtcgtcgggcctcgcgctgctccacatgccgctccacgccgtgctcgcggcctccgccgccatggggcttgccgcctacgccgtccagtactactgcctcatcgcggcggcgtcgtccatggccgccgccgtcccctaccctctgggatggcctatgaccctttaagaactcatctagagcgaagagcagctgag

SEQ ID NO: 3417 - DNA, 1331 bp, Zea Mays
taagtggtcggagaggttcaagtcaatggatttgcaccccactaagtcatgatcatgaggcactcccgggaggtggtggtcggcgtggacccgcgcaccggggcacccgtcgtgaggcgcgacaaggtgtggaactacaccatcgcggacattgctctcctcgcgttcggcaccaacttccctcagatctccctcgccaccatcgacgccatccgtaacctcggtcaactcacagcaggaggtctaggtccaggcacactcatcggctctatggcgtttgatctgtttctgatccacgctgtctgtgtggttatgccaagggcgggatcaaagatgaagatctcagacctgggcatttggttagtcgagctcttctggtctttctgggcctatatctggctctatgtcatcttagaggtgtggacgcctagagtgatcaccctctgggaggcatagctgacagtcctgcagtatgggctgcttctgctccatgcgtatgcgcaggataaacggtggccatttgtgttgatcccatttttcactagatcgggagaaaccagaacaggtgcgcaggacagattatctcaatggagctggtagcaccccacttcactatgctgcttgtggtggaaatgttgtctattgtcaagtatgtgccgcgatcagtgcgagaggtgagaggcctgaagattgggttccaccagaagatgtttctgctgtttattacgccaaatgtgatggcattgacgagacactccctatgggtgctgacgggaacgatgggattgtagacatcttctctgcacattcctactacgatgcagcagagtacagtcaacttgcagaagaggatatggaaggatcgtcaacaatggatcaagttgtaaagaacacacaagagaacatgtcctggctttctatttggtggcaacaatttgttgatgcttctatggtaatttggttcgtcgttggtctctttatgtgtactgaatagcaagtcatttattgttgcatttggcaaggacattattttttccctgctggcttcctgctctacgagaagaagcaagtgaaacaggtgcatgcttttgcttgctgtcgcagatgcccctgatggcaagcttcagcaatcgtcaagtacaaagacatcctcccgtgcgaaattcaatttgccaaatcctaatctcttctatatatcctcatagatcgcagcgatggagccggatccggtcgccgctggggcatcctcctcgtcgccgccttcaccagcgccggccacgtccccgccgtggcaaacgcaagcaattacatataggttcagaaaggacaat

SEQ ID NO: 3418 - DNA, 2349 bp, Zea Mays
gagtcggggacgagcagctccacaacaattcgtgcctgcctccctgcctcggcctcctccctcgtcctcccctcctccgccgcctcaaacccggccccctcgcgcgcgtgcgcggcgctcgaggcgacgaatccagccacctcctccgcacccatccccgccgccggtcgccgatgagctcggaaggctgggacgctgacccgaattttatggggagaggatgccagagctgcgaagcaatactcgtcaagcacgcttaaggtctaagaagcttgacgatctgcagccaggagagccgcttgcgaaaccggtgtcacctgctctgccgagcgcacggaagcgtgctcctacacgtgctgctaggggcagaaagggtgctgctgggagaggagtgcctcccgcaccaaagcctagaagaaagggggttgatattgtcgtcttagaagctgatcctgcttgtgaaaccccacttaaagctttcaagggactggaagttgctgctgctgcgcccaagaaccttcctttgaagcaggtagccgaagttggtgttccgaaaatgaatggtgaaagtggggagaagattgttggggctgaagatgaatcgacagctacacctgtcccagaaagggttcaagtaggtaattctccagagtacataactgacaggaagttaggtaaaggtggttttggtcaggtgtatgttggtcgaagggtttctggtggtgctgctcgcactggtcctgatgcatatgaggttgcattgaaattcgagcatcgtaacagtaaaggatgcaattatggccccccatatgagtggcaagtttataacactctcaatggttgctatggcataccatcggtccactacaagggtcgtcagggcgaatactatatacttgtaatggatatgcttggtcccagcctttgggatgtgtggaattcgatggggcaggcgatgactccaaatatggctgcttgcattgctgtagagagcatatcaattcttgagaagctccattctaaagggtttgtgcatggtgatgtgaaaccagagaattttctgcttggtcagcctggatcgcctgaagataagaagctttaccttatagatcttggtttagcatccaagtggagagagaataatggtcatcatgttgattatgatcaacggcctgatatctttaggggaacaattagatatgcgagtgtccatgctcatttggggcgcactggtagtaggagggatgatttagagtcactggcatacacccttattttcctgataagaggaagattaccttggcaaggctaccagggagataccaagagtttccttgtttgcaagaagaaaatggctacttctccggagatgctttgttgttattgtccagctccattcaaacagtttcttgagattgtcacaaatatgaaatttgacgaagagccaaattatgccaagcttatctctctttttgatggtttgattgaagcgcctgcttcgagacaaatcagaattgatggggctctcaaggttggacagaaacgtggaagattggttgcagatctagaagaagatgaacaacctaaaaagaaggttagattagggagcccagcggctcaatggatttcagtttataatgctaggcggcccatgaagcagaggtaccattacaatgtggctgactcgaggctaagccaacatatagaaaagggcaacgatgatgggctttacattagcagcgtggcttcctcggcaaacctttgggcactcatcatggacgcaggaactggtttctgttctcaggtttatgagctctcaccagttttcctccacaaggactggataatggagcagtgggagaaaagctactacataacagcaattgctggatcatccaacgggagctcattggttgtcatgtccaaaggaactccttacacccaacaatcatacaaggttagcgagtcgttcccttacaagtggatcaataagaagtggaaagaagggttccatgtgacatccatggccaccgctgggaatcgctggggcgtagtcatgtcaaggaattcagggttctctactcaggttgtagagttggatttcctgtaccccagcgagggcatccaccggcgctgggagagcggctacaggataacttccacggcagccaccaacgaccaagccgctttcatcctgagcatgccgaaacggaagccgatggacgagacacaggaaacgctgcggacctccgccttccccagctcacacgtcaaggtgtgtcgttcacattgctattgtcctaactattggtcgtgatgggcttgatctcgttcgtcgtaacaacgcga

SEQ ID NO: 3419 - DNA, 3149 bp, Zea Mays
caccgtccatccctcgcctcccgttcctcctcccctccctcgctgctgagtgctgacggaaagagggggtcgatcgccatgcataaccccaggccgggcggcggggacatcgtggagatgtcgtcgtcagccagcgcggcgggcgaggcgacgcaaaacgagcgcgtgatcccacatagcggctcgctgagcaagtccagcgcgcggaagagtgcggggttagaggagcccgtgacgacgccgctgtccgcgccaccgccgcgcgcctcgccgtcctccgccgccatgcacgcgctcaatgggctcatgttcatcagcagggccgagggcaccgtcggatgggaggctgtggagaggcgcttccacgagctcgccgagaacgggctcctccaccgctccaagttcggcgagtgcatcgggatgaaggaggtggtgttcgccggcgagctgttcgacgcgctgttgcggcgcagcaacatctcgggcgacaacatcgacaaggcggagctgctcaagttctgggaccaaatcaccgacaccagcttcaacggccgactgcagactttcttccacatggtggacgcggacgcggacggcaggatgtctgaggagaaggtcagacagaccatcacgcagagggcgtccgagaacaagctgtcgaagatcacagagcaggcggaggagtacgcccggctgatcatggaggagctggacccggacaaactcggctacatcgaggtgcgcaacctggagaggctgctggaggaccccagccagttggtgagcatcggcaccgccaaggacatgaggcagatgctgaggagccagagcctccgtccgacgcccgagccgaaccctctccggcgcacgcagtacttcctggaggacaactggcggcgcgtgtgggtggtgctcctgtggctgtccatctgcgtgggtctcttcgcctggaagtttgcccagtaccggcgccggtacgtgttccaggtgatggggtactgcgtgtgcgtggccaagggcggcgccgagacgctcaagttcaacatggcgctgatcctgctccctgtgtgccggaacaccatcacctggatccgcaaccacaccggcgtgggccgcgtggtgcccttcgacgacaacatcagcttccacatggtggtggccgcgggcatcgccgtcggcgccgggctccacgtggtgtcccacctgacgtgcgacttcccgcggctgctccgcgccacggacgccgcgtacgcgcccctggcgcagtacttcggggtgccccgcccgcgcaactactggtggttcgtgaagggcacggaggggtggacggggctcgccatgctcgtgctcatggccgtcgccttcaccctggcgatgccgtggttccgccgcggggagctcgcgctgacggacctgctgaagcggctggtaggcccgctgaagcggctgacggacacgctcaagctgacggacccgctgaagcggctgacgggccagctcaagcggctgactgcaggcccgcggaagcggccgacggacccgctcaagccgacggacccgctgaagcggctgacgggtttcaacgcgttctggtacacgcaccactgcttcgtggcggtgtacgcgctgctgctggtgcacgggcactacctgtacctgacgcacaagtggtacaagaagtcgacgtggatgtacctggccgtgcccatggtgctgtacgcgtgcgagcgcctcacgcgggcgctccgctccagggtccgcgccgtcaggatccgcaaggtgggcgtgtacccgggcgacgtgctctcgctccacttctccaagccgccgggcttcagctacaagagcggccagtacatgttcgtcaactgcgccgacgtctcaccgttcgagtggcacccgttctgcatcacgtcagccccacaggatgagtacctgagcgtccacatcaagaaacagggcgactggaccggcgagctccggaacgtcttctcgagggtgtgccggccgccgacggagggcaacagtcggctgctccgcgacggcagcgccaattctctatctctacgcttccccaaggtgaggatcgacggcccgtacggcgcgccggcgcaggactacaagcagtacgatgtcgtgcttctggtcgggcagggcattggcgctacgccgatgatctccatcatcaaggacatcatcaacaacatgaagcagctagatggcgacctggaggccgacgctggctcgggcttgggctccggcggtgtcgacgcgtcgtcgtcgtcgtcgctgccatccttccgcacgcagcgggcctacttctactgggtgacccgggagcagggctccttcgagtggttccatggcatcatggacgaggtggccgagaccgacaagaagggcatcatcgagctccacaaccactgcaccagcgtgtacaaggacggggacctccgctccagggtcatcgcccagcttcaaatgctcaaccaggccaagcacaacatcgacgttatttccggcacccgcgtcaagacccacttcgccaggcccgattggccaaacgtctacaagcacattgcggagaaccaccaaaaccaacgtgttggagtgttctactgtggcggtggcccggagccgctaaagacgctgcgcgaactcgccaaggatttctcgcggaaaaccaacaccaagttcgagttccacaaggagaacttctagcgtatatgcagcctcgatctaaaggttttcgcatgacaaacaattcggtacatactacagtcgtcggtgcatatgctgtcagtgacgaggagccattatggtttagtgtagcctaagccatccttagattttaaagagattatatcttccattataatcgtaaaagaagatgtggcgtgttgattaggctgttgtgttttaagctttttaggttgtgagctcagttcacattgttgtattttttctctttttctcaaccataccttatttttcttttgtcgtgtagagtatatatggatggatggatggatggatgggtggggtgggtgtagaggggagggagtataccaacgtaggaattgcttgattgtgacggactagcaggaccaaaatcccaacagtattctttgataaaactgagaaaaaaa

SEQ ID NO: 3420 - DNA, 2263 bp, Zea Mays
gcttgtgctggattgaaaagcttgcccatattccagcactagtcctgtactcccgtgcgctagtgcgctcggcgctgcccccgtccgcccgcagtccgtccccgctcgccgcccatgcgctcgccggccgcccctcggcgctcccccatctcctcccgctccgcccccgccctccgtctggtagtccgtcgccgctcctcccgcacgccagcacgacctagtagacggctcgaagcgaagacggtcccatttccagtctccgtgagatggatttagaggtatccgagggttcaggtactaatgccacctcggatgaccaatcggtgcaaacgctgcctagaagggcaaagcttttggagtattttcaaccggagttagttgaggtcaatggcgtgatgaaggctatttgcaaatattgcggggcgatgttgaggagttcaagcacaaatagccttagaaaccacgttgcggatacatgtcctaaaatttcagttgaggaccgcaagcaattcattgctacaatggaaaaaggaccagcggaagcttcatttgtgtttgactctcaaaaggctcgtgagtgtatggttaagtggtgcatcagtgccgaggtcgcattcaacaagtttgacgatcctttctttgctcagtggatggagtcaatgcagccatcattcagcggtgttgggcgtcaaacaatgcaaaatgattgtattaccagattcaagatgatgaggcaagagctaagaaatgagctacaaagtcttaactctcggatttgcttgacaactaatctttggacctcaaatcagaagttgggttatctttgcttgacagcccactacattaatgcagactttatcttgaaaaaaaagattattgcgttcaaatatttgaaatatccacatacaggcctagcaatcaaagaaggaattacagagtgtctcaaagagtgggggataaaagagaagatgtttactatcacattagataatgtttctaacaatctgtcagtgcgtgaccttcgagaaagtgggctatttggaggcgatcttcgtattgtccaatgttgtgcacacatattgattctcttagttcaagatggaatggcaattgctcatggagcaatctataagattcgtgagctggtcagacatatcaattcctcaccctcccgcatacaagcttttaatgggattgctgagaggtctggattgccttcaaaggatagattaattcttgacgttccaaaccgttggaattcgacacacgacatgattatggaggccattgagtacaaggttgtcttgaaaagatatgctgaagaacaacttgagccttcaccaaatgatgaagagtggacaaattctgaggcaattggagagtttcttgaggcatttgagaaagctacaaaagcattctcgacacatagaagtccaacatctcatttgtttttacataatgtgctatgtatccatcgaactctgagaaatacaaattggcaaatcaattgtgtgcttaaggattcggcacgggcgatggatgctaagttcgataaatactgggagaagggcaagtataacatgacacttgtcttagccaccatacttgatccatcaaagaagatggattttttggacttcttttatgagaagatgtctcaatattttgttgacatccagataaacgtggtcttggttaaacaatgtctcaccaaattatttgaaaaatatgcaacacttgttcaaatagataataaaagttcaccttttattgatataaggactagtaatttaggctcaacagttcttggaaaaagaaggttggatgaagaattttctcaatggtcccaaataagaggaagacgttttccaaagtctgagcttgacacatacttagaggaagaacttgtgagaatagatgaaagatttgaaattctaaattggtggaggacaaatgcaaacaaatacccggtgctttcagctatggcgcgtgatattttagcaatacctttgagcactgttccttcggagtttgcgttcagcgctggtggtcgtattcttgatgataatcgaagcacaatgacaccagaaacacttgaatgctttgtatgctgtaaggattggttatatgaatacccaaatattcaagcttagttgatctgacttccttcaaacatgttgaacagtacggcattcaaggttcatgtgatgatccataattatggattgatgtgttgacagattacatctttctacctttgttg

SEQ ID NO: 3421 - DNA, 2524 bp, Zea Mays
ccagcactagtcctgtactcccgtgcgctagtgcgctcggcgctgcccccgtccgcccgcagtccgtccccgctcgccgcccatgcgctcgccggccgcccctcggcgctcccccatctcctcccgctccgcccccgccctccgtctggtagtccgtcgccgctcctcccgcacgccagcacgacctagtagacggctcgaagcgaagacggtcccatttccagtctccgtggtcaatggatttagaggtatccgagggttcaggtactaatgccacctcggatgaccaatcggtgcaaacgctgcctagaagggcaaagcttttggagtattttcaaccggagttagttgaggtcaatggcgtgatgaaggctatttgcaaatattgcggggcgatgttgaggagttcaagcacaaatagccttagaaaccacgttgcggatacatgtcctaaaatttcagttgaggaccgcaagcaattcattgctacaatggaaaaaggaccagcggaagcttcatttgtgtttgactctcaaaaggctcgtgagtgtatggttaagtggtgcatcagtgccgaggtcgcattcaacaagtttgacgatcctttctttgctcagtggatggagtcaatgcagccatcattcagcggtgttgggcgtcaaacaatgcaaaatgattgtattaccagattcaagatgatgaggcaagagctaagaaatgagctacaaagtcttaactctcggatttgcttgacaactaatctttggacctcaaatcagaagttgggttatctttgcttgacagcccactacattaatgcagactttatcttgaaaaaaaagattattgcgttcaaatatttgaaatatccacatacaggcctagcaatcaaagaaggaattacagagtgtctcaaagagtgggggataaaagagaagatgtttactatcacattagataatgtttctaacaatctgtcagtgcgtgaccttcgagaaagtgggctatttggaggcgatcttcgtattgtccaatgttgtgcacacatattgattctcttagttcaagatggaatggcaattgctcatggagcaatctataagattcgtgagctggtcagacatatcaattcctcaccctcccgcatacaagcttttaatgggattgctgagaggtctggattgccttcaaaggatagattaattcttgacgttccaaaccgttggaattcgacacacgacatgattatggaggccattgagtacaaggttgtcttgaaaagatatgctgaagaacaacttgagccttcaccaaatgatgaagagtggacaaattctgaggcaattggagagtttcttgaggcatttgagaaagctacaaaagcattctcgacacatagaagtccaacatctcatttgtttttacataatgtgctatgtatccatcgaactctgagaaatacaaattggcaaatcaattgtgtgcttaaggattcggcacgggcgatggatgctaagttcgataaatactgggagaagggcaagtataacatgacacttgtcttagccaccatacttgatccatcaaagaagatggattttttggacttcttttatgagaagatgtctcaatattttgttgacatccagataaacgtggtcttggttaaacaatgtctcaccaaattatttgaaaaatatgcaacacttgttcaaatagataataaaagttcaccttttattgatataaggactagtaatttaggctcaacagttcttggaaaaagaaggttggatgaagaattttctcaatggtcccaaataagaggaagacgttttccaaagtctgagcttgacacatacttagaggaagaacttgtgagaatagatgaaagatttgaaattctaaattggtggaggacaaatgcaaacaaatacccggtgctttcagctatggcgcgtgatattttagcaatacctttgagcactgttccttcggagtttgcgttcagcgctggtggtcgtattcttgatgataatcgaagcacaatgacaccagaaacacttgaatgctttgtatgctgtaaggattggttatatgaatacccaaatattcaagcttagttgatctgacttccttcaaacatgttgaacagtacggcattcaagggagatttatgcatcattctgcgggctcctgtagctgcttagggatgacccttccactgctgctcgcttcaagcttgatcagatactctttctactgatacgcaaggtgtaaaactgccgtgttatgtggtagattggtgtgtgtactgttttctttatgtgtaaaactgtctgcttgatcaggggtgagtattgttttctttatcactctggattcatggtaatgagttcctatttcagtatttcttgccaaaaagattgttgtgcattaaggatatttgacagatgttctttgttatttctctcaagacctgaaagtttatcaaccaaatctgccactgtatgcagttctctgt

SEQ ID NO: 3422 - DNA, 1237 bp, Zea Mays
gcctgccttctctctcctcacttaaaccctcctccgctcgacgacaccacacgaaaatatacgtcagaataaaccgcagcaaatcttctccggcaccggcagcgcccaaatccggcaatccgctgctccgaatggactcaggttacaatccccggacggtggaggaggtgttccgggacttcaagggccgtcgtgccgggataatccgcgcgctcaccactgatgcggaggatttcttcaagcaatgcgacccggggttggctgcatgcctgcaaagataggagctatatctatatctttcctgctttgtgtatgtaatgtaatggaaggctgctggcagttgaattctgaacccatggtgaaaaagaaaacttgtgcctgtatgggtttcctaatgagagctgggaagtaaatttgcctgctgaagaggtgccacctgacctcccagaaccagcattaggcataaactttgcaagagatggaatgcaggaaaaagagtggttgtccatggttgctgcacacagtgatgcatggttactttctgttgcattttacttcggtgctcgattcggtttcaataaaaatgacaggaagcgcctctacagtttgattgatgatcttcccatggcttttgaaattgttagtgggaagagtgaaaccaaggcaccagcaccaccaagcagtagtaaccacagcaatatcaaaccgaagtctaacaacaaaaagaaaccaccggagcctaaggtgaagcagccaaagccgcgtgcccctgcagaggaaggcgaggaggaagatggcagtgcaagcgagggcgagcacggggagacgctgtgcggcgcgtgcaaggaaagctacggccccgacgagttttggatctgctgcgacctctgcgagaagtggttccacggcaagtgcgtcaagatcacggcggccaaggccgagcacatcaagcagtacaagtgcccgtcctgcaccggcggcggtggcgtcagcaacagcggcaccaagcgagcccgcccatcatagctgcgacttttagtgatgtaaactgcttagaaaaactgttgcggacatagcgcccatcatagctgcgactttttaaatggtggtgtaaacttttgtagtgcgactaggccgtttgtcaccctatcatacttggcttcaagtaggttttctgtttttcagttttcattatcatactcgcttgaagtagtgtgaatgaatggcgtaaaatatc

SEQ ID NO: 3423 - DNA, 2519 bp, Zea Mays
cttggacatgagttgaaaggccctatcttttcatgtccatgtccatctcccgagtgaaagcgagcgagcgagcgaccgattgattgacgtgtgatgcctcactagctggagagcgctctctcctttgtggcaaatctcatcagcaacagagacggctggtgtgacaccttgtgaaaacgcccgctcgctcgctcagtcgctccgtctctctctccctccctccatatctccctttgccacctgctgtctccctcctcatctctctccagtcgagtcggcagtctctaccactctgcttcctttcccctcctcttcttctccagaaagcagaggcatggagcggcagaggaaggcaatgtggctgtaccccaaggtggtcggcttcaacccgccggagaggtggggccactccgcctgcttcttcgaaggggtcgtctacgtctttgggggatgctgcggcggcctgcacttcagcgacgtggtgacgctggacgtggagacgatggcgtggagcgcgctggccacgacggggcagcggccgggcacgcgggacagccacggcgccgcgctggtgggccaccggatgctcgtgttcgggggcaccaacggcggcaagaaggtgaacgagctgcacgtgctggacctgcgcaccagggagtggagccgcccgcagtgcaggggggcggcgccgtcgccgcgggagagccacagcgtcaccgtcgtcgggggcgaccgcctcgtggtcttcggcgggagcggggagggggagggcaactacctcagcgacgtgcacgtgctggacgtgcccaccatgacgtggtccacgccggaggccatcaggggcggcgcccccgcgcccagggacagccacagcgccgtcgccgtcggcgccaggctcttcgtcttcggcggggactgcggcgaccgctaccacggcggggtggacgtgctcgacgtcgacaccatggcgtggtcaaggttcctgtcaagggcgcgtcgcctggcgtcagagcaggtcatgcggctttgagtgttgggtccaagatctatattatcggaggagttggtgacaagcaatactacagcgacgtctgggttctcgatgtcgccaaccgttcgtggagtcagctcgaggtgagcgggcagcgaccgcagggaaggttttcccacaccgcagtagtcatgaacaatgacattgcaatctatggaggatgcggcgaagacgagcgtcccctgaacgagcttctcattctgcaattgggctccgagcatccgaacggccgttacaacatttcgacgtgcaaggttctgagcaaccaatggagccaagagaggaggaagtttctccaatcagagactaaagatacaggtgcgagcaacggagaaacggtgcagaaacgtcgagaggcagaaattgagcagaggaatccgttcctgcgtggcctagagaacagccgtgcgaaacgaaggaaaaccgatgaagctcgcccgagcgaggcggccgagtcagagcagcaggaggagcactcgctgactctctcccagcactcctcgccgtcgcagtcagaccaagagcagaacggcggcggagctcacaagctctcgccctcgcccaacgcgtcggtctcagcgctgcaaccgttcgctcgcctcaaggctaacgacggcgctccgagtgctcctgggcgcggaggcggcggcgtgtcttcgaggccggctctgaagacggaccagttcctccgcaccgtcgcgccacagcatcatcggcaggaagtgcagttcctttcctccgaccataagaagcctcagccccggccggctcctggaccaccccttattggcgcagaggtccatgggacgatcgatggagctttcgattccgggtacctcatgacggccgtcgtgaatgggcagctcttcagaggcgttctgtttgctccgggacctggggttacggctccgagaccgacggtgcaccatcagatcctgacgagctcggccatgcctccccagcagcggccactgctcgcgcacgccatccctgtccacgcccggccggtgccgcaggcgacggggttcgtgctgccgaactgtgtccaccgcgcgcggcaagggttcccggcaaaggcagtcaagtccgagccggagcgaggcggcagcgacctgcacgatgttgtgctcaccctgggagggcctggagggggcaagtgagcccctcaagaacggtggtccaggtcgtcctggcctactgctgtttacctttgggaattgctttgtaaattagtcatctggtcgagtggaaataagtgtagcggcttttctgtgatcttttcaagggtcattttagggttcttcgatctgtgactttacatatatgaatatagtgttagcttgatctgtcattttagctagttttgttatcaacaagttggtgttgggagcttccttgcacacttgtgagtgtttgtattttctgatgctcatgtggggggtccacctcggtctcctgattctcgtcg

SEQ ID NO: 3424 - DNA, 1942 bp, Zea Mays
attaaatcctctgctagtatatcgtttcagacaaacagagagtcgtggaactgaaaggggaggtggcacgcctcttcgaggactgcaactgcaaggatgtcgtggagagaatgaacctagttgatgtggtccagcgtctgggaatagatcaccatttcaaggaacagatagacacggccttgaagaacattcaaggagctgagttcaatagctcggatctccatgaggtctccctccgttttcgcctgctaaggcagcacgggctttgggttccagcagatcaattcgacaagttcagacgacaggaagacgggagcttcagcagcgacatagctgacgacccaaagggcttgttaggcctatacaacgcagctagccttttgatccacggcgaggaggtgctcgaagaagcgctcctgtttgcgaggcggcacctggaatcgatacgacggggtggtggcctccacgactccccttatttgtcggaacaagtcgggcgctcccttaagatcccactgccaaggaccctcaagaggctggaagcagtgtcctatatcccggaatacagcagtgccgacgacacaacgtacatccaccctgagatactggagctcgccaggctagattttaacctcctgcagcatgttcaccagaatgagctgaggacagttactcagtggtggaagggtctttgtgatgtcattgggccagactacgggagggatcggattgttgagtgctacttctgggctttcagtatgtactacgaggaagagcatgcacgggcacggatgatccttgccaggttgatcatgctagcatctttgttagatgacactttcgatgatcgtgctactttgcaggagtgtcgggagctcaacaaggctatagaaagatgggatgagagtgatgatatttctcttctacctgagtgcatacagaagttcttcctggaggtgataaggaacttcgcagagtttgaggatgagctggaagcgcacgagaagtaccgcgttgcttacgctaggaaagcgtaccagctcctatccaaaagctatctccaagaggtggaatggtgccaccagggctacacaccaagcttcgatgaccatgtcagcgtgtccactgcgtcggcaggtattcaggtgctgtgtgttgggatgcttgtgggcatgggcgatgccgccaccaaggaggtattcgagtggatgattggtagcaataaccgtgtcgtacgagcgtgtgcagaggtgacacgattcatggacgacatggcagatttcaagagaggaaagaacaaaaccgatgtcgccaccaccgtggagtgctacatgaaggagcagaatgtcacgggcgaggtcgcctttgacaagattgggtcctttgttgaggacgcatggaagacactaaaccaagcagcgctcgttggggaccgtgctctgcttccggttgtgcaacgagtcgccggcctcgcgatgagcatgatggtgtttttccacggcaagattgaccgttatacggacagcgagcatctcaaggaaacgctggaagacctgttcgtcaaccatgttcccctctgctagctagtacgcactagctagcggtggccggagtatatatggattatacttaccgtacgtaccatctatgttgtgtgtgtgaaggatgttggtaataaactaataatacacagaccttggtaaatgggacatgaggatatatatccattgtacttacgtgtttgcatgggaaacctatatatattatcttgtcttagtttgttcttatgtgtctccatgtattgttgtgttctattgatatcattcttaaactcataatggagagctagattatcctttggcatgctaccaattatttaatatggtaccacataggacaatgtcaataacgttaaggaaagaagagatgaaaactaaaaaaa

SEQ ID NO: 3425 - DNA, 1166 bp, Zea Mays
cgaacttcaacccccattgcgacttctccaaatcccaaagtttgtgacattgaataatccttggagcggaggctgtgtgtttattaacactacattcaagttggaggttgtcatgacgactccgggagtgctcgaggttattgaagatctttgcaggagttatccttctttaacattcggggttggcacggtcttaaatgctgctgatgcaaggaaagctatttgcgctggtgcacaatttcttatgagtcctggcacagtcctggagtgctgacatcaactgaagttttatccgcttgcagtgctggtgcaaaagttgtcaaggtgtacccagtttcagtcatgggtggggagatgtacatgtcagctctgaagaaaccatttcctcttgtaccaatggttgcttctcaaggaattaaaatcggttcaatcaagggatatatggaagcaggggcatctgcagtggtcttatctgatgctatttttgacagtcaattgatgagggatgggaaattcaatgaaatttcggaacttgcaaatctagcaactttagaggcattgcagttcacgaaatgagacaaatctacaatcataacagatttgcgtccagaatatgtggccttctgttctgtggaaggagtcaattcacctcctggtaactacatgctacttctgtgtaaagagtcagttcacctcctaaataaagctgtaggagctctggtgttctatgcacctgcaagaggctgagactgcaacaaatttgtgtgctccgaagtctgaacagggacctgatcattgaggatgccgtgatgctaagaagccaaccatacatttaggtgccgtgtaatggaatcaccacaactcgcaagagaacagaggtgaatggaagagagattgctggtttgcttgtgctttgactgacctagtagatgttaacgcaggttcataggagtgtactagtagtgcatctctgaagaccgttatacttctaggcaaggtcatggactttgtgtgtttaaaaaaaaggtcatggactttgtgtcgatcaaatgatcaatgtgcttgaacaggtgttgtctgtttttacccgggaattctgcatgaaatgagttggtgctatgtatcaatagacttgtagattttaatgcagttttcttttaaaaaaa

SEQ ID NO: 3426 - DNA, 1632 bp, Zea Mays
gtgagcccgtgagcgcacccgacggccgacaccatgaggccgcgggccgccccttccgaagaccgcagttccgcttgggttattaggttcgggtaccgcactgttaaacccgaagttcgctgtaaaaattcggcgtccgccgcccaccgcctacacggctacaccttcctctctccggcgacctcccgaaacagaactgactcgcatggtcttcgctccgtcgcgaggcccacgttagcggagcctcccactctctggctcaactgcctacgtctggaccagatcctccatgagctcgcgggagtgcattggtggcgcgacgcgaccaacgtcgtctcgaccctccttagcggcaaccgaagacctgaatcctacaaaggcacatgcatgtggttaatacatgatttgcctactgtcagccttctatggtagggcctaaaagctgggaacaaaaaacaaaagtatgaaaagatcaacgaaaggaaaattgctacttcaactgaggctctctgccatggatatcctaccgaatttgcttcttacttccattattgtcgctcactgcgtttcgaagatgcaccggactatcagtacctgaagagactgttcagagacctttttattcgggaagtcgaggattccagtgttgacgtatcagcagcgacagaaaatttccagagcttaagcctacataatgatgagttagctgcaaaaaagactgctgaagataaccctgtagtgttaattcctggtcatttgcaagttaccaatacagaatgtgttagtttgagctttggcagttttggatctggtgcattttctaggctactcccacaaaagaccactgatagcaatgtggaattccttgtttgagaggattctgcaacagtagatccaatagatgccaggaatcaagattactatgaaagtggtgcaataacttcaccagcagaagaaaatcttgaggccatgctaggaactaacatggagaagtcgatgcaccttctgtttcacaggctaatgagctcagtcaggacgtacttgatccttttgtacttaaatatgacgtgccatcagtttcaagtcatgcttattcaaacatgaacactccacaacctagcacaatagaggacccacaaggaaacaaccaagcacatactctttcccatttgtctaacatgatgcctacaacaacccaagttgccgacctgctttgctgtctgttagaggacatattcttcctcccccacaaccaggtatggcatattggccgccaccaccatggggatatcctacacatccaatgaggccttggggacgccccccatggccaacacaaccacttccatcaccagcggattatggctctcatcaagtgactcctccccctcacgatgactttgcggacagatgtctcaattctagtggtgcagctacgaacaacaatctgatgtcctgatcgagagcgatggagctaatgttcaaacttgtgtgtttgaacttgtgaactaaaaatgtgaactgtggatgtgaacttatgtgaatttgtgaacttatgtatttggacttgtgtgaaattgtgatatgaacatatatccatgtgtttgaaatctgtattgtatgtgatattct

SEQ ID NO: 3427 - DNA, 1877 bp, Zea Mays
atgaggccgcgggccgccccttccgaagaccgcagttccgcttgggttattaggttcgggtaccgcactgttaaacccgaagttcgctgtaaaaattcggcgtccgccgcccaccgcctacacggctacaccttcctctctccggcgacctcccgaaacagaactgactcgcatggtcttcgctccgtcgcgaggcccacgttagcggagcctcccactctctggctcaactgcctacgtctggaccagatcctccatgagctcgcgggagtgcattggtggcgcgacgcgaccaacgtcgtctcgaccctccttagcggcaaccgaagacctgaatcctacaaaggcacatgcatgtggtggccaggaggaggctcagatctggaatccagtccgaatgttcctgacaagccaactgcaacaacgattattgcttcaattttagcgatctattttttctaacttgcaaaccaacatgctcaaaattgcagtcaaattagcaatgttgtcagataccaatcctccaactctgaaattcgtgaggttgctgcaacgaccagactgaacattattcattttgtttaaaagtatgtactacaagagaataatcggttgtcatatgaatgtcataaacagggttaatacatgatttgcctactgtcagccttctatggtagggcctaaaagctgggaacaaaaaacaaaagtatgaaaagatcaacgaaaggaaaattgctacttcaactgaggctctctgccatggatatcctaccgaatttgcttcttacttccattattgtcgctcactgcgtttcgaagatgcaccggactatcagtacctgaagagactgttcagagacctttttattcgggaagtcgaggattccagtgttgacgtatcagcagcgacagaaaatttccagagcttaagcctacataatgatgagttagctgcaaaaaagactgctgaagataaccctgtagtgttaattcctggtcatttgcaagttaccaatacagaatgtgttagtttgagctttggcagttttggatctggtgcattttctaggctactcccacaaaagaccactgatagcaatgtggaattccttgtttgagaggattctgcaacagtagatccaatagatgccaggaatcaagattactatgaaagtggtgcaataacttcaccagcagaagaaaatcttgaggccatgctaggaactaacatggagaagtcgatgcaccttctgtttcacaggctaatgagctcagtcaggacgtacttgatccttttgtacttaaatatgacgtgccatcagtttcaagtcatgcttattcaaacatgaacactccacaacctagcacaatagaggacccacaaggaaacaaccaagcacatactctttcccatttgtctaacatgatgcctacaacaacccaagttgccgacctgctttgctgtctgttagaggacatattcttcctcccccacaaccaggtatggcatattggccgccaccaccatggggatatcctacacatccaatgaggccttggggacgccccccatggccaacacaaccacttccatcaccagcggattatggctctcatcaagtgactcctccccctcacgatgactttgcggacagatgtctcaattctagtggtgcagctacgaacaacaatctgatgtcctgatcgagagcgatggagctaatgttcaaacttgtgtgtttgaacttgtgaactaaaaatgtgaactgtggatgtgaacttatgtgaatttgtgaacttatgtatttggacttgtgtgaaattgtgatatgaacatatatccatgtgtttgaaatctgtattgtatgtgatattct

SEQ ID NO: 3428 - DNA, 1903 bp, Zea Mays
atgaggccgcgggccgccccttccgaagaccgcagttccgcttgggttattaggttcgggtaccgcactgttaaacccgaagttcgctgtaaaaattcggcgtccgccgcccaccgcctacacggctacaccttcctctctccggcgacctcccgaaacagaactgactcgcatggtcttcgctccgtcgcgaggcccacgttagcggagcctcccactctctggctcaactgcctacgtctggaccagatcctccatgagctcgcgggagtgcattggtggcgcgacgcgaccaacgtcgtctcgaccctccttagcggcaaccgaagacctgaatcctacaaaggcacatgcatgtggtggccaggaggaggctcagatctggaatccagtccgaatgttcctgacaagccaactgcaacaacgattattgcttcaattttagcgatctattttttctaacttgcaaaccaacatgctcaaaattgcagtcaaattagcaatgttgtcagataccaatcctccaactctgaaattcgtgagggtatgtgcttctaacacttgcatatttggatggatgatgtttatggacggatagagatgttcccctaatactttgtaccgtcaaaagatgctatggacactataatggtctattaacaagttaatacatgatttgcctactgtcagccttctatggtagggcctaaaagctgggaacaaaaaacaaaagtatgaaaagatcaacgaaaggaaaattgctacttcaactgaggctctctgccatggatatcctaccgaatttgcttcttacttccattattgtcgctcactgcgtttcgaagatgcaccggactatcagtacctgaagagactgttcagagacctttttattcgggaagtcgaggattccagtgttgacgtatcagcagcgacagaaaatttccagagcttaagcctacataatgatgagttagctgcaaaaaagactgctgaagataaccctgtagtgttaattcctggtcatttgcaagttaccaatacagaatgtgttagtttgagctttggcagttttggatctggtgcattttctaggctactcccacaaaagaccactgatagcaatgtggaattccttgtttgagaggattctgcaacagtagatccaatagatgccaggaatcaagattactatgaaagtggtgcaataacttcaccagcagaagaaaatcttgaggccatgctaggaactaacatggagaagtcgatgcaccttctgtttcacaggctaatgagctcagtcaggacgtacttgatccttttgtacttaaatatgacgtgccatcagtttcaagtcatgcttattcaaacatgaacactccacaacctagcacaatagaggacccacaaggaaacaaccaagcacatactctttcccatttgtctaacatgatgcctacaacaacccaagttgccgacctgctttgctgtctgttagaggacatattcttcctcccccacaaccaggtatggcatattggccgccaccaccatggggatatcctacacatccaatgaggccttggggacgccccccatggccaacacaaccacttccatcaccagcggattatggctctcatcaagtgactcctccccctcacgatgactttgcggacagatgtctcaattctagtggtgcagctacgaacaacaatctgatgtcctgatcgagagcgatggagctaatgttcaaacttgtgtgtttgaacttgtgaactaaaaatgtgaactgtggatgtgaacttatgtgaatttgtgaacttatgtatttggacttgtgtgaaattgtgatatgaacatatatccatgtgtttgaaatctgtattgtatgtgatattct

SEQ ID NO: 3429 - DNA, 1984 bp, Zea Mays
cctctcttctctttttccacgggagggatgacgatgccgctcgcgcgcgacgccgcatcactccctcgccactcgcgcgcccgggctccttcccgccacgctcacgacgatgccgtccccgacgtcctatcttctcctgaatccctccaaaccctcctccttccgccgactctcggccccgcgcctgagccggttccatgtctcctgcgacgcgccacggggcggcgggaggcgcgaggtcatccccgccggtgccagcaaggccaagaaacagatcgtattcttcgacgccgccccgccggtgtcccaggagggtggaggcgccgtgaagaaggcggggagcgagaagcttacccaggtgggcagcggcaacgcagcgctggcgttgttgaggagggcaaccaagatgacactctcggtgctgtccaacctcccgctcgctatctccgagatgttcgccattgccgccctcatggctctaggaacggtgattgaccagggagaggcacccagctactacttcgagaagttccccgaggacaacccggtcttcggcttcatcacgtggaggtggatcctcacccccgggttcgaccacatgttctcctcgccagtcttcctcggcctccttgcgctcctcgcgacgtccctcatggcttgcacctacacgacccagctccccatggtcaaggtcgcaagaagatggtcgttcacacattccggagaaagaatacggaagcaggaatttgcggactcgcttccccaagcatccattcaggatttgggagtcatcttgatgggtgctggatatgaggtattcaccaagggtccatctttgtatgctttcaaagggctagctggtcggtatgcgcctatcggcgtgcacttggcgatgctcttcatcatggctggtgccacgctaagtgcgacaggaagctttaagggctccgtggatgtgcctcaagggctgaactttgttataggagatgtcatgaaacctagaggggtcctctctgttgcgccggatgttttcaatactgaagtccatgtcaaccggttctacatggagtactatgacagtggagaggtctcacaattctacagtgacctctccctattcaaccttgatggtaaagaagtgatgagaaagactatcaaagtgaacgatcccctgagatacggaggggtcaccatctatcagacagactggggattttcagcattgcaagtgaagaaaaatggtgaaggccctttcaatttggcgatggcccccttgaaactgaatggggataagaagctctttggaacattcttgccacttgaagattcagactcgtcgaatccaaatgtcaaaggaatatcaatgcttgctcgagatttgcagtctattgtgttgtatgatcaagatggtaagtttgtaggggtccgtcggccaagctcaaaactgcctattgagatcaatggcaatgaaatactcattgaagatgctattggtagtactggactggatcttaagactgatccaggagttcctattgtttatgctggttttggtgcgcttatgttaacgacctgcattagctatctttcacactctcagatatgggcattgcaagatggaagtacagtggtcgttggaggaaagacaaatcgagccaaacttgaattttctgaagagatgaaccggctacttgataaagtaccagagctgatcagcgccgatgagaatctattagataccaaatcgacagccacatgaaacatttttttgtgtgtttttgtttgggattgctgaagatgcagtagctctgttcaggttttgccattcagttagtttatcgcccaccaacgctcgacgaaaggagttttcgatggcgttgtagacataattttctcaattgtatcatgtggatggcgtccaacctggtaaaggttaggatgtaacttacttaaaggtcgttggtctactagatgtcttccaaga

SEQ ID NO: 3430 - DNA, 1787 bp, Zea Mays
ccgcaggttggcttcggcgacgcccttcgccctccaggactccaggccttcactccacgcaacctgttcgcaccggccacagccgccaccggccttcgccgcgagcccgcgacgacgcccagacttgttgccttactaccacggagacggaggcaccaccgcatcaggcagggaccggacgacgacgcccagacctatttcaacctgccggtctccccaggcccccagcccccaggcatggaggcacatacaaagtgctgaggaatcttttgaggaacaagctggtgcatcatggtgccactaaatacgatggatatcggctcacctatctgggatatgacttccttgccatcaagactttggttaatcgaggagtttttgcttcagttggccgccagattggtgttggaaaggagtcagatatatttgaggtagccacagacgatggtacagtacttgccatgaagcttcataggttgggcaggacatcttttagagctgtgaaatctaagcgtgactatctaaggcaccgaaggagctttaattggctgtatctctcacgactcgcagccttgaaggaatttgcctttatgaaggctttaggagatcatggtttccctgttccaactgctgtggattgcaaccggcattgtgtgatcatgtcacttgtgcagggatatcctcttgttcaagtgaaaaagttacaaaatccggatgatgtttttgactcaattcttggtcttatcgttcgtttggctgagcatggactcatacactgtgactttaatgagttcaatatcatgattgacgatgatgaaaaaattacagtgattgactttccgcagatggtgtctgtttctcaccgtaatgcccaaatgttttttgaccgagacattgaatgcatctacaagttctttaacaaaaggttcaatctgaggtcagtgaaaaatgaagaacaagctggatctgaaaatgatgatgaagggaacagcagaccttcctttttgtccgtggaaaagggtgctggttccttggacaaggaactagctgccagtggatttaccaggaaagagaaagtggatatggataagtacatcgaggaagttgttgaagggcatgattccagctcagatgatgataatgatgaggacagttccgatgagcctgattgtgatcttaccccaagtgattcagacgcgcctggaactttttctgaagagcatggaacaagttgtagcggcgagaacagattggaaattcctccctcggatggcaatggagtggttatggcaccgctcgaatctgggatcaagacgttttccatggaagatgatgataacgatgatggctcgtcagaggatgctgatgaagaagaagatgctgagctcacgaaacaattgaacaagcaaaggagaaaagcaatcgcagctgcccatgggcggagaagaccaacgtcatccaggaacgcctacaaggacaagggtaagggcaccatgaactccaagatgcagaggcaggcgtgcaactggtgatggttgagtgcctcttgcggcagtaaatagattaggcgcagggttttgtgtggttgtataaccgtgggaccctttactagaatcaactccggctttatatttttactaggtgagtaatcgtgcgtcgcaacgagaacacataatattacgagaacttatatataaaatgtcgcaacgaaaacatataatattatgagaacttatatacaaaatgtgtgttatactgttatgaaaaaagatttcataactcatttg

SEQ ID NO: 3431 - DNA, 1479 bp, Zea Mays
aggaaagaaacagaatacaaattccatctcaaactcggtgttgtcgttcccttggcggctattcctggtgctcacgtcgcggcgatcttggtcgacggccacgggctgtgacagaacggtgggcgaggaggatgttggggtagacggcagcgtggatggcagaacgtgggcgagggttggtggggatggagggatagatgtggaagatcaccggagtggcacagatctcacgtcctgtgtcgtcgtctgtctcgcgcgtgttcaagaactgagcccagcgggattggaaaaaagattcctcgcccaaccctaccccagtccccaggcgatctcgcatggccaccggaccgcggtctctccacgccctcctcggcggcggtgcagttgccgacttgctgctgtggcgacggaggaacgcctcggcggcagctgtggtgggcgccaccacggtctggttcgttttcgagcgcgcggggtacagcttcccctccgtcctctccaacgccctgctcctcctcgtcgccatcctcttcttctgggccaagtctgcgtcgctgctcaacaggcctcttccacctcttcctaatcttgaggtctcagatgcgattgttgaaaaagctgcaaatcatgctcttgtatggatcaataggctgctggctgttggtcatgacatcgccatcaagagagataggaaagtttttataaaggtgatactgattttgtgggtggtttcattcattggaatgctcttcaattttcttacgcttatttacattggtgtaatgctttctctgttggttccaccactctatgagaagtaccaggaccaggttgatgagaaggttggtgtagcgtacagtgtactatcaaggcacatagataccatcattaccagggctgggcaatcagccaagcagaagaagactgagtaaaagaaacgttttgctgtattgtggaacatccctggttgtccaatgaagttgacagtgggcctttcatctttgaccctctattccactaaaatgaaccctcgatatgctgatatgaggttttgatgtgcattacgggaaatgaggtggcttgtgtatttcctttttggacatggggtttactatgggtgcatatcgcactcggaatgatatcgagaaattgcgactcgtacatgcaattatgcaggctgcttgctcattcgatgcccatctactggtagctcgttttctgaaatactactactccctccgtttctttttagttgtcgctggatagttcaattttgtactatccagcgacaactaaaacgaaacggagagagtacctaataaggtgtattctacatagacagttgcatatcatgtgaatggataggtatttctggcggcagttctgtttttgctttacctgtatttatatttatactgtcatgtacgggcgctcgtatgccaggcagcgtcgcgcccgtgacaggcgccgcgcacagga

SEQ ID NO: 3432 - DNA, 3694 bp, Zea Mays
gttttgagatagaaacatatactaatgttattaagttcagaagcatatataatagacggtcgtaacaccttggtcttcgtgtatcgatttatcatagagtgaaaattgtaggataagaaataaacaatctaaagtgttagcgcgcgggcaccagcacgcgagcgtcggtccattttctttagctcctctagtagaagataaagtggtggggccattcgagtactgagcctctccgtgccaaccaagcgaagtcttcgtcaacgcttgcgggagctgtcaggtgtcagccaaacccctcctcgttctcagcctcacagtcacagcagctttacgcaatacgcaccaagccaccaacagctgattctctactaatccaatctccaaaccaaccatcgagttctcgcgccacgtactgatccggcaatggacaacaatggagagaagacgacgaccatcatccacactctgcgagatgcgctgcttcactttgcagtcaagtccaagaagctcgcgtcgccactgctggagccattcgggcgggcgaccgagccgaccaccgtcaacgacgacgagctgatggcgctcaagtccaaactgcggcggatccgcgccaccctccgcgacgccgagagcctgtccgtcaccgattgctccgtccagctgtggctggccgagctcggcgacctcgagaaccgggccgaggatgtggtcgaggagctggagtacgagtcccgccgctcggcgcagctggaggagctcaagcaagacttgctctacgccgccacgacgcggaagcagcgccgggaggtggcgctgctgttcgcgcccccgcccgcgaggcggctccgccgcaagatcgacgacgtctgggcgaggtacgaagagatcgcgtcggacaggaagacgctccggctgcggccaggcgacggcggctgcgcgccccggcccgcggccagcccgctcgtgccaagcagcgtgcttccccgtaccgagcgcctccacgggaggcatggcgacgtcgagagggtcgccgcgctggtcctcggggatccggacggcgggacgagctacgccgtcgtgcccatcgtcgggatggccggcgtcggcaagactgctctgatgcagcacgtctgcggcatggagacggtgaagtcgtgctttgaactgacgcgctgggtttgggtctcccaggattttgacgttgtcagcgtgacccgcaagattgttgaggcgatcaccagatcgcgcccggagtgcggcgagctgagcacgcttcatgagctcatagttgagcaccttgccgggaagaggtgcttgatcgttcttgacgacgtgtgggatgacaatcccagccactggaacagcctgacggccccgctgagccactgcgcgccagggagtgcggttgccgtgacgacgaggagcaacaaggttgccaggatggtgagcaccaaggtgtatcatctcaaatgcttgtcagatgaagactgctggcttgtatgccagcgacgggcactgccaaatagcggtgccaacgtccacaaagaactcgttgagatcggtgagaggatcgccaagaaatgccacggcttgccattggcggcagaggcagctggtagcgtcctgagcacttcagccgtctgggagcactggaatgaagtcctgaataacgacttgtgggctgacaatgaggtgaagaacctggtactgccggtgctgaaggtgagctacgaccacctgtccatgccgctgaagcgcagcttcgcgttttgttcattgtttccaaagggcttcgtgttcgacaaagatctgctagtccagctgtggactgcgcagggctttgtggatgctgaaggagactgcagccttgaagcgatcgccaatggttacttcaatgacttggtgtcaaggtgcttcttccacccttccccatctcatgctctcagcgaagggaagtttgttatgcacgacctgtatcaagagcttgctcagtttgtttcaggcaatgaatgtaggatgatacagctccctaattcgacgaaaatagatgagagctctcggcatttgtccttggtcgacgaggagtccgattcggtcgaagaaataaacctgagctggttctgtggtcatcgtgatctccggaccttcatgttcattgcaagaacagaacagaaccccgaggagatgaccttcagaacaaagattccatctgagctgatcacaggttttgaatgcttaagggctttagatttgagcaactctaatatcatggagctaccgaaatccattggaagtctgatacacctaaggttccttggtctggacaacaccgcaattcagatgctgcctgagtcaatttgtgctcttctccacttgcagacaataaagcttaaccattgttcttcccttactcagttgcctcagggcatcaagctcctattgaacctaaggtgcttagagattccacattcaggcataaagatgccttctgggattggagagttgactaggctgcagagactaccttttttcgccatcgagaatgagcctgctggatgcaccatagcagacctcaacgaactggtaaacctcgaaggacatcttcacatcacaggtttaaacaacctggatggtgcacaagcttccatcgccaacctttggaacaagccgcggattaaaagtcttacactcgaatggtccggagttacaaattttagcaagtccctttgtgatccgcaaggaaacgctgtgagctgcatatcagacagtcagcaccctgcaatcagtgcaacagcagatcaggttttgaattgcctcaagccacattcaaatctggaggagcttagcatcaagggttataacggatccttttctcggtcatggttaggatggctgcccttggacaggttagcttctattgaactgaaagactgtcgtaattgcaaagaagtaccgccccttggctgcctaccatcactgaaacacattttgatacaatcactgccaagtgtgaagctgattggtccagagttctttggaaatgctggagataccacttctaacattaggagcagaatctgtaatgtgtttcctgcactgaagtcactaaagttcagcaacatggaagcttgggaggaatggctcggtgtcaagagtgagcacttccccaatcttaaatatttcagcatcgtcagatgcagcaaactgaagctgttgcccaagttcacttcagaaccaaagctgaaaatacgaatccggtgaagcacataccagctaaaaaggaaatctcatatacgtgcattgcggaaggtgacattttagttcttgaagcttcctgttcctatggtgcatagaatcctagacggtaatcattgatctgcttaatcagggttgcagtgcaaggatgtcatcaatgcaactaggagctgattggtgtatgtcctccatgcatgaaactgctgtaaaactggggcctgtgtggataattgaaatagaaaggcaaaggggaattagttctgggtgatgcaatgatctttataaatgtgtctgtaagagtacccgttagggttttggggttaaccccttatacttacagtctcacccctgcgtaatgggacagacccaactaacttgatctattaatacaacacccaaccctgagttaaggttagggtttcccaacggtgtccaagag

SEQ ID NO: 3433 - DNA, 1557 bp, Zea Mays
gaatctctaggacctaagccgttggagatagcatcagtgacagtgatgtcacacggcaattttagccgcaacgctccagctgtaccgcgaaacaaaatttctctacttttcttcgaccgtcctaccctatccgctcccctcgccggcgccgcggcggcggcgagaaagagagaacgcgctcctcttccttctcgactcgatctgccccttccagcccgctcgcccctcatcgagcggcctccgtagccctaggtgatccgcgcctccttccgccgcagcggaacaggacgcctgaccgtcgaccgtcgaagcgattcctctctcgcgggcgtcctcgtctcgccctcctcgcctcctcggtgccagtgggtcggcgcggggaggcatccgtccgggctacggtcgatttgttctccacttgacaatggatctggagacagaaaatcgtcttgcttctttactacttgaagaggcccgaagattacaattagaggctaacagggaaggtgttcaagcatatctgcgaaaacctaatgttaggcatcgtccaaactctcggttcctcacagccacagttcgtggagttcagcaagcaaatcgtgttgtggaggtcaatgaaatgtggcgtgccagggaaaaggaactggagttggagtcaaaaatgaaaggcagaagtagcagaagtaaagatcatggtgattttacaggtgagaagcgcaaaagtgaaagaaaccatagctccagctcaaggattgaacaagaagggaccacttatgatacttcgtactcagaccaggaggatggtctcagggatgatgaaattgaaagatttctttattcaagggcgaagcgaggacgtggggctgttggttccaggatggacgagcctggtccataccttgattctctgtcccatcatcaggacaatggacctagcccggacatacgtgtggaagaaaaatgggaacgcagagtacaaggcccagagaagcctccattttggggatgcaagtctctcgatggtcattggcgcttgggcacattggatggaaggccatcaagctctgaaccacagagcaaaaaagaaaagaaaagtaagctggataaaaaggataagatagagaaaaggaaggaaaagggcaagaagaaatccaaacatcgccaccaccgccatcgcagaagcagcaggagtgagtgagtgatgttgcctgttagcagaacagaaaaaaatggacacaacggttctgccatgaccatgagacaagctagctgactgttcctgtgtcttgaaacctgtattgtatggaaacgggatattgtgtaggcttatacaatacaatgttgcgatgtcacatcgtttgttgaagttttatcactttgattaacatctgcaacaggaggttttttcttctctttttcctatactatattgggcgtcgaatattggagtccgaggagcctgttcttcaagcagggcagcctgtcagttggggtttgtagctgaataaaactgtgtatggatgcgtaggccatcaatagctcttagtcatattagtg

SEQ ID NO: 3434 - DNA, 1771 bp, Zea Mays
tacttgcacgtgcgttctgcgcgggtcacgtgccatttcatctatccatcccgcagctcttgtctctggcaaccgtacgcccaaccgtgttcccgcgccgcccacgaactactctccggcgctgcccatgacgacggtgtcgcgcgcgctcggctccgcgttcgcgggcttcacgcgggcgcccgcggtggcgcagaccgcgacgaccctgccctccccgtacggctcgtcggctctgcaccagcactggcgctggagccgggcctgccgcacccggcggttctcgtccggccgcgcggcacggattagcatgagcctccgcgccggtatcgtcgggcttcctaacgtcggcaagtcaaccctcttcaacgccattgttgaaaacgggaaggcacaagctgcaaactttcccttttgcaccatcagcccaaacgttggtgtggtggctatccctgatcctcgtttgcaggtgctctcaaaattaagcaagtcccagcagacggtcccaacatccattgagcttgtggacattgctggtctagtcaaaggagcaagcaaaggagaggtaccagttttgccattgtcttcaattaacctgcaggatacctccaactccgctgagcaaatgtgagatggttccagattagtttatacataatggtattatggttggcaattgaaaacagggactaggaaatcaattcctttcaaacattcgtgaagtggattccatacttcaggttgtgcgatgctttgaggatgacgatatagttcatgtcaatggcaaggtcgatcccagatcagacattgatgtcattaacctagagctgatattttcagaccttgaacagatagagaagaggctagataagcttaacaagagtaaaacgaaagatacccaagtaaaagtgaaggaacaagcagagaaatcaggattggaaaaaattcagcaggcacttatggaaggaaagcctgcaagatcggtcgatttagctgagcatgagaaagaagctataaaacacctttatctgctaactatgaaacctgtcatttatgttgctaatgtgacagaatctgatcttgctgaacctgatagcaattctcatgtcaaagaggtggctaaagcagcatcagacttgcagtctggtatggttacaatatcagctcaggttgaagctgaactcgccgagctacctctagaagagagagtagaatatttaaaatctcttggtgttgctgaaagtggactaggaaatttggtaaaagcaacatataatctattggggttaagaacttatttcacaaccggagacaaggaaacaaaagcttggactattctttcaggcatgactgcgccacaagcagctggagttattcatagtgacttccagaaaggattcatcagagctgaaactctggttctcttggagtagcaagggagaaagggctgctgaggttggaagggaaggattatgttgtgcaggaaggagatgtcatgcttttcagattcaacgtgtgacagcaatagtagcaaaaggcttcaaaaacaccggaatttgtactaggcagaatatagtttgcccatattgtgagattttttttttgccacttgaccaccgattattgatctaccacgctggtagggcagctttcttagatcaagcctaatactggacagctatcattgttagcttcacctaaaaagtagtaccccgcactagggaataatttctcggacgaatttcaaaaaaaaaaaaaaactcgctctcgg

SEQ ID NO: 3435 - DNA, 1231 bp, Zea Mays
ggctccagacaaataagggacccacgtggaggtatcaatgccaagaagcgacttgatcatattgactgatcctggttcaaaaatttcagtaaatcaagggactgctacactattgccagttgaaggaaactattctcgaggaaatttgatgcttcagagaataaagacatacattgcatttctggagcaaaagcttgtggaatttgataggatggagaggttgaatcattttgttttaactgattccgatatagcagtggttggtgatcttggacatatattcaaaaaatatcctcattttcatctggctgttacttttcgtaataacaaagggcaaccgttgaattctgggtttgttgcggtaaggggaaccagggatggcatcactaagtaagttgacagctattgaatagatcgtattatacacaaccagcaaacttcaaaataaactctgttttttcagcgctgtggaattcttgaaacaagtccttggaacttacagtttaagatatatgaaggcttctcgtatgcttggtgaccaattagcacttgcatgggttgtcaagtctcatctaccatcggctttcggaaaattttctaagaatgaagcatttactggtgaagttaatggaacatctgttctcttcttgccttgtgctgtttataattggaccccgcctgagggtgctggacagtttcatggtgtacccttggatgttaaggttgttcatttcaaaggttccagaaagcgattgatgcttgaggcatggaatttctacagctcaacctctaagctgtctgatatgctatgcctaatcttgagaagtggccggacgaaatatgacttctgaacttttgggttaaaactgacacatgttgatactgttcaaagctgttgtatgttcaagtatagtacaaaaaaatgctgaccatgaggctgtcattgcaagaattcagatcagcataaaaaattgctagtagcattcagtatgtaacaaaaacatgtgagaacccatacgagaaccacgcagggtgaccatcgccttgtgttcttttggtttatccctacctgttaaatatgtaatgtggttccccaccaatgtgcgctatgtaggcaatttcgccgtcagatgtcgtcagcagtattaaatagagctggcgctgtttcaatgtgtcaccggcaaaatttgcagatgtttttttttgctgtcattcatcgcattttcaccca

SEQ ID NO: 3436 - DNA, 2024 bp, Zea Mays
cttcccccactcgtcttcgccagaaacccgctggcgctttggtctctgtcgtccaagttcccatctccggccaccaatagttccgacccgtaagcaccaacgccccatttgccactaccctaccgcgcaccggcaaagcgcagcgccaggccgcagcttgcaggggcaggcggcggcgggcagggcaaccgccactgcagccgggatccggcggccagcggcaaccggcggggggcaggcggtcgggacctggtgtcggtctacagccagacagcagcagcagcagcgtgacacctgctatatcgctttgcttattatctatattcatcaaagcatctatttgatcataatgttaaaagcgcgggcaagtttctagtgcttatcatttgccctccggtcaccccgttgtcgcgcgaagccgacgctatttcattccccgacaggaccggggctccgctgccgcctcttcgcccctatatggcggtcccgaggcctcaaatccgtgccctacgtcggggcacgctgcttctcttccttgtcccgctcatctactctgtgtccaggctgcaaccctgggctccagaaaagggtgtgtgcctgccacccccaaccgcgccgaagcggcctgaccatctcgtgctcggccccgccgccggacaggaccgccccgaccgcctacagtgccgaggacttagagctctgaacaagattggcatatcaagtgaagagaactattctggagaacatgtttcttttgctactgtattcacaacctacaattctgtctcagctggagatgacaatgttccatctgattctgtaactgttggaaacagttcttatagcaaaatagaaagatccatggccattctgaacactttcatcagtttcataaaggtatcaatgccaagaagcgacttgatcatattgactgatcctggttcaaaaatttcagtaaatcaagggactgctacactattgccagttgaaggaaactattctcgaggaaatttgatgcttcagagaataaagacatacattgcatttctggagcaaaagcttgtggaatttgataggatggagaggttgaatcattttgttttaactgattccgatatagcagtggttggtgatcttggacatatattcaaaaaatatcctcattttcatctggctgttacttttcgtaataacaaagggcaaccgttgaattctgggtttgttgcggtaaggggaaccagggatggcatcactaacgctgtggaattcttgaaacaagtccttggaacttacagtttaagatatatgaaggcttctcgtatgcttggtgaccaattagcacttgcatgggttgtcaagtctcatctaccatcggctttcggaaaattttctaagaatgaagcatttactggtgaagttaatggaacatctgttctcttcttgccttgtgctgtttataattggaccccgcctgagggtgctggacagtttcatggtgtacccttggatgttaaggttgttcatttcaaaggttccagaaagcgattgatgcttgaggcatggaatttctacagctcaacctctaagctgtctgatatgctatgcctaatcttgagaagtggccggacgaaatatgacttctgaacttttgggttaaaactgacacatgttgatactgttcaaagctgttgtatgttcaagtatagtacaaaaaaatgctgaccatgaggctgtcattgcaagaattcagatcagcataaaaaattgctagtagcattcagtatgtaacaaaaacatgtgagaacccatacgagaaccacgcagggtgaccatcgccttgtgttcttttggtttatccctacctgttaaatatgtaatgtggttccccaccaatgtgcgctatgtaggcaatttcgccgtcagatgtcgtcagcagtattaaatagagctggcgctgtttcaatgtgtcaccggcaaaatttgcagatgtttttttttgctgtcattcatcgcattttcaccca

SEQ ID NO: 3437 - DNA, 2196 bp, Zea Mays
cttcccccactcgtcttcgccagaaacccgctggcgctttggtctctgtcgtccaagttcccatctccggccaccaatagttccgacccgtaagcaccaacgccccatttgccactaccctaccgcgcaccggcaaagcgcagcgccaggccgcagcttgcaggggcaggcggcggcgggcagggcaaccgccactgcagccgggatccggcggccagcggcaaccggcggggggcaggcggtcgggacctggtgtcggtctacagccagacagcagcagcagcagcgtgacaccactaccgtatggtccactgctcctttgctggtgtcgtccactgctcctctgcaacgtcgtttgatctcctgtgcagtctgcacacgcgtgttgaaggagttgattcctggacagcacacgatagcacaatcctctactggttcattcctggactaccggtggtaatctgacctgctatatcgctttgcttattatctatattcatcaaagcatctatttgatcataatgttaaaagcgcgggcaagtttctagtgcttatcatttgccctccggtcaccccgttgtcgcgcgaagccgacgctatttcattccccgacaggaccggggctccgctgccgcctcttcgcccctatatggcggtcccgaggcctcaaatccgtgccctacgtcggggcacgctgcttctcttccttgtcccgctcatctactctgtgtccaggctgcaaccctgggctccagaaaagggtgtgtgcctgccacccccaaccgcgccgaagcggcctgaccatctcgtgctcggccccgccgccggacaggaccgccccgaccgcctacagtgccgaggacttagagctctgaacaagattggcatatcaagtgaagagaactattctggagaacatgtttcttttgctactgtattcacaacctacaattctgtctcagctggagatgacaatgttccatctgattctgtaactgttggaaacagttcttatagcaaaatagaaagatccatggccattctgaacactttcatcagtttcataaaggtatcaatgccaagaagcgacttgatcatattgactgatcctggttcaaaaatttcagtaaatcaagggactgctacactattgccagttgaaggaaactattctcgaggaaatttgatgcttcagagaataaagacatacattgcatttctggagcaaaagcttgtggaatttgataggatggagaggttgaatcattttgttttaactgattccgatatagcagtggttggtgatcttggacatatattcaaaaaatatcctcattttcatctggctgttacttttcgtaataacaaagggcaaccgttgaattctgggtttgttgcggtaaggggaaccagggatggcatcactaacgctgtggaattcttgaaacaagtccttggaacttacagtttaagatatatgaaggcttctcgtatgcttggtgaccaattagcacttgcatgggttgtcaagtctcatctaccatcggctttcggaaaattttctaagaatgaagcatttactggtgaagttaatggaacatctgttctcttcttgccttgtgctgtttataattggaccccgcctgagggtgctggacagtttcatggtgtacccttggatgttaaggttgttcatttcaaaggttccagaaagcgattgatgcttgaggcatggaatttctacagctcaacctctaagctgtctgatatgctatgcctaatcttgagaagtggccggacgaaatatgacttctgaacttttgggttaaaactgacacatgttgatactgttcaaagctgttgtatgttcaagtatagtacaaaaaaatgctgaccatgaggctgtcattgcaagaattcagatcagcataaaaaattgctagtagcattcagtatgtaacaaaaacatgtgagaacccatacgagaaccacgcagggtgaccatcgccttgtgttcttttggtttatccctacctgttaaatatgtaatgtggttccccaccaatgtgcgctatgtaggcaatttcgccgtcagatgtcgtcagcagtattaaatagagctggcgctgtttcaatgtgtcaccggcaaaatttgcagatgtttttttttgctgtcattcatcgcattttcaccca

SEQ ID NO: 3438 - DNA, 1573 bp, Zea Mays
cttagtcccagcctcgccccctctccgcagagcgcatccatctccctacctcgagcccaaatcgatgtccagacgccaacccgtccccgccgccgctgcgaagctggaggaaggggagcatgagctgagcatcgtcgacgcgctcctcgaggtgttgtcgggccgctgcgagctgcgacggacctccttcggctctcggcgcctgtaccggcgctttagcttcacctccatgggggcgccgccacagggaagacgcgtgcgctcctcctcgctctccgccaagtgataaattttctcaaatttgttgtgaatatggtggaatttcttgattaatgtcttggcgtggggattcagttgcctgggtaccagatatagcgatgagcgaaatttaaggtgtgaatcccaggtagcagattcacaggaaacttttggggccttgatattgattccctaatgtttgttgggattgctttcatcggttttttctttgttggatcggtcactaccttggcgtatttaggccccagagaattgatttttcaggttatatctgatttgactcaagtttcaaacctcattggaatctattcagaattcactagcagatgggttgctaaaactgacagaacaagtaacttctgacaatcggagtattgcatctttatctatatgtatgcacatttggttgaaattctatgcagtgtcaacaggtacacactttacaagattacattttcattacaagatgcttgattgcagccaatattttcatttctttggtgcttgtgtagaagtatcgccttgcaaagtatataccagactctcatgctaaaggttttaaggacgacaagaaagtttgagtgattccctctcgaacatggattatgtaccatattctgaaatgtgtttagaggattgcaaatcaatgaggcactaaagatgcaactggaagttcagaagcggctacacgagcaactggaggtatttgaaggtgtttgagataaataatgatgctaaaatgaaaaggacaatgcgacgtcccctaccatctggtcgtgttagttctacacatgctgccatgtgggctacaagtgcaggaattgcaggaacaactttgctggcctctcgaaggttagcgctatgtcgtggtgctccactttaaagatgtgcatgccacgtctacacttcccgtctctgattatagattaggtctttactccctgatgtttagccagtgcgtgctgttacccactaggtctagccgtagtcagtgactgcacaaccacaacccgctcttgtgtattttgcgtttgcggatcgcatcgcatgttattttggtccttctatattcatgctacaaggctgcaaactgtggtgctcatacatttatgtaaccagtaacctataacgactttgatgtatattatattttgtaacagtgaacttgactatcgtagatatgtagcttgctggaacgattttttagtgtacgactgtgctacaatgactgtagcgcccggtagggcgctgccctattctagtagaaataaaggaggaagtcccttgatatata

SEQ ID NO: 3439 - DNA, 2143 bp, Zea Mays
ctccctacctcgagcccaaatcgatgtccagacgccaacccgtccccgccgccgctgcgaagctggaggaaggggagcatgagctgagcatcgtcgacgcgctcctcgaggtgttgtcgggccgctgcgagctgcgacggacctccttcggctctcggcgcctgtaccggcgctttagcttcacctccatgggggcgccgccacagggaagacgcgtgcgctcctcctcgctctccgccaagtgataaattttctcaaatttacttctccaggttttcaaatgtatctatagatttgttttttccctgatcgttagagtattctaggttgtgaatatggtggaatttcttgattaatgtcttggcgtggggattcagttgcctgggtaccagatatagcgatgagcgaaatttaaggtgtgaatcccaggtagcagattcacaggaaacttttggggccttgatattgattccctaatgtttgttgggattgctttcatcggttttttctttgttggatcggtcactaccttggcgtatttaggccccagagaattgatttttcaggttatatctgatttgactcaaggtagggtatgtgtccacttctttttcccctgaactaaaattcatgtttacatttaggttttagttacaaataatgatggatatttgttgctcggaatttctataaaagaattagaaacagtgcatgtttttttatctagatcacatacatgcttacagcttatatacccattgtttgcattgtaaaacaagaatatgtaagccatatagactcgtgatgagattcactcgctattgtctgttcttcagatttcttcatggcttttcagtcctagacacagcaacccctatacttttcttgaactaagtttggaaggtattctacaaaagtagtaagaggattaggttccttaataccttcagattcatgcaccgcactcatatttcatgttcgaaagtggaaactgctcctttggctggtcttgtaacatattctgacaaagaaatgttcctacattgtatgaggttatatatgctaggctgctagcaacctttatgttaaccctttcatacttctgttatagtattcattaggacaacagtcactcaaaatcattacttcattttcatttatcatttgttactctgatctcatatgggctaccttttttggaaataatgctggtgagtttcaaacctcattggaatctattcagaattcactagcagatgggttgctaaaactgacagaacaagtaacttctgacaatcggagtattgcatctttatctatatgtatgcacatttggttgaaattctatgcagtgtcaacagaagtatcgccttgcaaagtatataccagactctcatgctaaaggttttaaggacgacaagaaagtttgagtgattccctctcgaacatggattatgtaccatattctgaaatgtgtttagaggattgcaaatcaatgaggcactaaagatgcaactggaagttcagaagcggctacacgagcaactggaggtatttgaaggtgtttgagataaataatgatgctaaaatgaaaaggacaatgcgacgtcccctaccatctggtcgtgttagttctacacatgctgccatgtgggctacaagtgcaggaattgcaggaacaactttgctggcctctcgaaggttagcgctatgtcgtggtgctccactttaaagatgtgcatgccacgtctacacttcccgtctctgattatagattaggtctttactccctgatgtttagccagtgcgtgctgttacccactaggtctagccgtagtcagtgactgcacaaccacaacccgctcttgtgtattttgcgtttgcggatcgcatcgcatgttattttggtccttctatattcatgctacaaggctgcaaactgtggtgctcatacatttatgtaaccagtaacctataacgactttgatgtatattatattttgtaacagtgaacttgactatcgtagatatgtagcttgctggaacgattttttagtgtacgactgtgctacaatgactgtagcgcccggtagggcgctgccctattctagtagaaataaaggaggaagtcccttgatatata

SEQ ID NO: 3440 - DNA, 1430 bp, Zea Mays
acgtagtaagctgggattcttcgtatagaccggattaaaaccctaggccctagccaccgcccaccgtcgcctcagcaaatcctcctcccgtttcaccatgccgccctgctgctcccccaccacctccgccgtcaccgctgcggcggcatctcccggcgcctcgcgcagcgggggcctcctgcgccgctcgcgcccagcccccgccgccgtgttttccgggatccaaacatgaggaacgacacgaggctgcgcatcttctcaggcacagccaatccttccctttcccaggagatagcaagttacttggggctagaacttgggaagataaccataaagaggtttgctgatggtgaaatatatgttcagttgcaagaaagtgtacggggctgtgatgttttccttgtgcaaccgtcgtgtcctccagcaaatgaaaatcttatggagcttctgatcatgattgatgcctgtaggagagcatctgctaagaatatcactgcagttatcccttattttggttatgcaagggctgacaggaagtcccagggcagggaatctatagctgcaaaacttgtagctaatatgattaccgaagctggtgccaaccgtgtccttgtttgtgatcttcattctagtcaagcaatgggatactttgacatcccagtagatcacgtttatggccagcctgttattcttgattatctcgccagcaagacaatatgttcagatgacttggtagttgtatctcctgatgttggaggtgttgccagggcacgtgcctttgccaaaaagctgtcagatgcacctctagctattgtagataaaagaaggcaaggacataatgtcgctgaggtgatgaatcttattggagacgtgagaggaaaagtggctgttatgatggatgatatgatcgacacagcaggtaccatttccaaaggagctgagctactgcaccaggaaggcgcccgagaagtatatgcttgctgcacacatggtgtttttagcccacccgccatcgaaaggctatcaagtggattgttccaagaagtaatcatcacaaacaccatccctctgaaggaggagaagagttttccgcagctgactattctttcggttgctaacctcttgggggaaacaatctggcgcgttcacgatgattgctcggttggtcatgagccatactccagcttggatattgactgatgcttaagttgtggcagctcgcaaccttctctttcttttcttttggcctcggtttttgtctgtgcgtgtaataagcaatgtttttgtggaattctgttagcgcagaacctcagccttgtatttgagtgacagcacataagatgacattccagattgtagtgcagtgtttcagctatcctcaatcacagcacataatatgtgtttgcttgcagtattattaggctttatat

SEQ ID NO: 3441 - DNA, 2627 bp, Zea Mays
atggacccgaagctgctgcggcatggaaatctgagaagtattgtcctccccccagtccccagacttgcgcgcgcctccgctgctgcgactgcgagcccaagaaaaattttcctctacgagcgcatggaggtgtccgctgggctccggctgccgcccgtcgctgcggcagcgtcgctccttggctgtcggtccgcgtcggtgccgccgcgcgcggcggcttcccattctgtgcggtccgtgtcccgcgcggttaagagcagctgcaattaacggcctccaaagaaacagaagtaatctcgaatcattattctgctacgacaaatctgtccccgagcaggacattggagaaccatctggtctaaatctggaaaagaagaatgtcggggacaagcctccctgctcaagctgtgaagctaaaggtgccttgctgtgtgcaacgtgcgctggttcaggcttgtacgtcgactcgatactagagagccagggaatcatcgtgaaagtcagatgcctaggtaaataagctttgacaagcacattacgtgcgacagttgcttcctgctatacagttgatacatgacatgacctatacgacctgctgatatccaaaccactgtaggttgcggtggaactgggaacatcatgtgctccaaatgtggaggccgtgggcatacataacatgaacgctaaagcttgcaccttgcagatcaaaggagttgactctatggagaattttctctgtgttacatgttacggtgtgctgagctagctgctgtagctacatcgagacatgctttagaaggctaagttaatgaactatcctcttttactttttttttgttccccacttcccctcattccgtgcttaaaagcatgatgcgtcatgggatttcatgtgatgttgtaatcgtaaaggtgtaatggtatgtgaaagacacacttcgtacatggaggagaatgagagattaaattcagttgtgctagtactcctgtgcattaaatttttactcaaacgctctgcttcacagtgcttgtggatatgggctttcgctctcctccacaaatcacaatgctcgtgcatacggaatttcctgacggaccacgcagccgcaggagcagtccgccgccacacatagcgctcgacaaaatactcgtggctgataagctcattgttgactcgactcgttttcaattttatcgcgagctaaactaccatcttagctcggtttgttaaggagccagctcgttagctcgaactagcaactatttgttagaaaagcaaagcctacacttgtattggatgaactaataaatgatgagctttgttaatttgatgttggattcatgcgatatgtgaaactataagtattattacactttttttagttttaaattatctaggattaactagaaattgattatattgttttaataatatgtatattgttttttaccgtggctcgcgacctaaagaagctagctcaagattgaactgagccgagctggctcgatatgcagccctagccacataattcattagcttgcacaaacctcatgggcatgtgttacagttttttttcctgaagattttttctgagaatctgactgtaaagagaatcttagtatcataaaaaaagattacatgtggaggaacatgaataaatttatagagtttaggatctttaatgtgactgattcctactattacgatgactcgatcgatcatgcgttcacgttaatttttgacggttttcaataaaagcgattctcacaaaagtgcttgaaaatctaggtgtttgatagttcgcaatatcttctagtagttaaaagctgaaaaagttaaaagaaacggcccgctcgtgcgccgccgctgcccgtgcaaccgtccaccaccgcgacgcaagctgctcccacttatagatgtccaaacgggcggcacggcccgacccaactcggcccggcccgtttgagcccgacacggttaagcccgaccacttaaccgtaccgtgtcgtgccgcccgacgggctcatacctcttcctgagcacggcacggtggaggcccgaccgtgccgggcggcccgaatagcacgacccatttagtagcccgtgccggctcgagcccgcaaaacacaaaactatatttagcaaaaaaaaccctaaaaccgacaacacaaaaaacctaaaacttacagcacaaaaaccctaaaacaaagaactgtccacataatcaaatttgctccactcggtaagaaaatttagcaaagaagaaccgatgcaactcacctacaggcgcggtgctcgcccggcgccgtcggaaccgctccagcacgccgcgcagcaccacatcgagggtgtcctccatgccgtcgccgaacccatcggacgatgacgcgtacaccagccgcgggatcatcttcaccacgcgctcctgcatccgttgcacccgccgctcactgagccccttaagaacataggaggagggaggaggtgccgagtgtgcaccgtgccgtcgtagggaggagggagccaggagcgagagggaggaagagtgggagagtgggttagggattgcattaggagcagacgcggcagccctcggggacttgtgggctagcggcgggggtgggtg

SEQ ID NO: 3442 - DNA, 2333 bp, Zea Mays
tgcatacatatatatcgagatggtggactcagttcgtagtaaaccgacctgggtacaaccggccatgaacctgccaaacttaagtcggtctatacattactattgttgctgagctaactaacctgacactggccggtataggacaaaactgttgcagtctgttgactacagctgctactgacctggtcagcagcaggccaaaacaaaattggttgctactactagctgcagacatgaaacttactaaggaacgtctgcttgacaggcgtgcaagaagcttcttaatggcaatgatgtgcgaaaggtctctagctgagttggttaggtggtataagtagcattcatcaggtcttgagtttgactccctgtaggagcccacaggtcgattttttttaatggcattgatgtgtgttgttgtggtggtgggtgggttgggggttctttctcccgcagagcacaggtccaggttttttaggattgcagtacataatttgcacgtcaaaatttatgtgcagtagattattttcaagggatgtgctggattattttaaatgcagtgtgctatataatttatccaaagatgctaatttgcttatgttattttttctgtattttacatgtacctgttccttttattctcttggaagcaaggagtgtcatcacaacaaacaactgaaggtactggtgtttttggtcgattcagattcttgaaccaaagagtttcatctcagagtgaagattcattatcatgtcatagaattgatctcagaacttcaacaattaagattgatgcagatgaaaatgatttaagattttgcttcagaataatctcacctgttaaggcatacacattacaggcagaatcaggggctgatcaaaaggactggatccagaaaattactggagttatcgcatcgctactaaattcaccattcccacagcagttgtcatatggtaatgtagcagcagagagtaacagatccacaagttctgttgattctttgtctattgaagataacaagagttcagagggacatgatgatatattcaaccttctgaggaatatccctggaaatgacagttgtgcagaatgtcgttcccctgatcctgattgggcatctctaaacttgggtattctgatttgcattgagtgctctggggctcataggaatcttggagtgcacatttcaaaggttcgatccttgagactagatgtgaaagtctgggagccagtaattatggatctcttccatgcactaggaaatgattacgctaattccatttgggaagccctgcttccaaaagaagatcaaggtatgtggacaaactgctttttgccagagatcccgatcagaataccattaatattttggaagccataaggaaaaatgatgtgagagcagcatatcgaattcttgcaatagctgaagtcagtgctaacatgacatatgatgctttgagcaaagatgtccatcatgttcagccagtgacagacaagatgttacttgatccgatttcttgtgagataattcaggactctggaaaaccagaaggctgtctacaaggttgttctttattgcactttgcatgcgaatacggttatcctataatggtggagcttcttctactttttggcgcggatattaatatgcaggatttccatggccgaacaccattgcatcattgtgtccaaaagaaaaatgatgagctcaccaagcatctgctgaagaggggtgcgagaacgacaattaaagatggcggaggtctgactgctctggagagaagaatggaacttggagcgataactgatgaagacttattcatactatttgtgagataaagcttctccaaactggcttttgacgaggcagagcttaggagctacacttcagtcatctatgctaatgtgtatcagacaattaaaatgggctatattagaaaggatgtgtcttttttctcttaaattttagagatgagtatgtaggaaattttgattattgtagttgtttgctgctccaatgagtgtgtattttgcagatatttttgtctcaatgatgagataaatatgcacacaaagagattacatgaggggggctaaaaagttagccttagtcaaaccagattcctcaaaatatcttttatctcgagataatcaggtttgcacagttctccctaaaaaattagagttaagtcttggcaaacttggttattttgtaatgtaattatcctgtagtggtcctaacttgattgctatatatggttgaacctgtctggagctatgctaacccaaaatgctttattatgctttgcatgattacatgctaacaaaataa

SEQ ID NO: 3443 - DNA, 1696 bp, Zea Mays
atggtcaagccgccgccgccgccgcccacctccacctgtacctccgacaccccgctacccaccccagggggcctcctcggctcgctctcctcctccgcgcactccctcctcgccgcggcgcgccgctccccggtcaccaccctggtcgccgccttcttcctcctcgcgctcttcatgtacggcgaggacgtccgcaccatcgccgagctttccatcgacgactacctctaccccgacgccgacttctacaacgtctccgccctcccgcccctcgcgctgcccccggccacctgcgacctctcccgcggccgctgggtcttcgacaacgtctccctcccggcgtatcgggagaaggactgcaccttcctcaccaagcaggtcacctgcctcgccaacggacgacccgacgatctgtggcagtactggaaatggcagcccaacgagtgctccctccccacgttcgacgctcggaggttcatggaggcgatgcgcgggaagcggctcatgttcgtgggggactcgctcaaccgcaaccagtgggagtcgctggtgtgcttggtgcagcccattctgtcgaagggcaggaagaagatcgtcaagcggggctccctcactgtattccacgccaaggagtaccgcgccaccctcgaattctactgggcgcccttcctcgtcgagtccaactccgataaccccaagatccacagcatcgagcaccggatcatcaggcccgagcggatcgaggggcacgccaagtactggagaggcgtcgactacctcatcttcaacacctacatctggtggatgaacacagccgacatgaaagtcaggagaccaaattcgaggtattggtctgaacatgacgaggttcccaggattgaggcgtatggactggtgttcaagacgtggtctgattggctcaatgacaacatcgatcctgaccgcacacttgtattcttcatgacaatttctccactccacatcagccacataactgggggaacccggacgggatcaggtgcgtgaaggagacgcttccgtaccagaactacagccagccgctggacctgtaccacgacatgcggatgcacgacctggtggtgaaggtggccagcgccatggcgaaggtgccagtgacggtgatcaacatcaccaggatgtcggactaccggaaggacgcacatacggggctgtactccatccggcaagggaagctgctgacgccggagcagaagggggacccggagaagttcgcggactgcatccactggtgcctccccggcgtgccggacgtgtggaaccagatactctacacgaggatcctttccaaaccgccttcttggggttcttctaatgttagccccttatctccatcccagtccctgcctccccggtgaggatcacaagcagggaaggcagggtctttttctaccacagcctaagcctaggaaaagcgtacggtttttcgttctctttctcctcctttttagtcggtagggtaggttgagtgaaggttagagcaaaagggaaatggagggggaggttactaatggcatggcatgtaggatctttgaggtgtagatgagctgtgagttttgccaattgagcaaacagcagctagctcgtagacagttgcgctatgcacatgtatgtatatatatatatatatataatataaagccttcttcctgctgta

SEQ ID NO: 3444 - DNA, 682 bp, Zea Mays
cggcatccccccccctgcagccggtgagctgctgtgagcctatgcctcctcatcggctcaccacccaggtttacccaccttgcagatccagtggcgattccattcctctccgtgtggacgcaaggactcagtgaaccacttccagatactcgctgcttctcccgtgcccatgggaaactgccagtgcagagaaggtcaaagaagcacacaagagagtgatggtggccaatcatccagatgcgggtggaagtcattaccttgcttcaaagattaacgaggcaaaggatgtaatgacagggaaaacaaaagggggtgggtctgccttttgatcggtacacggacaacgtgttcttccactgaaagagcaattttgtgtctccagactcgcattagaagatatgccgaaatctttgtgtgttttatgaaaatttgtggacaaaaaaaaaagtagtggacctttatggagcaggcaattcgttgcttagtaaagctcggctcagttgtgcttgtgcccgaatcaattggacattgttgctaattgagtcccctgtcctttgtttttccttttttttcattgatatcctgaaattcaccaacacaaagtatcatgaactgccttttattgataaattctgtatctgttttgaccaacgacctgtgtaatttcataccatcatcattg

SEQ ID NO: 3445 - DNA, 3919 bp, Zea Mays
cggagacggacgactaggactccacccgctttcggctttccttcgcatttcccgttccccccacctgctcgcggcatccgcttctcgtcgttgtcgtcgctcctcctcgccgaccgggacgcggagacgatcgacgcaagcagaccctagccgacgagctcgcagggagccgggagggatgaagagcctgttcaagagtaagatcaggtggcagcaccggtccaacgacccggcgtccccgtcggggcagccgcagccacagccgcagcaggcgttgggcccgccgtcgccgtcgccttcgagctccccgtcgtctgcggcgccgctctccgtgtcaacggcggccacctcctccccctcctcgcccccctccgcggcggcgacgcccacgggtgctggggcagcagcggcagcgggagcgggagcggcaggggaggactacatagcgtcggaggaggagttccagatgcagctggccatggcgctgtccgcgtcttccaacagcgattgcgtgggggacctggacggggagcagatcaggaaggccaagctcataagcctcgatcgcttcgctgcccaccgcgacgagggccacaccgcggagtcgctctcccgccgatactgggactataactttcttgattatcatgagaaagttattgatggcttctatgacatctttggctctatggaatcctctaggcagggaaatatgccatcattagcagatctccaaacaggcataggggacctaggctttgaagtcattgtagtaaaccgtgccattgatagtaccttgcaggagatggagcaagtggcacagtgcatcctgttggacttccctgttgccaatattgcactcttagtgcaaagaatagctgagcttgttacagataatatgggtggacctgtcaaagatgctaacgacatgctcacaaggtggctggagaagagtactgagttgagaacctcgctacaaacaagtttgttgcctattggttgcatcaagatagggctatcacgtcaccgtgccttacttttcaagatccttgcagatagtgttgggattctatgcaaacttgtcaaagggagcaattatactggtggtgatgatgacgatgctataaacataattaagatggacaatgaaagggagtttttggttgatctgatggctgctcctggtgctcttattccagcagatatcttaagttggaaaggcaattcgttaaattctaatagaaaacttggcctgagtcagacagctggatcatcgagtaccgttggtgctaatatgggtcctagtgtattgccacttgaacctaaaggtgatcagctgcctttgttcagcagtggtgattggatatcagagagtggttctggatatggggcagcagaaactgcagcttctactcaaacctcttctggtgccacatcatctgttcctgctggaagtgcttttgacagttcatggatgctgattaatcatgaccaatcagatggaccatcaacttctgctggtacatcatcccagcagaaagttgtacctcaaaacgaacatccacggaatttaaaccgtcttccagatttgcaggaaattccagagtcaaaaaacctttttgctgaccttaatccttttggggatacgaagtccaagaaaacttcagtaccattcaaaggaccagatcaaaggaacaatgagttgcaaaagcgcagagagaacattgtccctaatggtggaagaccacagcagcggttagttatgaagaattggtctccttataatgatgtttctaacaacaaacagtacaattatgtcgaggattcatttgcacgtagaaatgttggcaacaatgccgcatcatcatcatcccagataacacaacaagccgcaaggtctaatcttaattctggattgcgtaatgatgcatcatatcataattatgatagtattatggctggtacctctgccacgaatattacatctacagctgagactgggaaggttcctgaaagggttctgcgtggtgatttggataaaggtcaaacaaattatagacttcaggatcaacatgttgtaggtcaaccaccacaggaaagacttccatggggtaatcctgctgaaggaagagttccaatgaatagatttcagaatcaagcaaaacaacacatgggaaacattgatacaaagcaagaccataagaaattgctccctgatccaaaaaaatctccccttgacagattcatggacacgtcattgccatcaagaaacttggacgtgaggtcacagaggcttgactttgatgatgtgtctgaatgtgaaattccttgggaagatcttgtgattggtgaaaggattggcttaggttcatatggagaggtttaccgtgctgactggaatggaacagaagtagctgtaaaaaaattcttggatcaagatttctatggtgatgctctggatgagtttaggagtgaattgttgctttattgtttgatatacggatgtactttatctgacaaggtccgaattatgcgtcggctgcgccatccaaatattgttctctttatgggtgctgttacacgccctccgaacttatctattgtatctgaataccttccaaggtgcgacgtttacagctttggtgtcatattatgggagctggcaacgcttagaatgccatggagtgggatgaatccaatgcaggttgtgggggcagttggtttccaggatagacggcttgatattcccaaggaagttgatcctctggtagcaaggatcatattcgaatgctggcagaaggacccaaatctgcgcccttcatttgcacagttaacaagtgccctaaagactgttcaaagactagtgaccccttctcaccaggagacccagagcccccatcccgcaaatgcgggcgcggcttgtagattgagcgccccaggcggtggtagacactctgccgtctgcgacaaggaccccgtggtagggtatgtatagagttgcccatcatcgggagaagtgattcagtgtgtagcaactgatcgtcaatccctcttttagtcctttgtacacccaaccggtcgaccgggtgcgagccctctgaaagcagtgagctctgtgttcattgtgaagtgcgtggctatgctaagtggattttctgtcttgctgcgcaataggcagcagcgtatctggaagtttgaagcgttgtaaaactctgtacaatcaggacacttgaatacaggatacatacattgtgttctttgtttttgaagatgtgcaagcagtccttctgtgcaagcgtccactttcgttggaccgctgggaagatgtaccgtgggcccgtggcagacaaaccctgagccccattctttttccgctcctcgcaagacacgcatacgtcacctcccgaccatgcgtcctcccgatcaccgtccacgcgcgccgacagccgagatccaacggtctattgccttcccctctgctgctctgctctgttcgcttgtgctccttctttccatggcggcatacgccggaatcctagttccaccgctccccgtccgcctctcggtctctcaccttagatccgttaccccggcttcctactccctgaaccaccgtcccccccgccccgcggtcgcccgtgcggcttcccgcggcaacggcaacggcgggccaccggtggagggggagaaggagcggcgacgctcgtcgctcccggcgctgtcggagatccggttgggagagcttctgtccccggaccccgccaatgccgtggctgtggtgctcacgggcgcgctcgtatgggctggcgcctcactgctgctgcagctcacgctcatctccgcagcaatcttcgccgccgccgtcaagtactcgtttgtcgccgcgctcctgctaatcgtccttatcgccctgctgtga

SEQ ID NO: 3446 - DNA, 1628 bp, Zea Mays
gaagggacgaaaagcgcagacaagagagagaaatcggaatccaagcgcaaccaaaagagaagagggcagacacgagggagcgcgtggggggagagggcatggtctctctcgtcccggcagtcccgtctcaagcaaaagctctctcctcttcttccgctcagtgcaccaatcactgcaacatactggcctgaggtcattgagttggtgaaagggaaggagggggtatcatgggcatctcatccaagtggattaaatccttggttggcataaggaagcaagaaaaagcgcagaatgcagaaaagcaagaaaaagggtggaacgctgagagcagtgaaactaaacattctttggatcccggagctgcacttgcagtcgaagaaattacagtacaaagtgaagcattgactgataacaaaagcgcacaaatggtttcaaattcatttttttcagacagtacaccgcttgatgtgcacatttctcaggctgaacatcatagtaacgaagatttggccgcaactgttgtccagtctgcgtttcgagcgttcttggctaggcgtgctttacgagctttgaaaggaatagttctacttcaagcccttattaggggccattctgttagaaggcagacagcagagacgcttcagtgtatgcaagcgctggtaaaagcaaaagctcgtgtccgagcaagacaagttcgtgttgccttagaaaatcaagtggcacggaaaaagattcctgaacaagatgatcatgagaaccatgtccgagaagtcgagggaggctggtgtggcagtattggttccatggaggaaatgcaagctaaagcactgaaaagacgagaagctgctgctaagcgtgagagggcaatggcatatgctttgactcatcagcggcaagctggttccaagcaacaaaattctttgagcctgcaaggtcttgaacttggtgagaaccactgggagtcaaattggttagacaggtggatggctgtacgtccatgggagaacaggttacttgactgtaatgccaaagagagtctgccaacgcatgaagataaggatgaggaagcaaattctcagatcacaccaaaggttggcagagaatcagggaagggaccaacccgcaggaattcgcttaacaggtctgctccaaaagcacgggcggactctcctaaccagggtgatgagttagaggcctgataacacattcctccaatttgacgtcggcaagccatcctaaagtgtgcttctccaggttgcccataacgtaacattcccaaacgatatcatgcagctagatttgggttgtgattcatatttctgttgtgtaatgctgtggtgtgttgtgccttgtgtggccttttattccgcatcgccaattttcttatgtttccagcttccctgtaagttgttctaactgctgaaactaaaagaaggaaatgtgctgtattgtgtttatgtgttgaagtttctcgggaacttcgatcctgcttttgcagttgcagaacaccatcctctgattgtataccttcgagtgcaatcattcaggtcaaatatgcatgatcctgatttgtttatgtatgattggtcgtaaaagtgagggtcatgtggtctgtaaactaccaaact

SEQ ID NO: 3447 - DNA, 1896 bp, Zea Mays
gaagggacgaaaagcgcagacaagagagagaaatcggaatccaagcgcaaccaaaagagaagagggcagacacgagggagcgcgtggggggagagggcatggtctctctcgtcccggcagtcccgtctcaagcaaaagctctctcctcttcttccgctcagggaaggagggggtatcatgggcatctcatccaagtggattaaatccttggttggcataaggaagcaagaaaaagcgcagaatgcagaaaagcaagaaaaagggtggaacgctgagagcagtgaaactaagagctctgctaatcaatcactgcacaaacggaaacattctttggatcccggagctgcacttgcagtcgaagaaattacagtacaaagtgaagcattgactgataacaaaagcgcacaaatggtttcaaattcatttttttcagacagtacaccgcttgatgtgcacatttctcaggctgaacatcatagtaacgaagatttggccgcaactgttgtccagtctgcgtttcgagcgttcttggctaggcgtgctttacgagctttgaaaggaatagttctacttcaagcccttattaggggccattctgttagaaggcagacagcagagacgcttcagtgtatgcaagcgctggtaaaagcaaaagctcgtgtccgagcaagacaagttcgtgttgccttagaaaatcaagtggcacggaaaaagattcctgaacaagatgatcatgagaaccatgtccgagaagtcgagggaggctggtgtggcagtattggttccatggaggaaatgcaagctaaagcactgaaaagacgagaagctgctgctaagcgtgagagggcaatggcatatgctttgactcatcagcggcaagctggttccaagcaacaaaattctttgagcctgcaaggtcttgaacttggtgagaaccactgggagtcaaattggttagacaggtggatggctgtacgtccatgggagaacaggttacttgactgtaatgccaaagagagtctgccaacgcatgaagataaggatgaggaagcaaattctcagatcacaccaaagggtaaagtgtcaacttcaaatactcctggtctgagcaagaagaaaggtgttaaccacaaaaagtcatattcagatgttagttgtacttcatttgcacgaccagcaaatgtattaccatccacatctttaggatcatccaaacagaaggcaaaggctgtgggtgaagtttttgaggaagtcagctcccagccaacagatataggttctaaggatgtgcacaattcaaaagataagcttgtgcaagtgaatggaccagccaagaagcggttatccctcccaaataatgttggcagagaatcagggaagggaccaacccgcaggaattcgcttaacaggtctgctccaaaagcacgggcggactctcctaaccagggtgatgagttagaggcctgataacacattcctccaatttgacgtcggcaagccatcctaaagtgtgcttctccaggttgcccataacgtaacattcccaaacgatatcatgcagctagatttgggttgtgattcatatttctgttgtgtaatgctgtggtgtgttgtgccttgtgtggccttttattccgcatcgccaattttcttatgtttccagcttccctgtaagttgttctaactgctgaaactaaaagaaggaaatgtgctgtattgtgtttatgtgttgaagtttctcgggaacttcgatcctgcttttgcagttgcagaacaccatcctctgattgtataccttcgagtgcaatcattcaggtcaaatatgcatgatcctgatttgtttatgtatgattggtcgtaaaagtgagggtcatgtggtctgtaaactaccaaact

SEQ ID NO: 3448 - DNA, 4055 bp, Zea Mays
ctggatttcagtcgtctgatatactgagacttagtagtgctgatccagtgaacctatccacaccaacttgattacagtctctctgacacaactatggcgccctctgccgctgccccaggcatctctgaggctgagggggcaccacgcatggccaagttcctctgcagctttggaggtagtatccttccccgaccacttgatggctgtcttcgatatgttggtggcgagacaaggattgtcatattgccgcgtgacatatcatatgccgacctagctgcacggatgagagatctctacaaggatgctgataccatcaaataccagcaacctgatgaggatctggatgcgctggtctcggtcgtgaatcacgatgatgtggtgaacatgatggaggagtatgacaaagtcactgccacaggggaggcgttcactcggctcaggatcttcttattttctcagcaattggatgacaatgctgcatcagtggctgtgcattacaatgtagacgagcgggaaacagagagaaggtatgtagatgcgctcaacagccttggtgatgttaggtcaccttcctcccctgtatctgtggagcagctttttggcatcggaggcaatgattcaggaattcctgattttgctggcttgagacatttgaatgtccctcgtccatcacatggtcagaggtatggagagatggattctccttggagccctgcttatgtctcaccaagccagtacagagtgcatgacccgagggattttccaatttcaccgtcatctgcaaggttccaagtaggagcggaggattttgatgacaggattcctgacgactttgtaaggcagtcaccaaaatatcattattatgaggctcaatcaccatcacatatggataatttagtctggcttccacctggtgctgtaattcagcaaaatgcaggtttccctggtgatttgagcaagcacaataaatttttggatgggaacagtggatgtgatcactgtggttcactattccacaagggtcagggttcggtgactgatcctatctatatgaatcctcgttggactcggccagtccaacaacattttgaccaaccaagcatgattaatgattatcccggtcaccatgctaattcttgtccagattactgccgccctggtgagcattatgcgggaggtcaagatgttagattggaaaatggtgtttatgttaaagagcaaaatggtggtcatactcccatgctttataatgagtcacgtcctcacgatagagtctggtatgcgcataccaaccaaagtcatcagcggtatgaggatccaaggctgcattatcctactaatgatagagtgatcgagccatacattgtcgatgctagctctgtaaattccgcatttgcaccaaacaaagtatatgaaatgcattcagcatctcttggtcattctagttctagccatgaaagtcctcactattttcatggtagcagtgagctcataaatgacgcatatcacaaccaacaagttggaggcagtgggtcatatgtgcagccagcagggtctgaagaatcccctggtcagcattacaaccacttttcggcctatggtgcagattccttttatcaaatgcaacaaaatttgccacccattcaatctttgaggaggagagcgaacagtcctgttcacactgcctcaccatatgattccccacacctgccaataccaaatgggagcattaacatgaattctgttagaaatacaggtgatgcgagtcccaggatagcaggtcttattggatatgatcgaatgccaaacccatttactccgcccaatggcagcatactatatagagttggtgggcatgatgttcctgcagctatggagaacactagtgcttttggtcctaggtctaatccaactgctgctcagtatgttcagccttttattgctcctgaatcaatccagcatcaacctggagttcccttgagggaggtttatcctgaaagagcataccctgaacccatgccgtcatcatatgctgatggcaaagtagctgtttctgcattgcccctcaccgaccaattattcaggttggatataaacacaatgaagaaacttgaaggacaagatgatgggaactctactcgaaatgtgaatgaaacaactcttttgcatgctgtggatgaaccaagtaccttaccccaccatgttggatctgtacatgaagtcgatcctaagcaggagaagctaaccgaaaaagaaagcaggcaaaagcaacatgaagctggggctacagcactgcaggaatgtgaggatatttcagaggatatgttgaatttccttcctgaattaattgcctctgttaaaaaggtaacactggaagatgctgctgagacacaaatagcccaatcagatgctaatgctgctgtttcacctgttcctgatgatgacgataatggaaagaagctggatgaggcaacagctggtaatacaaatgcaaatcaggaccttgatttgcaaggaagccttgatcggcagaagagtttcaagattgagtctacaactgctgaagctgaagctttgtcgaaaggactacagactataaaaaatgatgatttagaggaaattagagagctgggttcaggtacttatggggcggtctatcatggtaaatggaggggatgcgatgttgctattaaaagaataaaagcaagttgctttgctggaagaccatctgaaagagagcgtttgatcacggatttctggaaagaagctctgatcctaagctcacttcatcatccaaatgtggttgcattttatggtgtagttcgtgatggtccagatggaagcttagcaactgttactgagtttatggttaatgggtctctcaaacagttcctgaggaaaaaagacaggacaatagatcgccggaagagagtaatattagccatggatgctgcatttggcatggaatatttgcacgggaagaatatagtccattttgacctgaagtgtgagaatctactggtgaacatgagggatccacagcgaccaatctgcaagatcggtgatctcgggctatcaaaggttaaacagcatactttggtatctggtggtgttagaggaaccttaccgtggatggcaccagagcttctgagtgggaaaaacaatatggtgtcagagaagattgacgtctattcgtttggaattgtcatgtgggagctgcttactggggaagagccatactctgatatgcgtgctgctgaaattattgtgatccagcggagagaccgtccttcactgatatatctcaaaggttgaggaaaatggccgctgcaatgaatgtgaagtgaaggttcggaagccatatttgtcttgtaagtgttcccacatccagtataagtgattacaagaggaaggtagagttcaaacaggattgatttgagtaaatatgcccaaaatgtcttggcagcatctcagtttaccctactccaagtgataattttattatgtcatggagattccaaagcatgtttgatgcgagccagctgttgggtttatttactccttgtatgaccattagtaaaagggaaaactgacgtttctgcttacctgtttcaggattttccttagtcctggagtaacccggctgtcatttgccttgtgtcgaaaataagtatgctataaagcgttctgtcttgatgggaactgttgggctgtaattgtaaataagttttgacttgcttcatcttgctgtgcaaagtagtaattaataggcacgatcaaagctgggcacagttatcttttccccccatacaaaagtgtgtcctaggactaggaggagagatggatcgaacacgactagagctgtacatagtatactgtttgctctgtatataatcatcacttcctatttgaatgctcataagtttgcacagtcccttgtggtcttcctgttgagtcctaatcgaccagggtgattggtgaagccactgtctatccgaagagaccattgagccacggtgccacttgcatgacattgctgtgttccattgtttacc

SEQ ID NO: 3449 - DNA, 4409 bp, Zea Mays
gcgtgtgccgccgcaacacccaggcaagcccgagaccaaaaataacagaaaggagagccgcgtgtcctcccagccactgccacccttccccacctatcgatctcgagttctctcgaccccacccgacccggagccgcaccgcctcgacccagaccggcgccgacgagccccagcgcccaatggcggcggctttcctcgccctggaggcccgcgtgacatgatccctgtcccccgaggatgggaatatcccccctccaccctcccttctcgactcttcctcgggtctctccttctccaccgcctcgcgctccgcaattggctgctcgtgctcgcgtggccccggatcgccgccaggtccgggaacaagaacaaatgttgcaagaagacatgaaatgggaaagaccgagagagcaagagggaaagataccgtggattggttgggcggtggccggtgctgcagctcatggaacttgaatggaagtagctaattggtgctgggcataggacttgctggatttcagtcgtctgatatactgagacttagtagtgctgatccagtgaacctatccacaccaacttgattacagtctctctgacacaactatggcgccctctgccgctgccccaggcatctctgaggctgagggggcaccacgcatggccaagttcctctgcagctttggaggtagtatccttccccgaccacttgatggctgtcttcgatatgttggtggcgagacaaggattgtcatattgccgcgtgacatatcatatgccgacctagctgcacggatgagagatctctacaaggatgctgataccatcaaataccagcaacctgatgaggatctggatgcgctggtctcggtcgtgaatcacgatgatgtggtgaacatgatggaggagtatgacaaagtcactgccacaggggaggcgttcactcggctcaggatcttcttattttctcagcaattggatgacaatgctgcatcagtggctgtgcattacaatgtagacgagcgggaaacagagagaaggtatgtagatgcgctcaacagccttggtgatgttaggtcaccttcctcccctgtatctgtggagcagctttttggcatcggaggcaatgattcaggaattcctgattttgctggcttgagacatttgaatgtccctcgtccatcacatggtcagaggtatggagagatggattctccttggagccctgcttatgtctcaccaagccagtacagagtgcatgacccgagggattttccaatttcaccgtcatctgcaaggttccaagtaggagcggaggattttgatgacaggattcctgacgactttgtaaggcagtcaccaaaatatcattattatgaggctcaatcaccatcacatatggataatttagtctggcttccacctggtgctgtaattcagcaaaatgcaggtttccctggtgatttgagcaagcacaataaatttttggatgggaacagtggatgtgatcactgtggttcactattccacaagggtcagggttcggtgactgatcctatctatatgaatcctcgttggactcggccagtccaacaacattttgaccaaccaagcatgattaatgattatcccggtcaccatgctaattcttgtccagattactgccgccctggtgagcattatgcgggaggtcaagatgttagattggaaaatggtgtttatgttaaagagcaaaatggtggtcatactcccatgctttataatgagtcacgtcctcacgatagagtctggtatgcgcataccaaccaaagtcatcagcggtatgaggatccaaggctgcattatcctactaatgatagagtgatcgagccatacattgtcgatgctagctctgtaaattccgcatttgcaccaaacaaagtatatgaaatgcattcagcatctcttggtcattctagttctagccatgaaagtcctcactattttcatggtagcagtgagctcataaatgacgcatatcacaaccaacaagttggaggcagtgggtcatatgtgcagccagcagggtctgaagaatcccctggtcagcattacaaccacttttcggcctatggtgcagattccttttatcaaatgcaacaaaatttgccacccattcaatctttgaggaggagagcgaacagtcctgttcacactgcctcaccatatgattccccacacctgccaataccaaatgggagcattaacatgaattctgttagaaatacaggtgatgcgagtcccaggatagcaggtcttattggatatgatcgaatgccaaacccatttactccgcccaatggcagcatactatatagagttggtgggcatgatgttcctgcagctatggagaacactagtgcttttggtcctaggtctaatccaactgctgctcagtatgttcagccttttattgctcctgaatcaatccagcatcaacctggagttcccttgagggaggtttatcctgaaagagcataccctgaacccatgccgtcatcatatgctgatggcaaagtagctgtttctgcattgcccctcaccgaccaattattcaggttggatataaacacaatgaagaaacttgaaggacaagatgatgggaactctactcgaaatgtgaatgaaacaactcttttgcatgctgtggatgaaccaagtaccttaccccaccatgttggatctgtacatgaagtcgatcctaagcaggagaagctaaccgaaaaagaaagcaggcaaaagcaacatgaagctggggctacagcactgcaggaatgtgaggatatttcagaggatatgttgaatttccttcctgaattaattgcctctgttaaaaaggtaacactggaagatgctgctgagacacaaatagcccaatcagatgctaatgctgctgtttcacctgttcctgatgatgacgataatggaaagaagctggatgaggcaacagctggtaatacaaatgcaaatcaggaccttgatttgcaaggaagccttgatcggcagaagagtttcaagattgagtctacaactgctgaagctgaagctttgtcgaaaggactacagactataaaaaatgatgatttagaggaaattagagagctgggttcaggtacttatggggcggtctatcatggtaaatggaggggatgcgatgttgctattaaaagaataaaagcaagttgctttgctggaagaccatctgaaagagagcgtttgatcacggatttctggaaagaagctctgatcctaagctcacttcatcatccaaatgtggttgcattttatggtgtagttcgtgatggtccagatggaagcttagcaactgttactgagtttatggttaatgggtctctcaaacagttcctgaggaaaaaagacaggacaatagatcgccggaagagagtaatattagccatggatgctgcatttggcatggaatatttgcacgggaagaatatagtccattttgacctgaagtgtgagaatctactggtgaacatgagggatccacagcgaccaatctgcaagatcggtgatctcgggctatcaaaggttaaacagcatactttggtatctggtggtgttagaggaaccttaccgtggatggcaccagagcttctgagtgggaaaaacaatatggtgtcagagaagattgacgtctattcgtttggaattgtcatgtgggagctgcttactggggaagagccatactctgatatgcgtgctgctgaaattattggggccattgtaaacgattccttacgccctcaaatcccttcatggtgtgatcctgagtggaagggattgatggaaagctgttggtccagtgatccagcggagagaccgtccttcactgatatatctcaaaggttgaggaaaatggccgctgcaatgaatgtgaagtgaaggttcggaagccatatttgtcttgattttccttagtcctggagtaacccggctgtcatttgccttgtgtcgaaaataagtatgctataaagcgttctgtcttgatgggaactgttgggctgtaattgtaaataagttttgacttgcttcatcttgctgtgcaaagtagtaattaataggcacgatcaaagctgggcacagttatcttttccccccatacaaaagtgtgtcctaggactaggaggagagatggatcgaacacgactagagctgtacatagtatactgtttgctctgtatataatcatcacttcctatttgaatgctcataagtttgcacagtcccttgtggtcttcctgttgagtcctaatcgaccagggtgattggtgaagccactgtctatccgaagagaccattgagccacggtgccacttgcatgacattgctgtgttccattgtttacc

SEQ ID NO: 3450 - DNA, 3158 bp, Zea Mays
ctgggacccaccgtacccaccacaacaattttccatcccaaccgcgatctcgttcttgtctttctcactcaccgtgcgcggcggcagctttgcttcttccaccactgaccagcgggtcccgcctcgccggtggagttttcagggagcttcttctgcccgccggcgcgatgatcctgtcggcgctcacgacgtcggtggggatcaacctggccctcaccgtgctcctcgccgcggcctactcgttgctccgtcgcaggccaccgtacgtcgaggtgtactccccgcgccggccctacgcgccgctcgagccgtggctcgctgcggcgtggcgccgtgccgaggaggacatccacgccgccgcggggctcgatggcgtcgtcttcatccgcatcttcgtattcagcatcagggtgttcgcggcggccgcggtgctcggggtcggcgtgctcctgccggtgaacttcctcggtgaccagctgcgggagatcgacttcaccgacctgcctaacaaatccatcgatctattcagcatctccaacgtccaggacggttccagcaagagtacaaatatatctctggcaagaggctagagtattttatgatctcaaagccattacctcagcacttcacagttcttgttcgagctattccagtatctgatggtgtttcagtgggtgatgctgttgataagttttttaaagagtatcatgcatccacgtacttatcacacacaattgttcgtcaaactggcaaacttcgccgtcttctgaacgatgctgagagtatttgtacaaagcttaccaacttaaaccatgtccgacggtcaactggagatcctccaagaaaacttggattatttagcagaaatgatcttgttggagaataccagaaaaggctggaagaccttgaagagaatgttagaatggaacagtcagatgctactaggagacaggaaattcctgctgcctttgtttcattcagatctcgatatagcgctgcaaatgcagtttacattagacagtcagacaacccaactgagtggcaaactgaggaagctcctgatcctcatgacgtttattggcctttcttttctacatccttcatggaaagatggattgccaagtttgtagtatttgtagcttcagttctcctgatacttgtctttctcctagttgtggcatttgttcaaggactcacctatctggaacaactagagaagtggttgccttttctgaggaacatactggaaattgctgttgtgagtcaactggttacaggatatcttcccagtgttattcttcacgttctttcatcttgtgtgccctcaataatgaagttattttcaactatgcaaggatttgtttctgttagtgggattgagcaaagtgcttgcaataagatgcttcggtttacaatatggactgcgttctttgccaatgttctcactggttcagccttagttcaattcgagattttccttaatccaaaggagctaccttcaaaacttgcagttcttgtaccagcgcaggcctctttctttattgcatatgtggtcacatcgtggacaagcataacatctgaactcactcaaattactgctcttttctgtcatctgtggggaaagtgtgcgaagtgttgcaagcgggattactccaaagctccatcaatgccttattatagtgaaattccacggattctcttgtttgggcttattggactcgcatattttattgtagccccccttatcctaccatttgtattggtctacttctgccttggctacttcatattccgtaatcagctttttaatgtatatgcgccaaagtatgatactggagggaaattttggcccgttgtgcacaacacaacgatattctctctggttgttctgcatataattgctattggagtatttgggataaagaagcttccccttgcgtccagtttgctacttcccctaccaccgctgacccttctgttcaacgaattctgccggaacagatttctgcctatctttgaagcatactctaccgagtcattgctaaagaaagatagagaagaacagagcaaaccagatatggcggagttcttcagtaatcttgtaacagcttactgtgacccagctctgaaacctttccaacgggcttctaactccgacgaacgcaccgcgccgctcttggcctctctgtctagctccagataagctgtggatggcagctgactccgctgtgtgaatttcgatttgattttggtgtttagatacggctagtagcataggtataattttatgctacattgtaagagtagaacttttgacagacatatagtttcttattgttgttgtctgttgtgcaattttttgcccttctggtgtgggggggagttcgttgtacatatgtgaatgtacatgatattttgtgcacttctcagagatgaattgctcgttttatgatgtgttggcaacgcaaacttatgcatcgttcgttcatgggttgtacggtaaactgcttgtaccttcagaattttcatcaacttcatttttaattcgagtaaactgctatgcatgtgaacatgtgaaccttttgcttcggttttcacattatgcatcctatgggcttgtttgccatttggagcatctgtgatgacgagcaactgctttactctatttatttgttttctttgtgctctacttgacatttttttgggaggccactatcatatagctgtcgctgtcaaagggttttgttttctgaaatctcaaatggtgtgagaaaatcatcacgtggaagcctgtcagcctgtggcgttgctacctggtttatatacgctgagaccattagacgcgctagttacactgactctactctgaaagtgtctcccgccgctggttgtttacctggttttaaatgtgatccaaaaagattcgcttgcacagctcgatcctctgagaacgacagcaggtgatacattaaaaattactacctccgttttcaaatattacctccgttttcaaatatttgtcgtcagatagttcatttttaactaaataacgacagataaaaaagaacggagagaataaataaaaaagaacggaggaagtatatcactgtactgattttacagcaggtaatccatcaacttttgaaaaaaaaaacaca

SEQ ID NO: 3451 - DNA, 901 bp, Zea Mays
ctggctgcaaacaagagatgctggactgctgacaggcttgcttagagagggaactgctgatgaagtggtggattggtctcatggtaaacaactttgggaactttgcaaagacaagtatgagcccttatggctcaggggaggaaagcactgtgatttggagctctttccggaatacatccggcacctcaagaattttttccactcactagagaaatcgccatcccataggcaagcatggagggagaatgtggaccggattgaaccctcgcggaagagcactgatttctttgaaccctcgcgaaagagcacagaccaaaggaaaaaatcaaggtcaactcgagataagacgagaaacactgaacatagatatagcaacgtcgagaaggtagacaagctaaagatatcatttgatcagttcgagaaatccaggagaagtgttgatatcttcgagaggccaaagaggaacattgagcagctggattgtggccggaagagtgtcgacagattggacaggatctgggctagttaattcctttctttcacatgatatacaggttgggcttcggttgttttgggggattttacaggtgtggcgttaagagttgattcaccgacactaaaggagccaagcgtcgttgacgaggcttcgtgtagatgtgatggcttgtgtggtgggagaagtgtatgttgttggtcttcaaaaaaattgttatctggtcttaaactaaatgacactggggaggagtccatggcagcattgtgtataatctaatgctttggatcaacgatgtttttttcttctatttcattgaatcgaacttttccttccatggatattggctgtgtatggattttacggaccgtgaagttaaaagaaaggtgaattagataacttacaata

SEQ ID NO: 3452 - DNA, 3643 bp, Zea Mays
tcaactccgtagggataccctggctgtgcctggtgcctgcccgccgccgccgtcctgcccacccgcccacctgcacgcacccagatgccacctgccgctgccggccgccactgctgccggcggccacgtccgcggcgctgaccaccgcccgcctcgccatgccccgcatcctcctcgcccagttctcccgccgccggctccacgctcacctctcgcgtcccctcgccattctctcgaacgccttctcggcgtccgccgcctcgtctcggccgcgcccgccgccgctcccgccactctctccgctgctcccagcgcgccccgaggacgcgcgcctcgtagccgcgtcctcgtccgccatcgccgccgccttccacgactggttccacgagtcccgcaactccgcttctgcgccgacaccgcccaaggcgctcgacgcgatctacgaggcgctcgcgtccgatgagacggccccgctagaggcgctcccgctctcggagacgctcgtcctcgccgtgctccgccaccatccgagggggttccacaacgacgccgccctgctgctgctccgcctcaagttcttcgactggtcgggccgtcaccggcgctaccaccacacgcgggccgtctaccacaccgtcttccgcctccttagatgcgcgcgccgcaatgccgtccttctcgattggctccaccgcttcttcgacacctccgcgagaggcggccacctgcgtttccacgacacgctcatcatcggctatgccatcgcgggcgacccgcagcgcgggctcaacatcttcggccgcatgcgcttccacggcctcgaccccgaccccgtctcttcacgtatcctcctcaactccctggtcgatgcgtcgatgcacgatcttgccgagtccttcgcccacaaccttgcccccagccccgtcgctacaagcatatgcatcaagagcctctgtcgtcgcgcccgcctcgacgatgccgttgctctcctcgacaccatgccgtttgctgatgcatcccgtggcccggcggctggctgcatcctcaccgagttctgccgccgtggacgttttgcggaggcaagcgagctcgttagtaagtttccatccagtgatgtgtatggtgcgtggatcaatggactctttggtgctggcgagcttgatgctacgatgaagttcctctctgataagaaggaaagtgaaggctacatccttgatgggcggcggtgtgacagccttatttatcgcttgcttgtcaggaacagacttggcgaagtgtatgacttgcttgttcaaatgatggaggagggcattgctcctggcatacgcaccatgaatgctgcgctttgcttcttttgcaaggctggtcttgttgaagtagccatggatttgtataggtcgagagtggagctcgggatcaacccaaacaaagatgtctaccataatctgatcaaggcactgtgccatggtggggagacagaggaagcatgcctggtatttgaggaaactatggaaggagggtacttcccggggcgtcggacatttaccatgctttcaaacgtgctgtgtcaggaggggaagctggacagggtgcgggagctgctaaatagggcagtcaagcaggaagcctgggcagttgactctgttttggccaagtacctcgcggcactatgcaagagtgggaacatggaggcggcatgcgaactgcctcatgtagcaagcagcaagagccatgtgggcttatatcgctatgagtcaacatacaagaacctgattcgagcattggtattgactaagagggtggacgcgctgccaaggcttatactgcaaatgcaagaaatggggcacatcccaagccggagcctctatgtgtcagttgtctgttctttgtgtgaaatgaataggtatgccgaggttcttgatctgttagacaaccagttaatgcggaatgagatccatcccgttgtgtgctacaaccacttcatttctggtgctggtcatgctaagagggcagacatggccaaggcgatatatgaccgaatggaggcttcagggattgaaccatcaataacaagcaacgtgcttcttctcattagttatgtaaggagcaaaaatctcgggggtgcacttaatttttttaacctcgttcgtcggaagaaaacaccttgtgccaggttatataatgtatttatatctggcctatgtgaagttaggaagcctgagcaggcaatgatgttctttagggaagcaagggataatggtataatcccaagcatgtactgctacgagaatcttcttctcttgctgtgctctgttagcgattataccaatgctgtaaaggttgttgatgatttcagagaaacgggtcgccctgtttcagctttcttgactaatgttcttctgttgcacacattgatgggccacaagcttctgcaggcttttttacgttcaagagataaatcaaagcctctagaactgaaaggtgaagatatccaaggtcggaaggcaggaaggctcttgattggtgatctagttgcctcgtttgcaagtggtatcagaaacatgagtgacttagagcatttgggagaggagatggaaaagtattttcctgttgatatttacacttataacatgctgttacgagggttctctatggcaggaaggatggactctgcctgtaggttgtatgaaaggatatgcaggcaagggtatcaaccaaatcgatggacttttgatacaattgtgcatgggttctgcaagaatggtgacataattgaagctcagaggtggatggatgcattgtatcgaagtggtttctatcccacttggtacactatgagggtatacaacaatttgttgttgcgagcacaagacaagaagatcatttctttgtatgagtaacgatatctatttcatattcgactggtggtctgctctctgccttgatcctattatgcagctgacacaggcattctcttggaagatcaaatatactcttcgtagacatgtactccaagatttaacacttctttttaaggaagcgcatctcatctatcatcacctgatgtctgggatgcttctgggatatcagtttacgtgtagcatggagttctcctttgactttgatgtatctatcagtggtactcaatttttgcgaaaaggtcctctaatgtaatggttaagacttccgagcagcacttataggtctcgggttcgatccctcttgagaacgaatttcgggcttagctaaaaaaaatctcctctatatgtcccatccgctctcggagatcgatatcaaacgcgtcaccctccagctgggccgttgtagagtgggcaattgatcagcccgttagtgatggagggcagagtttgagggttttctcggtcgggatcatgtactgggagaacggtctttccctcctctgccgagtttttttagttctcatttttgctgtagaattatacattgtgcctgaagtttcaaggttcctggcattcaatattttgcgagtgtttattcatatggagtactagattatagtaagaatggtcaagcactgtaatagagtcaattgtccgatgcgtatagcagaatacgtggatccatcgtgtagcccgaattcaaagattcggggcctgatatg

SEQ ID NO: 3453 - DNA, 688 bp, Zea Mays
ggtaaattgtttgccgtggaagcatatatagcatctgggtcatgtttggcattgggtcgaagaaatcggtgggcatgaacagctaaatgagaagcttcttaagcgaaagaaaggcgaggagcttccaacgtttatacccccaaagccaacactggaagcattgattgagtcagggtactcgctggtgaaggagcaggaactaataatgagctccaagctttcaaaagagtatatgaagaacttagaatagtttgatacacgagaaggggtaacttcttgttttcagtttatttggagcaataatacaccatccaatttgttccaacatccaaccaccggagtcgaatcgatgcttcgattgtcccagaaatcgtggtgggttcagatatgaactgctgaaaggaacgcatatcgtcattgtccttaattactctcatcgtgcattgccaaaaagtctttgggttgactcgaaagacttgtgagctgtgccacggagtggcccatgtatgtatgtatgtggagcgagcggaagcgtccaaagagcctcatcagtcctccttctgacacacagtttatacctgcaagatcgctgattatttctcgacatgccatgctgccacggccttgcgcttgtgcaggttcacatcgcgatagtcaatagtactggaacaagaaatctgcagaaatc

SEQ ID NO: 3454 - DNA, 2026 bp, Zea Mays
gagcccagtccgcccgggacgcgtcgcgtctacgtgggcacgcggtcagacgtgcagtgcagagaccacgaaacggatcccctcgagtcgagcgaaccgaagccgaacatacccacccatcgtctcgtctcgtcgctcgtgggcgtggcgctctctccccccacctcctcttttaagacgacgccatcgccagccggccctccctcgccgtccggcgccgtcctccttccctctcatcacagtttccacctcgcgaggggctcgcgcgcgtgcccatcccggccgatcgactcacgaattcgcgcgcgatcatattcgtgcaagggcatccccgcacgggcacggccggaagcacggaatcacttccccggccgcccccaattcccgggctcctcggcgccgatccctcgccggtgttcgctttccggcggtttccgctgcgtgtcgcgggcaggcgcaagcggcttggctcggctcggctcggttgtttcctcctcgtgccatccatggaggcgaagcagcgcccgcggcacggcggggagaggaggccgccgccggcgacggacggcggcgaggagtacgacccgtggacggcgtggctctacaagccgcgcaccatctcggtgctcctcgtcggcgcctgccttctcatctgggcaagtggagcacttgatcctgaaggtactgccgctcacagtagcgtgacatcaatcaagaggggtgtctgggctatgattgcagtcttccttgcctactgcacgcttcaggcaccttcaacgatacttattaggccccatcctgctgtctggcgcctggtacatggactggctgtcgtttacctcgttgctcttacctttcttcttttccagaaccgtgacgatgctcgccagttcatgaaacaccttcacccagatcttggagttgaattgccggagagatcttatggagcagattgccgcttgagacattgtttgatgaatttgttgttgcccatatccttgggtggtggggcaaagctgtaatgatacgaaatcaacttctactttgggtcttgtcgattggctttgagctaatggagctaacgttcagacatatgctgccaaactttaatgagtgctggtgggatagcattatcttggacatattgatctgcaattggtttggtatttgggcaggaatgcacacagtccgtcactttgatggcaaaacttatgaatgggttggactgagccgccaacgaagtatcatgggtgaaaagatcgttgagccagttcactcctgctcaatgggacaaggatcagtggcatcctttcatggggccactgcggttcatccaagtgctgttcctctgcgttgtcttcatgaccgtggagcttaacacattcttccttaagttttgcctttggatccctccaaggaaccccttggtcgtgtacagattgatcctctggtggctgatcgccatcccaaccatccgcgagtacaactcctacctgcaagacaggaaaccggtgaagaaggttggagccttctgttggctctctctagctatatgcatagtggagctgcttatctgcatgaagtttgggcatgggctgtttcatgacccgatgcctacctggctgatcatcttttggagctcggtcgggactgcactcgtgattttcttgctttcgtggtcatggaggagtcaccaaaggttcaggagaaagcagctctgattgtttcagtttgctacttttctttttcgaattttatataggcgttgtacatatttgatatggtttgtgatgtaacttacgttttaggggtggccatttttctgctgcccctggcaggaacttggtttgtcacgatagatcatgcattgttgacaacatgagattgattaataaattgaaataaccgcgacatcataaccagttgtaattaattattaaagcaaggtcactgcatattttggttccaaactaattctgggccaacaatgcacagttctgtaatacgaatgaccaatcattatctt

SEQ ID NO: 3455 - DNA, 1057 bp, Zea Mays
ctacacatcccaaatcccccaaccctaactaatccgccgtcacccctcccggatcgccagcaggcctcatcccttccacagttccacggctacgccgccgtcgtcggctcatccctcctccccctcccgcccgcagttccaggtggtgcacccctcgaccccatcagactcgatctgtcgtttcctggctcccttaggtcccctcttcgccaccactccgccgcatgctccccaaatccgccgctctatgggtgcatcaggtctcgctgccagttccaatggagggaataaatgggcaaaggcggccaacgaggaagctacgatgacggtggtggctgtggagtcagatgagcctaggacagaatcgccgttggagcggggaacaatcatctacaacctcctcgtcacgctcccctttccctccggcctgatctcgcgcctccgccgtgcattcctcctctgccgcttcaccaccgacctggtctctagatcctccctccacatgctccaactcctggtacaagagtgcctgaggtccgctatcgacctgagctccgctcaggtcgccgctaccactgataatcggcctccagcccactgctttacttttggcgacgagtcgacgactgggcaactaccgctgcccaaggtcaggtgctcgagtatccgtcgaccccttcgctaggccattcccgttgacagcaagcatcagttcaataattccaataaggatctcaagacctacagctggggaatgttatttgacaatggtttcaagttgaccaaacagagtggatacagtcatgctcaaagttggcaagctgtgtcaacaagcaggccccatctgctactcgcttcatgggcatgcaacaaagccttggtattcagccgacgcagcttgggaaggatgcacctgcagcaggagttgcacgtagagttagtgcttaatgaaagatgatcgaggttgagtctgttgcagctgctgattaacaagagattcgagaagtagtgaagaagtgattctgtgctgaggcactgcattggcgtactggtcata

SEQ ID NO: 3456 - DNA, 1345 bp, Zea Mays
ctacacatcccaaatcccccaaccctaactaatccgccgtcacccctcccggatcgccagcaggcctcatcccttccacagttccacggctacgccgccgtcgtcggctcatccctcctccccctcccgcccgcagttccaggtggtgcacccctcgaccccatcagactcgatctgtcgtttcctggctcccttaggtcccctcttcgccaccactccgccgcatgctccccaaatccgccgctctatgggtgcatcaggtctcgctgccagttccaatggagggaataaatgggcaaaggcggccaacgaggaagctacgatgacggtggtggctgtggagtcagatgagcctaggacagaatcgccgttggagcggggaacaatcatctacaacctcctcgtcacgctcccctttccctccggcctgatctcgcgcctccgccgtgcattcctcctctgccgcttcaccaccgacctggtctctagatcctccctccacatgctccaactcctggtacaagagtgcctgaggtccgctatcgacctgagctccgctcaggtcgccgctaccactgataatcggcctccagcccactgctttacttttggcgacgagtcgacgactgggcaactaccgctgcccaaggtcaggtgctcgagtatccgtcgaccccttcgctaggccattcccgttgacagcaagcatcagggtttcaagttgaccaaacagagtggatacagtcatgctcaaagttggcaagctgtgtcaacaagcaggccccatctgctactcgcttcatgggcatgcaacaaagccttggtattcagccgacgcagcttgggaaggatgcacctgcagcagatgattatgcagcagaaaaacttgatattgagctgagtggaagttacctgttaccaccacgttattctaagggtgcattgttctgccagctgtaggaataggaatcataaaagcatatggaggaactacgtataggctacaaagaagcataagaagcatgtttatagcagaagcaaagtgttctgatgattttgttttttcaattgtgttttctgttattggttcagtatgcacatatattgacatgatttatggcatgacatctgccatctttgttatatttatgacatcgttcttgattgatgtgtgcagacatgaatgatggatcttttttaacatcctgaccatcattatcgtattttgtatatcatttatgggttcacagatatgaaatgacaggtttcttatttttgagatctgaaccatgtgttgccttttggttgttacataataaatggtcctgtcgatgtgctttacgtt

SEQ ID NO: 3457 - DNA, 1630 bp, Zea Mays
atcgcccattcggtccatgaccgaatccaccagcccactacacatcccaaatcccccaaccctaactaatccgccgtcacccctcccggatcgccagcaggcctcatcccttccacagttccacggctacgccgccgtcgtcggctcatccctcctccccctcccgcccgcagttccaggtggtgcacccctcgaccccatcagactcgatctgtcgtttcctggctcccttaggtcccctcttcgccaccactccgccgcatgctccccaaatccgccgctctatgggtgcatcaggtctcgctgccagttccaatggagggaataaatgggcaaaggcggccaacgaggaagctacgatgacggtggtggctgtggagtcagatgagcctaggacagaatcgccgttggagcggggaacaatcatctacaacctcctcgtcacgctcccctttccctccggcctgatctcgcgcctccgccgtgcattcctcctctgccgcttcaccaccgacctggtctctagatcctccctccacatgctccaactcctggtacaagagtgcctgaggtccgctatcgacctgagctccgctcaggtcgccgctaccactgataatcggcctccagcccactgctttacttttggcgacgagtcgacgactgggcaactaccgctgcccaagttggaggtgtccatcctgcgacctctggtttggtctgggatggagcacccatctgtatttgatagattcaactatgatcgcgcatatgctccgctttgtaaacacgtagaccaccaatcctacattccagggtttcaagttgaccaaacagagtggatacagtcatgctcaaagttggcaagctgtgtcaacaagcaggccccatctgctactcgcttcatgggcatgcaacaaagccttggtattcagccgacgcagcttgggaaggatgcacctgcagcaggagttgcacgtagagttagtgcttaatgaaagatgatcgaggttgagtctgttgcagctgctgattaacaagagattcgagaagtagtgaagaagtgattctgtgctgaggatgattatgcagcagaaaaacttgatattgagctgagtggaagttacctgttaccaccacgttattctaagggtgcattggcactgcattggcgtactggtcataaaaatgattgactccagataataagttctgctgcttcaaattcagttctgccagctgtaggaataggaatcataaaagcatatggaggaactacgtataggctacaaagaagcataagaagcatgtttatagcagaagcaaagtgttctgatgattttgttttttcaattgtgttttctgttattggttcagtatgcacatatattgacatgatttatggcatgacatctgccatctttgttatatttatgacatcgttcttgattgatgtgtgcagacatgaatgatggatcttttttaacatcctgaccatcattatcgtattttgtatatcatttatgggttcacagatatgaaatgacaggtttcttatttttgagatctgaaccatgtgttgccttttggttgttacataataaatggtcctgtcgatgtgctttacgtt

SEQ ID NO: 3458 - DNA, 1637 bp, Zea Mays
ctacacatcccaaatcccccaaccctaactaatccgccgtcacccctcccggatcgccagcaggcctcatcccttccacagttccacggctacgccgccgtcgtcggctcatccctcctccccctcccgcccgcagttccaggtggtgcacccctcgaccccatcagactcgatctgtcgtttcctggctcccttaggtcccctcttcgccaccactccgccgcatgctccccaaatccgccgctctatgggtgcatcaggtctcgctgccagttccaatggagggaataaatgggcaaaggcggccaacgaggaagctacgatgacggtggtggctgtggagtcagatgagcctaggacagaatcgccgttggagcggggaacaatcatctacaacctcctcgtcacgctcccctttccctccggcctgatctcgcgcctccgccgtgcattcctcctctgccgcttcaccaccgacctggtctctagatcctccctccacatgctccaactcctggtacaagagtgcctgaggtccgctatcgacctgagctccgctcaggtcgccgctaccactgataatcggcctccagcccactgctttacttttggcgacgagtcgacgactgggcaactaccgctgcccaaggtcaggtgctcgagtatccgtcgaccccttcgctaggccattcccgttgacagcaagcatcagttcaataattccaataaggatctcaagacctacagctggggaatgttatttgacaatatcgcgcatatgctccgctttgtaaacacgtagaccaccaatcctacattccagggtttcaagttgaccaaacagagtggatacagtcatgctcaaagttggcaagctgtgtcaacaagcaggccccatctgctactcgcttcatgggcatgcaacaaagccttggtattcagccgacgcagcttgggaaggatgcacctgcagcaggagttgcacgtagagttagtgcttaatgaaagatgatcgaggttgagtctgttgcagctgctgattaacaagagattcgagaagtagtgaagaagtgattctgtgctgaggatgattatgcagcagaaaaacttgatattgagctgagtggaagttacctgttaccaccacgttattctaagggtgcattggcactgcattggcgtactggtcataaaaatgattgactccagataataagttctgctgcttcaaattcagttctgccagctgtaggaataggaatcataaaagcatatggaggaactacgtataggctacaaagaagcataagaagcatgtttatagcagaagcaaagtgttctgatgattttgttttttcaattgtgttttctgttattggttcagtatgcacatatattgacatgatttatggcatgacatctgccatctttgttatatttatgacatcgttcttgattgatgtgtgcagacatgaatgatggatcttttttaacatcctgaccatcattatcgtattttgtatatcatttatgggttcacagatatgaaatgacaggtttcttatttttgagatctgaaccatgtgttgccttttggttgttacataataaatggtcctgtcgatgtgctttacgtt

SEQ ID NO: 3459 - DNA, 1290 bp, Zea Mays
aattctcttcaacacgcgcacatgtgacatgccccatggtcgccgccgctccaggcatcctcccgtggcctcacctccctctcccttcctcctcccacccgtctgacgcctctgacgccgccgcagcagcaacagacgccaacacctccgcgtatgacatccagatcttcgagcccacctccatcgaggagcgtcgtcgcctcctgatccagcggcgtcgcctccgactcgccgcctcccatgcctcgcggctcaccgttgcctcgcgcgtctcctccaaactcatcagcgccaccgcctcctgctccagcggcgtcgcatccgatctgccgcctcccctcctcatggctcgtcgttgcctcccgcctcttccccaacctcgcccttgccgcccttggaggatcccaaatccgacgacgagctcagtaggcccacgcagacgcggatgtgctatgaacttcaggctgatgtgcatttctgatatattgagctcaagcgtcagattctgtatcgatggcaatgggttccagaacagtacacaaggcaatttcaagacggttattcaattgctcaaatagttcaaatgtgatttgaagtattcaccttttgacatggataaacatcttctctctgttgcatttgcaggcgaaagaaggctcatgtgctgcttcgaaaatcagttctaagaaggcaaccagggacaacaaacctgataagggaagaaacatgttctggataaatattggcctttgtttcaagactccaagcccgccaccatccagggatcaatcctcaccacgaggaccaggggtgatgccaacaaggttgagaacaagtcaagagggtttgatttttgtcatgacttggatgatagatccgtgttacgataccagcatcaaagccgcctagaagcaatactgaactttcacttgagatgtgagtagttgtagtagtagcccaaactctggaatatagtatcatcattcctagatatgtagttgtaaattctctgcccagaggtttgagctatcactcagattatgggttcaatgtcatgtatagagtcaagaaaaaacatcttctgtgcgtcttcgagtctttcaaaggcaaaacaaattacacgcgcgctgacgcgcaccaatttactagtatatattcaggtacaaagtttgttccgatttctgtgaattgttcatgcagaactgggttttggtggtcatcacgaaagttgtagcaagttttctgcagatttccataatacacatgtttgcctcatttggggccagtgaa

SEQ ID NO: 3460 - DNA, 1304 bp, Zea Mays
aattctcttcaacacgcgcacatgtgacatgccccatggtcgccgccgctccaggcatcctcccgtggcctcacctccctctcccttcctcctcccacccgtctgacgcctctgacgccgccgcagcagcaacagacgccaacacctccgcgtatgacatccagatcttcgagcccacctccatcgaggagcgtcgtcgcctcctgatccagcggcgtcgcctccgactcgccgcctcccatgcctcgcggctcaccgttgcctcgcgcgtctcctccaaactcatcagcgccaccgcctcctgctccagcggcgtcgcatccgatctgccgcctcccctcctcatggctcgtcgttgcctcccgcctcttccccaacctcgcccttgccgcccttggaggatcccaaatccgacgacgagctcagtaggcccacgcagacgcggatgtgctatgaacttcaggctgatgtgcatttctgatatattgagctcaagcgtcagattctgtatcgatggcaatgggttccagaacagtacacaaggcaatttcaagacggttattcaattgctcaaatagttcaaatgtgatttgaagtattcaccttttgacatggataaacatcttctctctgttgcatttgcaggcgaaagaaggctcatgtgctgcttcgaaaatcagttctaagaaggcaaccagggacaacaaacctgataagggaagaaacatgttctggataaatattggcctttgtttcaagactccaaggtaagccattgaatcccgccaccatccagggatcaatcctcaccacgaggaccaggggtgatgccaacaaggttgagaacaagtcaagagggtttgatttttgtcatgacttggatgatagatccgtgttacgataccagcatcaaagccgcctagaagcaatactgaactttcacttgagatgtgagtagttgtagtagtagcccaaactctggaatatagtatcatcattcctagatatgtagttgtaaattctctgcccagaggtttgagctatcactcagattatgggttcaatgtcatgtatagagtcaagaaaaaacatcttctgtgcgtcttcgagtctttcaaaggcaaaacaaattacacgcgcgctgacgcgcaccaatttactagtatatattcaggtacaaagtttgttccgatttctgtgaattgttcatgcagaactgggttttggtggtcatcacgaaagttgtagcaagttttctgcagatttccataatacacatgtttgcctcatttggggccagtgaa

SEQ ID NO: 3461 - DNA, 1796 bp, Zea Mays
cacaaatttctccgagaacgagacgagaggattatttctgcgagagagagagagggttggggaaggtcaggttcagagggaagaggaagatctcagtcaaaagtcaagaccctcgtttccacctcctgcggcgtgattcgggcaatcgggctctgccgctcgtctctcctttcagcatccatcgccgctgcttgagctctgcctccacttatctactacagtctacaggctcttggctggaactaggaagtcatgttgagtggccacgccgtgacactgagcgagaggagcgcctccggtacgcgcttgatcgaggatgtagcgtgcgaggcaggcgatgaggaggaggcggacgccgccgcgagagttgtgtaccgggcctcgttccaagagctgatgcccaactaccttcagtacgacaccatcatctgggcactcatatccctgctgcttgtcctggcgtgggggatcgggctgctcctgcttctctacctgccgtacaagagatacgtgctgaagaaggatatcctatcccgccaactctttgtcaccgagagtaagatagtgtacaaggtattggcgactaggccttcgtacatgccattcatggggatagttaagaaagagattaaagtacctctccatttgattgttgatgttataattgagcaaggagagctgtgcatacctatataccccacttgatggattcatttgtgtgaagctataattcagctatgtacttcagccaggcattggttctttgtaaaaattcactgaatgttcaaggaaaaaatcactgatggacgtattaatgcattttactcatctaaatgttacaggaatatatgccttatcttgtactagttcgtatctcatgcataaacttgaacagaaaattgtgaaattgccttctttaaaagttaggactgtatgtgtgtatgtttctgaaaaaaaggatctattatgcaggctgtctacaatctgcttacagcttatacacatttagaatagaaagcatagcccatgggaaacctgcttcagtggatgaactgcaatttcatggtgtccataatccagattttctaagaaaggttataaccagagaagcctccaggagcatcagagaagtccaaagttggaaaaatagattgtactccgaggaaggtccttctcatgttcaaagtagtggattacactcacctagtgcaaaggtcagagcttccccaatctgtgctgcctttgattctaagggtaaaatttctgacaatatattgctccataagattgaagaacttaatcgatcagtgaagaatcttgagtctctactcgtaagatcacatagaagagaatgatctgatattatatcatctttgaaaattagctcaaattaaacatggaaagaacaggaggaacaagtggagtatatgaactctgtttttctatttagtccttcagatcagataccatgggaaattgcaaagctgctcatgccgtgaaggagcttctagtttgattcaagtttcacaagttatctgttgtacataggtcttgctgattcttccaagtttcacaatttgatgtacaaagaatcacagaatcagtggacagtggtctagggtcacaaagtagatcaacgtacatgtaagcttgtttactgtataaattctaaaatggtaatctgtgccaatacgtgtactgtaatgggcttaggctcagcccatatatgtttatagctatcaatacaacattctaatcctagttagggttttctattccaacatggtatcaagcct

SEQ ID NO: 3462 - DNA, 3890 bp, Zea Mays
ctccagtgagccgcgcccgcactgccgctgccgctaattaaccacaagcggccgtcgccttccccccctcccctcctcaaaaaaggcggagaggtggtggtgctcgtgggcacgcagtggagcacccagtacagcagcagcgctgcggcagtggagttaggagcttagcactccgcctccgttcccatcccgcgcgcagccgtcggccgagcctgctcagtgcccatcatggtgaggaagaagagaactggccctggcggctctggagaaacttctggagagtcttcaggagcttctggacaaggttcctcacagcggcctgaacggactcaacaacctggggcaggacgtggctgggtgcctcagcagggtggccgtggtggcgggcaacaccagggtcgtggtggacattatcaaggccgtggagggccaggtccacatcaccctggtggactgcctgagtatcaccagcgtgaataccagggacgaggtggtgagtaccagggacagtaccaggggcgtggtggtgcccgctccagaggtggaatttcacagccatactatggtgggcataggggaggtagtgttggacgaaatgttcctccaggtccatccagaacagttcccgagctgcaccaagccccatacgtccagtatcaagccccggtgatttcaccatccccatcgggacctggctcatcctcacagcctatggcagaggtgagctctggacaagtccagcaacagtttgagcaacttgccattcatggtcagagttccatgagtcaagaagttcaagtggcaccagcatcaagcaaatcggttcgattcccattacgccccggcaagggcacttatggggacaggtgcattgtgaaggcgaatcatttttttgctgagcttcctgacaaagaccttcaccaatatgatgtaactataacacctgaagttacttcacgtggcgttaatcgtgctgtcatgggagagcttgtaacactatatagacaatcccatttgggcgggcgtctacctgcgtacgatggaagaaagagcctttataccgctggaccattgccttttacttctatgacatttgaaattaccttgcaagatgaggaagatagtgttggcggtggccagggcggacaaaggtgtaggattatgctatgtctgtatttaaaacatatgcaaaatttcatgctgactgctgtaatactttctgattgaaggcgcgagagagtatttagggtggtgatcaaatttgcggcccgtgctgatctccatcatctggctatgtttctagctggaaggcaagcagacgctcctcaagaagctcttcaagtgcttgacattgtactacgtgaattgcctactgcgaggtattctcctgttggtaggtcattttattctcccaacttagggagacgtcagcaacttggtgagggtttggaaagttggcgcggtttttaccaaagcataaggccgacacagatgggcctttcactgaatattgatatgtcctctactgcatttatcgagcctctccctgtgattgattttgttgctcagcttcttaatagagatatttcagttaggccattgtctgattctgatcgcgtgaagatcaaaaaagccttaagaggtgtgaaggttgaggtcactcacaggggaaacatgcgcagaaagtatcgcatttctggcctcacctcacaagcaacaagagagctatcattccctgttgatgatcgtggtactgtgaagactgtggtccaatacttcatggagacttatggttttagcatccagcacaccactttaccgtgcttgcaagtgggcaatcaacaaagaccaaattatctgcctatggagatagttgaaggacagcgttactcaaagcgactcaatgagaaacaaatcactgctttactgaaagtgacctgccagcgccctcaagagcgtgagctggacattttacagactgtgcatcacaatgcgtactatgaagacccgtatgcacaggaatttggtataagaattgatgaacgccttgctgcagttgaagctcgtgttctgccaccaccaaggcttaaataccatgatagtggccgagagaaggatgttttgcccagagttggccaatggaacatgatgaataagaaaatggtaaatggtggcagagtcagcaactgggcatgtattaacttctctcggaatgtgcaagatagtgccgctaggggtttctgtcatgaactggcaatcatgtgccaaatatcaggaatggatttttcccttgagcctgtgctgcctccagtgactgcaaggccagaacatgttgaaagagcgttgaaggcacgttatcaagatgcaatgaacatactgaggccacaggggagggaacttgatctgctgattgtaatactgcctgacattaatggttccttatatggggatctcaaaaggatctgtgagactgatctcggattggtctcccagtgttgtctgactaaacatgtttttaagatgagcaagcagtatcttgcaaatgttgcactcaaaataaatgttaaggttggtggaaggaatactgtacttgtagatgctttgacaaggagaatcccccttgtcagtgacagaccgaccataatatttggtgctgatgttacccatccacatcctggagaagattccagtccttccattgcagctgtggttgcttcgcaagactggcctgaggtcaccaaatatgctggactagtgagtgcccaagcccatcgccaggagctgatacaggatcttttcaaagtatggcaagatccacagagaaggacagtaactggtggcatgataaaggaacttctcatttctttcaagagagcaactggacagaagccccagaggatcatattctacagggatggtgtcagtgagggacagttctatcaagtattgttgtatgaacttgatgccatcagaaaggcatgtgcatccttggagcccaactaccagcctccagttacttttgtcgtggtgcagaaacgacatcacactaggctgtttgctaataaccacaacgatcagcgtacagttgatagaagcggaaacatactgcctggcaccgtggttgattcgaagatttgccatcctactgaatttgatttctacctgtgtagccatgctggcattcagggaacaagccgccctgctcattaccatgtcctgtgggacgagaacaagttcacagctgatgagctgcagactctgacaaacaacctatgctacacgtacgctaggtgcacccgctccgtgtcaattgtgcccccggcatactatgctcatctggcagccttccgagctcgcttctacatggagccagatacctctgacagtggctcaatggccagtggtgcccgtggccctccaccaggtgcggcacgcagcatgagaggagcggggagtgttgcggtcaggcccctacctgctctcaaggaaaacgtgaagcgtgtcatgttttactgctgagatgctgagctaccttcaccaagaaaatatcctgacttgttccatgtacccgcactgtttcggtgatactatctgacaccgaatttatgcattaagtcttccagtggtctggagattttaagtaacgcctgtttttattcgtgagttgtaacgctgcagttcgaggagcttcagtgctgtatgatgtgtaaactatttgttgtaagttgtaaccaattgttgtaagttgtaaccagccactatgttataatcctgtttgtttcagctttttacagtttctcgctaccaaaagctgttgtgaactgtcaaacgtttagctttttagttagctctataaaaatcgatttgttaaaaaccatccaaaattaata

SEQ ID NO: 3463 - DNA, 7188 bp, Zea Mays
cgggaggcacgaggtcggcaggcgcgacgcgcgaatctcaaagcacaggaggggtgtgcggactgcggaggcctaggggtattttggtcaggtcgacgcggaaaacactctagcgagggggaagagagagaatcgcaggaccaaaccctaaacccccgctcccgcctcctctcgctgctgcagcttgccgggagctcacgcggcctttgcttctcgcttctttcgctggccacctgatcccggttgttcttcgctgggctcccgagccgctgcactcgctgggtgctgccgcctgccaggaggagcggcacggccgtctacaggattaaagggagggaaggtttgtggtttaagttcccggaggaagacttgtggcggaactgtactgacttcagattgaagtcaaggagctaatttgggggaagaatgtcttcaaagtggcggtcactgcagcatcggcaccggtacacctacacctccattgtgttcccgaagcattaccttgaggccctaactctcgtgccagctgagatctcctcatccaatttctttgtccgattgagcaacttgatttccctgacctccacttactcccaagttgttgtggtcaaggatcttgcctcggcatatgtgcagtttctgtccactacagggactcctgatgaagcagtgctcgctgccacaaagctttatttggagatcctctttcttgagaattccctccctctccaccggacactcatatcagtgcttgccaagtgcaagaaattctccacagtgatcagtgggtgttttgccttgctctgtgaggagtatggtggctctggtagtaaggcaaagaagagatttatggtatctcgagcagccttgtcgcttattgggtacccaaagttgggatttttggatgaggcagtagagaggtgtgcagagatcatggcactggatgttgttgatgggcttgatggagtgacaaaagacattggtgaagggtcacggccatctccagtcgtgatggagcagtgccaggaggccatgtcttgcatgtactacttgctgcagaggtacccgtataagtttattggccttgacaaggcgtcaagtgtcttcaagagtgctgtcaggacaatactatctgttcttaagtcatctgccttttcaagggattgcctggtggcctctggagtaagcttctgtgcggcaattcaggttttcatgagcacagaggagatttcctggttcatttctcaaggtctatttggcatctatgcaaatcatgaagatagaaaaaatcagtctgtgcacaatgtattttcggactttgatctgtgtgaacaaatcagagacctttcagtgttgagtagactttgtctactaagagggattttgacatctattccaaggacagtactcaacatgcaccaacttcattccagtggacctttatggactgttttatatgatggaattttacctgagctttgcaagcattgtgagaacccagttgatagccacttcaatttccatgctcttacagtgacacaaatatgtttgcagcagataaagacatcggtttcatctgatatcaccgacttctctggggactataagcctttttcaagagatgttgtcaaccgtatattgggaatcatatggcgcaacctggaagatcctttgagtcagacagtaaaacaggtgcatttgatctttgatctcctattagatattgaactatgtattgcatcagaagaccgtgaacataacaacaacttgttcctttgcaatgttgcaaatgatttacttcgcttaggtccacgatgcaaagggagatatgtccctttagcttctttgacaaagcgattgggtgccaaatctcttctaacattgaaatcaaatctgctttcagaaacagcttatgcgtacatagatgatgatgtttgttgtgctgtcaccacatttttaaaatccttcctggagactttaagaggtgaatgttggaatgacgatggtgttgagctaggatatgatgccttcagagctttgtgcttgcctcctttcatgcggggacttgtatctggaaattcaaaactacgttctaacttaaatacttatgctttacctgctctaattgaagttgatgcagagagcatattcacaatgcttggattcatctccattggccctagcacaaatgaaactaaactagatgttgttttgaaaaatgaccagtgtatagctgcactggtttctctgcttaaggtctcacggaatctggctcttgttgaaggggacattgatttagatcctgatgaattgtcacagattcagcagatggatagtaagggtgctgcagttatatctgttaaagggattaaagttacagttccttttaattggtttgctttggcactgacacacagtgatgaaagtctccgtatagatgcagctgaatccctctttctaaatccaaagacatcaagtcttccatcctccttggaactgagcttgctcaaagaagctgttccgttgaatatgcgttgtagctcaacggcatttcaaatgaaatggacaagtttatttcggaagttttttgctagggtgcgaactgcacttgacagacaggtaaaacaggggtcttggattccatcattaacgtctagtgttaaaggggctggctctattgatacttctaaggccactgttgtcaagagggctgaagatctcttccaattcatgaagtggctgagttcctttctgtttaattcttgttacccctctggcccttatgaaaggaaaacaattgcaatggagctcattcttacactactagatgtatggcctatttgccgctctgaagggaaaattgatctttatccttacaatgatagcataatattgccagactcaacaatttcatttgttgggtctataattgatagttgggacagattaagggaaaactcttttcgcattctactgcagttcccaacaccgcttcctgggatttccttgagtacatccataaatgatgttatcagatgggcaaaaaaacttgttctaagcccacgtgtccgggaaagtgatgctggtgctttaaccttccgccttatatttaggaagtatgttttgcagcttggatgtattcttgtattttctaaagaaagtgattgccttgaatgttatacacaatctatgaatggagatacagaagttactagtcaaaacccagttgcacagtatatatcttcactcattcaatggctctgtattgttgtcgaagagggtgagagggatctctctgaagcatgtaagaagagctttgttcatggagttcttcttactctgcgctacacatttgatgagatggattggaactctgaggtagtacaatcatgtatttctgaaatgaggtacctggtagaaaaactgcttcaactcataatgcgtgtaacttcggtggccctatgggtggtttcttcagacgcattgtctctgccatatgacatggatgacatgattgatgatggttccttcctctcagatatatatgatgatcaacctactaccacttcagaaagagaggagaagaatgcaaaaccagggagtaatggcaaaccagccgaacaagttgttatggttggttgctggcttgctatgaaggagtttcacgctattgtggcattgcaggtcagtttactttttggaaccatcatcaggaagataccattgcctggctgttctcattcagcttcatctcagaatggcttgcctgacagtattgaagagacaagtatatctgaagaaattcttgatgtggggcagttaaagatgatgggtgaccattttttacaggttcttcttaaaatgaagcataacggtgcaatagataaaacaagggctgggtttactgccctttgcaaccggcttctttgctcaaatgattcaaggctgtgcaaaatgacagagtcatggatggtgctactaatggataggacaattgctaaagggcaaactgtggatgatttgataaggaggagtgcaggaattcctgctgcatttatcgccctgttcctggcagagccagaaggaacaccaaagaaactacttccaagggcattagaatggctgatagagtttgctaagaactctttagctaatttccagaaagactccaaccagaggtctggagtaatgaaagagctgttggaatcacagtcagaaactacaagtgtatattctaatggtaacctatctaaaggtcgagatgagggtgttgttcccactgtgcatgtgttcaatgtgcttaaagctgctttcaatgatgcaaatctggcaaccgacacttcgggtttcagtgctgaagcaacaatagttgctatacgagcattttcatctccctactgggaagtgcgcaatgcagcttgccttgcgtatactgcactagttcgtcgcatggttgggtttctgaatgtgcagaagcgtgaatcagcacgacgatctttaactggccttgaattcttccacaggtatccagcccttcatcctttcctttctagtgaactgcaaaccacaactgaacaactagctgatggagtgtccagcaatttggagtcacacattacaaaagcaatacaccctagcctgtgtccgattcttattcttttatcaagacttaagccttcacctataagctgtggaactgatgattctttggacccttttttgcttttgcctttcatccaaagatgtgctacccagagtaactaccgggtccgtatccttgcatcaagggcattaacttgtttggtatctaacgagagattgcagtacgttattagtgatatactggataatttacctcgtggaagtcacaaagcaatggctcacagtgttcagcatactgatcctgccatatcagctaatatgggaaaagcaaatgtacttctgctgtctaagtcattcaattcaatacatggccttttgctgcagctggcttctcttctggataacaactttagaggtttgacagacggtagcatgaaggatcagattattggcctattactggaggttctttcaagatgctcttggcttggctgcacgaaattatgctcatgccctatcgtaattacatcttacttgcgggtattggatctcatgcttgatgttgcaaggacagggaaaagcagacatactgaagtcattcaggcattgctgctagagttaacttcccagtgcttgagcaacacagcatcaacccagtacgcattccatgatccaacccgtattgaactaaaacaacaagcaactgaatcatttttgagctgtgttggtctttctaagaaaaccgatgaaactaacgatgatgatgtgcagttgcaaatactcggtgaaccaactttagagatgcctagagtggattactcccttcatgaagtacacaaggagatcctgtcatgtctcactgatccttcatatgatgttagaattacggtgctgaagaggattctttggctcacaaaatcaatcagacatggttatgcagataacattttgcaccagtgggcaggagttaatctgcagcctgctttaatggaacggttgtttgtggaagaacaccctaagtgcctttattataatctgaagatcatcttttcatggaacatggaattcccattcaacaatggagaagattctagcacacttttgtccttgtgggataggttagttcatttaaacagcaccatgtcacatgcaaaaacgagagaaatagttctatgttgcatgggtatgtgcatgaaattgttcactaaacaatctaggggtggtatttcaatggattgtcttaagaccagtgagatctctgcatcctttgtcagaatcaatgaaggggatggattatctgatgccatgcttagattaaacttgtttgtcacacttgtcaagaaccaaagtgaaccatcagaaagcatgaatgctcgacgggctgctgctgaggcaattgttgcttctggtcttcttgaagaagcaagctacgttgcttcatctgtgtccaacatgtactctccttcagaatttgatgaagaccataccaaagagaaatgcatggaagatagcgtttttgaatttgttagtctttatacatgcaagatacttgacttgtggtttgtatgtattcagttgctggaggatgaggatgcatatctgaggcaaaaacttgcgaaggatattcagaaaataatcgctaagggttcagctaataccttctgtgatgattccacaccactacaagttgatagagtcattgaattaagcttggactatttaacttctttgtttggcctctggctgaaatacgttgaattcttgttaaggatagtcttgggcactggaaacgctctgaactcccgtggcgatttggtccgtcagatatttgataaagaaattgataaccaccatgaggagaagctattgatatgtcaaatctgctgttcaaacattcagaaacttctgaattcaaaatgccagatggaagcaggagcagagactaaactgttcctgcagaattggagggagatatttctaaagcagctcacatcgctgactggtggctatattgagaaagaggggaagaacgattggattggcggcataggtaaccacaaggacgtgttcatatcagtgtatgcagtcctactcggtttatacgcgctcacgcagtctggctctctggatcaattggaggaccactgtgcagtttatttgcaggaatttgcaaaccttgaaaggtctatcacaccattcctcaagaacccgttgatttctaatctttacgctctggtaaaattgtcacacgagaggttcatatcatcagataagcctgaggaccaagtgggtgattcaggatcaagttttgacccatattttcttatcagatgattttcgctaatgtactagtaattcttcattgttattcctccgttgtaagactcaatactaattgcttttttatacaaattaccatactatagattctttacttgatgccccttctctgtgtatcagtgcattttaagtgccttgggttttctagcactcaaaaaatgtatgacaaggttgtgactaacgtccgaacaactgataatgatataaatatttttccgattaacataggactacatcaagattcag

SEQ ID NO: 3464 - DNA, 2383 bp, Zea Mays
aaaatctgctaaccagcactgatggagaaccaggttgccagcttgaaaaataaaggggttccagctgaatttctctcttcaacacaggcatctcacactaaacaaaggatacatgaagaccttgatactggtaatccttctttaaagttgctatatgtgactcctgaacttgttgcaacatcaagctttatggcaaagctaaagaagctatacaacagaggtcttcttggtcttgttgcaattgatgaggctcactgtatttcaagttggggccacgatttcagacctagctaccgaaaactttcatcattgaggaagcagttcccagatatccctttgttagctttaactgcaactgctgtaccgaaggtccagaaagatgtggtatcatcattgtgcttgcaaaatccagtaattcttagagcttcatttaatcgacccaatatattctatgaagttcgttacaaggatcttcttgatgatgtttactctgatatatcaaatttgctgaaatcaagcgggaatgtttgctcaattatatattgccttgaacgggcagcttgtgatgatctaagcatgcatttgtcacagcagggtgtctcttgtgctgcttatcatgctggcctaaatagtaaagtgcgaagttctgttctcgatgactggctttcatcgagaactcaagttgttgttgcaactgtagcatttgggtaggtattgatagacaagatgtccgtattgtttgccacttcaacttgcctaagtcaatggaatccttctaccaggagtcaggtcgagctggtcgtgatcaacgaccttcaaggagtgttttgtattacggattagatgaccggaggagaatggaattcattttgagaaaccccaaaactaagaaatcacagccgtcttcctcttcaaatgagctttctgagaaggctctagctgacttcagtcagattattgactactgtgaaatttctagctgccggcggaaaaagatcattgagagctttggagagaaagtacaaccaactttatgccaacgctcatgcgatgcttgcaaacacccaaatttagtgttgtctcgtctggaggaactccgtcgtgtgcccaactgtcgctttaataagatctctccagtgtttcaaagctcagttaaagaagcacacttggacacagaattctggaatcgtgaagatgaggcgagcttatcagctgaagacatatctgattctgatgatgggaatgaggtagtgagtaatatagccatttcaaaggttccggcaaaagctggtctggatgcaaaatttaaagcactggagcgtgctgaaaatgcttattaccaaggcaaaggtcaggcgaagcagcagggtggcggccttgctgacaagaaaagcatctctgagacgctaagagatgcatgccgaaaaagattgttggatgctcttggacaagcaaagttgcgactcgggaatattccgtgcggagacgaggcttctgctacacaccttgaaacagagtgcttcaaaaaatatgtgaaggcgggcaagacgttctacaactcacagatagccgccacagttcggtggctgtcatctgcaacactcagtcagatgcgtgaccgcctcgacactctttatcgaccgaaccaaagatgatggtgcgtcaggctgccccgacattgtcccagagtcacctccagcatctcctgaaatcgtcgtcggcgcaaggtcaggagaaaccagtaacgacaaaccgcagcatatttgtgagttgaagagttcagatgagtctgcaaagggtgctgcatcatcgactgggaacatggtgctccccgccataccgacgttcagagaattcttgagccaaaaaggaagggatcgggcgaagtgctattcaaattctaatgcgacgaaccagccatctggtattcgtaggaagtttagtggtcaccttgataaggaagaagccagcaagaggatgaaatcatgaatatctgtcgggcaacttgattttttttctgccttttcgttgtcactaatcaaacattgcaaatctacgttgtagtgaaacgttcctgaatcagaatctccatgatgattttcttattatatctagtttgtacagtgaaaaggggtgttctacgcttctcgtgcaacatgaaggatctgcctcccaatccctatccaccctctataggttagtcatctcatgtggacacagccagaagggaagcggtaaacttaagcaagtatatacacatgtcggacctataacaccctatttgatcagctcttacaacggtcaactacacctgacgcaccctatttgatccgaggaatccttctcaagctccgcgatcagctgctcaatgtttcttctgtat

SEQ ID NO: 3465 - DNA, 1574 bp, Zea Mays
ttggactcggctattaaaaccacgagtgggaagttttcttcttcgtgacctcccgctcgctgcgccagccaacccaccacccatccgtttctcgttctccggcccctgcctgactcccctcctcccccccttaacaatggcagtacaggcgcagtacccatccaatctcctcttccacgacagaggtgagccggacaggaagaaggcgatggacatgcccaagccgccgcagctcgccggagtctcgccggcggcggtctacttctccggcggtggagcaacatctgctacagcagcaggagagcaagcagacgaatgccttgcgctattcgtcgccgccgtcgctgttcgcctctgtctccgacgagctcgccgcgcaggcgaagcagcatgaagaggaggtcgaccggttcgtccgcgagcagggcgagcagctcaggcgggcggtggccgatcggctgcggcgccacaaccgggcgattctggtcaaggccgaccagtccgcggcgcgcaggctccgcgagaaggcggcggaggcggagcgcgaggcgcggcgcggcgccgagctggaggagcgtctggcgcgcctccgcggcgaggcggcggcgtggcaggccaaggcgctctccgagcaggccgccgcggtcgccctgcacgcgcagctgcagcaggccgcggccgcggcgcgggcgtcggtcgaggagctcaccgccgccgccgccgcgggcgacgccggcccggcggagtcgtcggcgtcggcgttcgtggaccctcgccgcgccgggccgccgccagaccacgcgtgcctcgcctgccgcctcaggccggcctccgtggtgctcctcccctgcaggcacctgtccctctgcggcgagtgcttcgccgccggcgacgccgacgccgccatgccgtgccccgtgtgcctgtgcgtgcggacggggagcgtggaggccatcctctgctgagctttccccgcctctcatcatcgatcatccggccgtccacctcgtgagccggtgagtgcatgatgtgcaggaacccatcaatgccttcccaagaaattgaggagaaaaaaaaaaacgtaggaaagctagaactttctcttttttaatttcttttttctaagtttttgttcatattaatttcgactcctctgccctaccttctatgggttttaggagaattcaattgataagttcattgttaatagtaagcagcaagtgcatcggatgaacgggggtggctcggcacaccttgattgatttctttctttctcaatctgtcgctctcgtgtttcttcctgggcacactgatcagagagcaggtttttttcgatgacatgatggtggcgcctaattttgctggccgtgtcttgaattggcgtcctcgcaaccggatatggcgatgtcagcagattggcatggcaggcgagcggattaacaagtgatcgcaaccgccgtgccactcgtgacgttgcccgtctgatgcgacgcgaggcgaggccggcgtgaggaggaggaaccgacgaacggaagcgcgcgctcccgcgcgcggtgcggggcagttaattgcgg

SEQ ID NO: 3466 - DNA, 1933 bp, Zea Mays
acagatttctccgactacgactgcctgcgccgccgccagccccttgcgttgagcaatatcctcgtcctcccgagagcgatccccgtcgcccctgtccgcggccgccgaggcgccgactcgccggcgcggcgccgtcttccgccactgcgccctaccgcccaggacgaagctccagctccggcccaccgtctccctgccggcactgccgcgccgagggcccgagctcctcctcgccccatgcccccgcggccgccctgcccagctccgccccgcgcgttcgcggctctgcgcccccgccaggccgagcttcgcacgttcgccgtccgcgccttcggcttccgcagttcgcacagctgacagcagtccattcaccgtccgcgcctccggtcaccgcacagtagtgagtgcattcgccgtccgtgcctccgatcaccatacaaccgtgaccgttagcagcaccttgattttagctcgtcctccgccactggtggcagcgacgcgcttccgaggaggttagagcattggctgctatggcgccgcctcacgtcaccaggaagaagggaaagggcgccggcggcaagaccgacctgcgtcccgaccgtaagcagttcaaaaggcaccacaaggaggatgcagcagctgagcagggggatggcaacggagagccgggttctgacctagaggataatattagtaatacatgtcttgaaattgctaatggaactgaagcaaatgctaaaaagagtgataaacagttaaagaaggaagcaagaaaacaaagggaactagaaatcagtgctatggaggaaagggctttgcaggaagatataccacaaactccagatgattttgagaagttggttaggagctccccaaatagtagttttatctggataaagtatatggcaactttgttagatcttgcagatgttaagaaagcacgtgcagtagctgagaggatgctgtgaaaaaggtattccaaagagccttgcaatattgtgatcccaaaaagctgcacttggctcttcttgcgatgtacgagaggaccgaacagtatgagcttgcagatgaacttctagacagaataaccaaaaggttcaaaacttcctgcaagatatggttatgccgcattcagtttgccctcaagcaaggcaaggatgttgagtacatcaaagccattgtaaaccgtgcacttctaagtttgccacacagaaagcgcataaaattcctctcacaaactgctattctagaattcaaatgtggggtgcctgaagaaggaagatccagatttgaactaatattgcgggagtacccaaaaagaacagacctttggagtgtttatctagaccaagaaatccgccttggtgacgtagaagttatacgggcattgtttgagaggagggtggcttgtctgaccctacctccaaaaaagatgcagttcttgttcaagaagtatcttaacttcgagaagtcactgggtaaagacaacgaaagaattcagcttgtgcaacagaaggcaatcgaatatgttcagagttcactgccgtcacaagacaactcttgaactacatggagacttaataagcccacaaacaatcattaggaaatgccagtcgtactgtagatgtgatctctttgatgacattattgtgaaaaggtcaatgtaaaatgtgggctattcaaaattttgtttgaaaccgttatataagttatgaggcattaagtctagtatgtcatgtttcacccaatttttttgaaaggatctatcctaagccggatctggttcgaatattgaccttttctatctgtggtattgactgttgaggcacaattgaatgggtaactgtctgtgctactcctagcttagaaagcacaaaatactagaatatctgtctgcgcttaatccctttattaagggtgcgtttggttgggg

SEQ ID NO: 3467 - DNA, 2228 bp, Zea Mays
tacagatttctccgactacgactgcctgcgccgccgccagccccttgcgttgagcaatatcctcgtcctcccgagagcgatccccgtcgcccctgtccgcggccgccgaggcgccgactcgccggcgcggcgccgtcttccgccactgcgccctaccgcccaggacgaagctccagctccggcccaccgtctccctgccggcactgccgcgccgagggcccgagctcctcctcgccccatgcccccgcggccgccctgcccagctccgccccgcgcgttcgcggctctgcgcccccgccaggccgagcttcgcacgttcgccgtccgcgccttcggcttccgcagttcgcacagctgacagcagtccattcaccgtccgcgcctccggtcaccgcacagtacgacgcgcttccgaggaggttagagcattggctgctatggcgccgcctcacgtcaccaggaagaagggaaagggcgccggcggcaagaccgacctgcgtcccgaccgtaagcagttcaaaaggcaccacaaggaggatgcagcagctgagcagggggatggcaacggagagccgggttctgacctagaggataatattagtaatacatgtcttgaaattgctaatggaactgaagcaaatgctaaaaagagtgataaacagttaaagaaggaagcaagaaaacaaagggaactagaaatcagtgctatggaggaaagggctttgcaggaagatataccacaaactccagatgattttgagaagttggttaggagctccccaaatagtagttttatctggataaagtatatggcaactttgttagatcttgcagatgttaagaaagcacgtgcagtagctgagaggtctgtctactgcccaaaacatttgtttttatattttaatatcaaaaagatctttggtgataagaagttgttttctaccatcttaatagtgttgatagatgtgatttggttttgtgttggttttattttcgaaggatgtagaatttacttgttgaaacattctttcaaaaatttccttttgttctgtcaattcaaatgatacatgtttgtcctttttctgttagtttatttaaacttttttggatgcatctctctgtcatcatcttctacaactgtttctcctgtctttagagctttaaaaacaataatccccagagaagaagaagagaaactaaatgtttgggtagcatatttcaatctggaaaatgaatacggtagtccaagggaggatgctgtgaaaaaggtattccaaagagccttgcaatattgtgatcccaaaaagctgcacttggctcttcttgcgatgtacgagaggaccgaacagtatgagcttgcagatgaacttctagacagaataaccaaaaggttcaaaacttcctgcaagatatggttatgccgcattcagtttgccctcaagcaaggcaaggatgttgagtacatcaaagccattgtaaaccgtgcacttctaagtttgccacacagaaagcgcataaaattcctctcacaaactgctattctagaattcaaatgtggggtgcctgaagaaggaagatccagatttgaactaatattgcgggagtacccaaaaagaacagacctttggagtgtttatctagaccaagaaatccgccttggtgacgtagaagttatacgggcattgtttgagaggagggtggcttgtctgaccctacctccaaaaaagatgcagttcttgttcaagaagtatcttaacttcgagaagtcactgggtaaagacaacgaaagaattcagcttgtgcaacagaaggcaatcgaatatgttcagagttcactgccgtcacaagacaactcttgaactacatggagacttaataagcccacaaacaatcattaggaaatgccagtcgtactgtagatgtgatctctttgatgacattattgtgaaaaggtcaatgtaaaatgtgggctattcaaaattttgtttgaaaccgttatataagttatgaggcattaagtctagtatgtcatgtttcacccaatttttttgaaaggatctatcctaagccggatctggttcgaatattgaccttttctatctgtggtattgactgttgaggcacaattgaatgggtaactgtctgtgctactcctagcttagaaagcacaaaatactagaatatctgtctgcgcttaatccctttattaagggtgcgtttggttgggg

SEQ ID NO: 3468 - DNA, 1988 bp, Zea Mays
accccatcggcaaccggctctgtccggaaagcccccaagcgcaaccgcttcttcccggaaagggcaaaaaggaaacgcgcctcgtccggtcggacggaagcccttcttcccctccccatccgccgccactgccccgcgagattcggcgagaattaaaggcaccatatcctgcctcctctctcgtctccctatttctctctcactccccacctcccgcgcattccgcaccgataggtaggctcacccggactcgtctcccgctcccccctcccttttcccaaaaccctagcgggtttcgacctcccaggccaatcagatcgaccgctgccgcgcgcaattgttgagccatcgagggaaacttatctgtagcaagcatatacgctggaaatgatagtgtggagctcaaaggagctgaagtaattgctgatttaaagtatcttctcaatttgctgacactttgctggcatttctccaaaaagccattcccgttgtttttggaggcgactggctacactacggaggatgttcttatgcaagaacctaaagcaggaattttgaagccagctttcaccattttgcttgatagagacaaaaagtctatacttctattaattaggggaactcatatactaggatatgctcattttgggatggttgccgctgctaggtggattgcaaagctctcagggccttgtctggcacaagcattgcagatgtacccagacttcaaaataaaggttgttggacattcactgggaggtggtacagctgctctgttgacatacgttctgagggaacagaaggagtttgcctctactacttgtctggcatttgctccagctgcatgtatgacatggaaactggcagagtcaggagtgcattttatcactacagtcatcaatggagctgatctggttccaacattttctgctgcgtcagtagatgatcttcgttcagaggttacagcgtcagcttggctaaatgatctccgccaccaaattgaacaaaccagaatcctaagcactttttatcgttctgcgtcagccttgggatcccggcttccatctatggcaaatgctaaagcaagagtagctggtgctggcgccatcttaagacctgtatctactgggacgcaggttgtaatgaggagagctcgcagtgtagcacaggcagcatggacaagaccagcactgcaactgtcctcatggacttgtattgggccaagacggcgaaataatatatctacctcaactgtcacatcagaggaaataatagcatctacaggcggtggatctgaatccacttcattgttgactgaaaccactgcggaaaccacagagacagttacatcagaagctgtatcagaagtggttcagagttctgtttctgtggcggtcgatgctgttgacttggtagatgacaagggagatagcgatgatgacatcgtcgatcaccatggggacgaggacaggatgactgatgtggagctgtggcagcaacttgaaagtgagttgtaccggaagagggagggagaagaggatgacatagccgaagagatggctgaaagtacaattgctgaggaggtgggtggcgtggctgaagatgtgctcagcgagacaaaggaagtgcataggttctaccctcctggaaaaatcatgcacatattattctccagcagggaagaagcagatcgtggagaggagcctgaggatgatgttacggatggggaggcacaaagcagcatagggatcttcttgacgccaagatctctgtacggcaagctgaggctttcgaaaatgatgatcaatgaccattacatgcctatatacagaagaaacattgagcagctgatcgcggagcttgagaaggattcctcggatcaaatagggtgcgtcaggtgtagttgaccgttgtaagagctgatcaaatagggtgttataggtccgacatgtgtatatacttgcttaagtttaccgcttcccttctgg

SEQ ID NO: 3469 - DNA, 1390 bp, Zea Mays
gctctctcccctttatatgtacctgtgtgctccatgcctgtgtgcttttgcaatgcggctgctacactgaaagcagctggccggcatggtggagaaggcgtcgatcgaggacgtgatgaaggtgctgatggcgtcgcggaagcaggacctgcaccagctgtggaccacgtgctcccacctcgtggccaagtccgggctcccccctgaggtgctggacaagcacctccccatcgacgtggtggccaagatcgtggagctccgcctcaagtcctcgatgtcccgccgctcgccgttcctcgcgcaccaccacccgcaccaccacccggcggcgggcggcatggaggcctcgtccgcggccgacatcgacgagcaccacaagatccgccgcatgcgccgcgcgctcgactcctccgacgtggagctggtgaagctgatggtgatgggcgaagggctgaacctggacgaggcgctcgcgctgcactacgccgtggagaactgcagccgggaggtggtgaaggcgctgctggagctcggcgccgccgacgtgaaccacccggccggccccgccgggaagacgccgctgcacgtcgccgccgagatggtgtgcccggacatggtcgccgtgctgctagaccaccacgccgaccccaacgtgcgcaccgtggagggcgtgacgccgctggacatcctccgcacgctcacctccgacttcctgttcaagggcgccgtgccggggctggcgcacgtggagcccaacaagctccggctctgcctcgagctggtgcagtcggcggccatggtcatgtcccgcgaggacgcgcacacggcggtcaaccccgcggccgcgcccatgtacggcgagccttccggaggcggcgccgtgtacagcgcgagcggcaccagctcgagcatggtgaacctcagcctggacaacaggatggtgtatctgaacctagggatggacgcgcagttcggcaagatggacgacggcggcgacggtgatgacggcgggggcagagggcaagggggcccgccttctttgttctccccgcatggctaccattgacacaagctggccggagcggctgctgctctacgactatctctccttgtaagctttagaactaattaattacatgttgttattcatatccacattacaggagatgatgatgatggtgagataatccgtttggccctctatcatcctctgagccttttaattagcagagccgattagagagagatcacgcaaatgcatgcatgcagagtgatgcatcgtcatcacaagagtatgcatggatcttggtgagttgcctactccagttgttgtagcatgcggcgccgggggggcgttgtctgggacattttaagaggtaaaactgttctt

SEQ ID NO: 3470 - DNA, 1817 bp, Zea Mays
aggtggctaggtgttagggcagtcatcgtactgatgctttccaaaagcggagagggagagagggaccccttttccccctgctagctccaacagtggtcaatttgaataggacagcatcggtgtttgatctggatagggacagtggcaggtgttgttataggcctgcagggtttgttgatactacctctcactgtgctcaattgctgctggcaagatgatataacgttgcgactgcttgcggcgtgcccaattacggtgactggttggtagggcttggattatgtcagtatatgttttctagagtaagtgcatgagttggggctatctagaaagggttacgggctggaatagtctaggaaaattcaatcttccctgtatgtttcttatattatttatgttctcttgacaagcgagcatgtgtatggcatctccttgcgttgggtgcctaggagatgtggaggtggtggtcagtgggtcactgctcaccataacatgcgttgctttactgctgccccgaatgttgaagattcttatcctgagcgaccaggggaaccagattgtccttatttattgaataatagatgtaagtttaaatctaaatgcaagttcaaccatccgaaggatatggtgaatgcattaggaacaggaacaaacaatgaatctctaattgctgatagcgctgtcttaccagtgaggccttctgaacccatttgtgtgttctatgcaaaaacaggcaaatgcaaatttggtgccatttgcaagttcaatcatccaaaagatattaagacatcacctttgattgcaaaggaaaccatatatacagcaacaactgatgcagcagatgccccgaccgaggcgtgtaacgcaaaggggcttcctataagacaaggtgaagtggattgctcgttttatatgaagacagctgcaaatatggttctatttgtcgcttcaaccatcctgatcggccagggccagctgcggatatagcttttatggttccactggttcaagctactcttccttcatcagcacccattgtccctgcagtggttgaacctttgccaatgatctatcctcaaaggccaggagaaactgtttgtgatttttacatgaagacaggatcttgcaagtattctcagaaatgcaagtttcaccaccccatcagtcgttttgccccgcattccaaagaaaacggggatcctcaacagcctgcgacacttgctagcctgccaaggagagaggacgctgaggcttgtgccttctacatgaggtctggcatgtgcaggttcggtgcgcactgcaagttcgaccaccctcctcgcgaggaggctatttccgagctgcaggcagccggaaaggaaggaatagaagggccgagcctcgtccagcgcgaccatgatgtctaatactgtatcctgcttcagtatgtaataccatgtgaatcgcactgttagttaatgcttggtgctgtcagtcttgttgggagtctgactcgtaaagctcattatcatcggaagtgtttgtcggaggagtgctggcactaactatttatcttcagttggttgtcgtgttgccaacttgcgatgtcaaggtgcatatttcagttttttagagtaaaaatgcactttacatcctgccgccaaacttaactatgggcctgtttatggccctgtttggtttagcttttttttaccagcttttctaaaaatctggttgtggaaagaatttgagtatcgtgaagattacatgtggagaagatgaagtggtccaaagggtccatgatctagaaagcgatcaatttctattatcacaacgac

SEQ ID NO: 3471 - DNA, 537 bp, Zea Mays
cgcccctgtcgtgatgtacagctcaactacgacttactccctctaataccaaaataaaatttgttttgtctttttatgataagcaacaattcatttatagcagcttgtttctggagactggagtacacatgagacaaacattgtctcaccaatgtatacgtatataatccatcacacatgaatacttaggttatttgtcttctagcttccgcctgacacaatcacagaactagaatgtaaaaaggggtaaagaaataaaaaaggacgactcctaatggagtccgccattgccgtattgtgacttgccggtttgtgcgcacctcagctgaccaccaaggaggtcaggaaaggcaccacgaaaacgaatgcttcttgagaagctctgtttccactatccatcgtcgtgcagctttaactctcaagaaccatgcagatgctcaagccatgcatcttccatggtctacgggggctgtggacaaggggaggggagaaggaggagcacgtctgtaccctggtgaggacgatgatgtctgcagg

SEQ ID NO: 3472 - DNA, 2254 bp, Zea Mays
cccaggccccaactcgcaagtcgcctgccagcccggttagcaaggaagcacgcaggatatttggtgcgcgcgggcggtgtgagcggtgagcctgcaaaagccagcagcagcgagcgtcggtaggggagcccgggcagcggagcacacttgccctctccacctggaaccccgagcaggctccgccggccacggccggtgccgcgacgactcggcacgcgctagctagctagctgttcctcttcccgagggccccaccactaccaccatcctgccgcccggcctcgtgtggcggatgatgattcctagggagccgtggcggccggagcacccttccaactcctgatcccgagctgacccccgccatcgcagcggcggctctgccgcagcgtctgtgtccaggtgaggttggtgccccacggatttggagacttatgatgatggagacccctcaaatcgagatgggcggtttcaaggtcaacagcccgcaagtgcccaacggcgtgttgcggcccaccgtgtcttcctcctggaactcgcgagggacggtcgagagggcgctcaagagcatcaggatcgtcattttcacttccaagctcaacttgctcatgccgttcgggcctgcgtccatcattctccacttcacgactaggaggcatggattgattttccttttcagcatgctaggaataacacctttagctgagcgtttaggatatgcaactgagcagcttgcaatatacactggtccaacagttggtggccttctgaatgctacatttggaaatgcaaccgaaatgatcattgcagtatatgctttgaaaaatggaatgatccgagtagtgcagcagtcactattgggttccatattgtcaaatatgctgttggttatgggttgtgctttctttgctggtggtgttgttcaccgcaacaaagaccaaatcttcagtaaggcaactgcagttgtcaactcaggtttactgttgatggctgtcatgggattgatgtttcctgccgttcttcatttcactcattcagaagtgcgtcaaggggcatcagaggttgcactttcaaggttcagtagttgtattatgcttgtggcgtatgccagctatctctatttccaattaagtggacggagcaacatttacagtccaataggcagtgaagaggcgcctattgaggatattgcagaggaagatgaagaagctgagattggcatgtgggaggcagtaacatggcttgcggttttaacactctgggtgtcttttctttctgagtacctagttaacgccattgagcatctgattcattgaacctaccggtggcttttatcagtgttattttgcttcctattgtgggcaatgcagctgaacatgcaagtgcaataatgtttgccatgaaagataagcttgacataacactgggtgttgcaattggttcatcaacacagatatcaatgtttgtgattccattttgtgttgttattggttggatgatgggacaaaggatggacttgaattttcagctatttgagacagcaactctcttcataacagtgcttgtggtagcatttatgctacaggatgggactgcgaactacttgaaaggacttatgctgatcctatgttatctaatagttgctgccagtttctttgttcatgttgatccacaatcaagtgatggttgatgccgtagatgctgtaagtaatgcgtcaaataccttttgaaacttgttaatcctttcttgtggaggtgctactccatagcaacgttccacctgtttcaagcagcatgctggcaaaaaaaaaaggcgggaagatcacacattgtcggttccttcatgaaccgcaaaaggaattcttgtattgtgtggataatgaggtgtactaggggtagtctcaatgtatacagaaacaagaagtgccagcatgttacattcgattaattggatgggtgagtccctctttttttttctggttccctttgagatttgggtatatgatttgatgctgactgaggctaagatctctcatccttttttgtggttgatgatgtccgcgcactcatggttctacatctacgtttctttttcttccctagtgattatgtgtacatttgtggttgaccatgtccgcacagtcacggatggtcataccccatgtgaggatcttaatactctaacgccgcgcaaaaattctagtattccttaaaccaaacacatcttgatggcaaatcaatttgtatggcttgtcct

SEQ ID NO: 3473 - DNA, 2297 bp, Zea Mays
cccaggccccaactcgcaagtcgcctgccagcccggttagcaaggaagcacgcaggatatttggtgcgcgcgggcggtgtgagcggtgagcctgcaaaagccagcagcagcgagcgtcggtaggggagcccgggcagcggagcacacttgccctctccacctggaaccccgagcaggctccgccggccacggccggtgccgcgacgactcggcacgcgctagctagctagctgttcctcttcccgagggccccaccactaccaccatcctgccgcccggcctcgtgtggcggatgatgattcctagggagccgtggcggccggagcacccttccaactcctgatcccgagctgacccccgccatcgcagcggcggctctgccgcagcgtctgtgtccagacttatgatgatggagacccctcaaatcgagatgggcggtttcaaggtcaacagcccgcaagtgcccaacggcgtgttgcggcccaccgtgtcttcctcctggaactcgcgagggacggtcgagagggcgctcaagagcatcaggatcgtcattttcacttccaagctcaacttgctcatgccgttcgggcctgcgtccatcattctccacttcacgactaggagggattgattttccttttcagcatgctaggaataacacctttagctgagcgtttaggatatgcaactgagtaagctgctaaactttctacctgtttttttcctgctctattgagctttgatgccaatggttgttgtacaggcagcttgcaatatacactggtccaacagttggtggccttctgaatgctacatttggaaatgcaaccgaaatgatcattgcagtatatgctttgaaaaatggaatgatccgagtagtgcagcagtcactattgggttccatattgtcaaatatgctgttggttatgggttgtgctttctttgctggtggtgttgttcaccgcaacaaagaccaaatcttcagtaaggcaactgcagttgtcaactcaggtttactgttgatggctgtcatgggattgatgtttcctgccgttcttcatttcactcattcagaagtgcgtcaaggggcatcagaggttgcactttcaaggttcagtagttgtattatgcttgtggcgtatgccagctatctctatttccaattaagtggacggagcaacatttacagtccaataggcagtgaagaggcgcctattgaggatattgcagaggaagatgaagaagctgagattggcatgtgggaggcagtaacatggcttgcggttttaacactctgggtgtcttttctttctgagtacctagttaacgccattgagggagcatctgattcattgaacctaccggtggcttttatcagtgttattttgcttcctattgtgggcaatgcagctgaacatgcaagtgcaataatgtttgccatgaaagataagcttgacataacactgggtgttgcaattggttcatcaacacagatatcaatgtttgtgattccattttgtgttgttattggttggatgatgggacaaaggatggacttgaattttcagctatttgagacagcaactctcttcataacagtgcttgtggtagcatttatgctacaggatgggactgcgaactacttgaaaggacttatgctgatcctatgttatctaatagttgctgccagtttctttgttcatgttgatccacaatcaagtgatggttgatgccgtagatgctgtaagtaatgcgtcaaataccttttgaaacttgttaatcctttcttgtggaggtgctactccatagcaacgttccacctgtttcaagcagcatgctggcaaaaaaaaaaggcgggaagatcacacattgtcggttccttcatgaaccgcaaaaggaattcttgtattgtgtggataatgaggtgtactaggggtagtctcaatgtatacagaaacaagaagtgccagcatgttacattcgattaattggatgggtgagtccctctttttttttctggttccctttgagatttgggtatatgatttgatgctgactgaggctaagatctctcatccttttttgtggttgatgatgtccgcgcactcatggttctacatctacgtttctttttcttccctagtgattatgtgtacatttgtggttgaccatgtccgcacagtcacggatggtcataccccatgtgaggatcttaatactctaacgccgcgcaaaaattctagtattccttaaaccaaacacatcttgatggcaaatcaatttgtatggcttgtcct

SEQ ID NO: 3474 - DNA, 4013 bp, Zea Mays
ttgtggtcgtctcggcacccctctccgcttcgaaacccccgacgcgaaggaagctagggaaccctcgcgagtcgcgttgcctcgcccccgtccccttcagctggcccgccgccgcctcgaatccgccctggctcggagggcctcgcgcccccacggatcggattctcgaggttggtggatttggggctagggtttggggattgactacaatcgtggggttgtttggcgtaatttgaggagcaatgtacaacatggttaggaagtggacctgaggaggacggagggatggtggcgatggagggtaagggggacgcgtcagtgacgccggtgaggactagtgaccggctgcggcagcgtccaaagtactatgctcgtggctatatgtactacaatccagccatgaggaagaaggttaagtctaagaagcgaactgctgcatcacagattgctaagaaactgcttcgcaagccagctgcacggccaccacctgccgattgtgttgcagcaaatttgcgccgttcaacgagaaagcgaaggatttctgtaaatctggagggctatgatacagatagttccagtatggaagatgacgatcttatgagacctagatatcgatcttcaaagagtaaggggggaaacaatgctgcacataatgaagtgtcagctagaccaaagcgccagaagttgtctaactccatacctcgtcgtgaaggtttacggcctagaagatctttgcgaggacaaagactgcatccataccatgaatctgaggatgaccaggaaagctctgatgaacaaggtgcagaagatcaaagagaaaatggcaatgagattgaagaggatgttggtgatgaggaggaggttgatggaggtgatgaagctgaaggagatggagatgacgaagatggtgaggaagagcaagaaggaaggaggagatatgatttaagggaacgttcagaggttcgtagaccatcccctcgtaaggaaggaaagcacagaccacaatctcctcgtagagtactagttcacggaattggtccaaagaacagcaagtatttaaaaaaaggtgggtcgcgcatgcataagcgccctcgtttctctttgccagatgattcagatgattcccttcttgtggatgagccggacgagggcccatccatgccatggatgcgcagtgggaggggaagtatgccatggttgatgggtgggttggacatgcatagtccagcagcatggggcctgagtgttggagcatctggttggggtcatcagggtgacacttctacttcactcatgcctggggtgcaaactgctggaccaagttctaagggaggagccgacattcaacctctgcaggttgacgagaatgtgagctttaaagatataggtggactttcggagtacattgatgctctaaaggaaatggttttctttccattattgtatccagatttttttgcaaactatcacatcactcctcccagaggtgttctgctttgtggcccaccaggcacaggaaaaacattgattgcccgtgccttagcctgtgctgcctctaaagctggccagaaggtcagtttttatatgcgcaaaggagctgatgttcttagtaaatgggtgggtgaggctgaaaggcagctaaagttactttttgaggaagctcaaaagaatcagccgtcaattatattttttgatgaaatagatggcctggcacctgtgaggtctagcaagcaagagcagattcacaattcaattgtttcgacattgcttgctttgatggatggccttgattcacgtgggcaagttgttttgattggagcaactaacagaattgatgccattgatggagcattgcgtagacctggccgatttgatcgtgagttttattttcctttacctggctatgaggctcgagcagaaatactggatattcatacaaggaaatggaaggatcctccaccgaaggaactaaagatggaacttgctgctagctgtgtgggctattgtggagctgatttgaaggcattatgtacagaagcagctattagagcatttagagagaagtatcctcaggtctacactagtgatgacaagtttgtcattgatgttgattcggtcagtgtcgagaagtaccactttttggaagctatgtctacaataactcctgctgctcacaggggatctattgtgcattcaaggccactttcaacagttatcgctccatgtctgaagagtcatcttgagaaaataatggaacatatttctgatattttccctttcctttcatccatagattttagcaagttctctgctctctcctatggatcttccatccctcttgtttatagacctcgccttttgatatgtggtggtgaaagtgtcggactggatcatgtgggaccagctgttttgcatgagcttgagaagttctctgttcactctttgggactgccgtctcttctctctgatccaagtgcgaagacacctgaagaagctcttgtgcatatctttggggaagccaagagaacaaccccgtccattctatacatacctcagttccatctttggtgggatacggcacacgaacaactaagggctgtgttgttgactctgttgaacgagttgccctccaaccttccagttttattgcttggaacatcatcagtggtttttactgaccttgaagaagagtgtgcttccatattctcttctcgcaatgtgtatcaagtggatcaaccaagttttgacgatagattgaggtacttcagtatattgtttgagtcattgctctctttccaaatggaagaatcaagaaacaagtcaaagaaacagaagtctgctattgaccttcccaaagccccgaaagaagtggagggccctaaggtttctgagctaaaggctagggcagaagctgagcagcatgctgttcgtcgaatgaggatgtgcctccgagatatctgtaatcgcgggtggactctggacagtaccttaccagggcagcatttataaaggatattgatcttattgtctcaaacgcaaagacttacaacggggatgactacaatggatctaggattgtcagtagagcatgtgaactcagagatgtggtccaaggcatgttgtcacaaatggacccatctttggtgtccttctgtgataaaattgcttcacaaggggggccactgcaggctgtggatgatgaagatagagctattcttcaagcagcacctgttgctcagctggtttctggtactagaataagtgcaaggcttcgaaatgtacagcctgaagtaaacctgtcacaaagttatgaagtgctaaggcggcaaaagaaaagtgcagaaaatgaacaaagcatgactagagatgaaaagtctcctgaagatgtagatttgtcgaagccaactgacgcagaagaagctgcaaaagaaccagagtcaaatggcactacgaaagaagccaacgattcaccagccaaagaaccagaagtatctacttcccctgaacccatggagagtgacaacggcaaaattgccgcggctactggcgacgacttgttagaacagctagaagccctgaagcaacgcttcatggaactcactgcaagctatggcgtgccgcagctcgagaggctgtattccaagataatgaaaggagcaatagagttgacaagtaaagaaagcaacgaggatcataggcggttagtagttaggtatttgtggacattcgttgagaacagcaacaatttttaacctggcgccaataagattcttgttttccttgtacatcctctttggaacgaaacaatagtagccgttcatcttgggagttgtccccgttccatgccttgtaacaaatcttccaaatgctctagtgtcagtgacacagttttgccatgaaatgatgtagcaagtgaacccttcctagatttgtacctcagtttgatgaatttatgaggtggaattccctcttaatgcataacatgtgttaccatgcttgttatcttaggccat

SEQ ID NO: 3475 - DNA, 4134 bp, Zea Mays
cacccctctccgcttcgaaacccccgacgcgaaggaagctagggaaccctcgcgagtcgcgttgcctcgcccccgtccccttcagctggcccgccgccgcctcgaatccgccctggctcggagggcctcgcgcccccacggatcggattctcgaggttggtggatttggggctagggtttggggattgactacaatcgtggggttgtttggcgtaatttgaggagcaatgtacaacatggttaggaagtggacctgaggaggacggagggatggtggcgatggagggtaagggggacgcgtcagtgacgccggtgaggactagtgaccggctgcggcagcgtccaaagtactatgctcgtggctatatgtactacaatccagccatgaggaagaaggttaagtctaagaagcgaactgctgcatcacagattgctaagaaactgcttcgcaagccagctgcacggccaccacctgccgattgtgttgcagcaaatttgcgccgttcaacgagaaagcgaaggatttctgtaaatctggagggctatgatacagatagttccagtatggaagatgacgatcttatgagacctagatatcgatcttcaaagagtaaggggggaaacaatgctgcacataatgaagtgtcagctagaccaaagcgccagaagttgtctaactccatacctcgtcgtgaaggtttacggcctagaagatctttgcgaggacaaagactgcatccataccatgaatctgaggatgaccaggaaagctctgatgaacaaggtgcagaagatcaaagagaaaatggcaatgagattgaagaggatgttggtgatgaggaggaggttgatggaggtgatgaagctgaaggagatggagatgacgaagatggtgaggaagagcaagaaggaaggaggagatatgatttaagggaacgttcagaggttcgtagaccatcccctcgtaaggaaggaaagcacagaccacaatctcctcgtagagtactagttcacggaattggtccaaagaacagcaagtatttaaaaaaaggtgggtcgcgcatgcataagcgccctcgtttctctttgccagatgattcagatgattcccttcttgtggatgagccggacgagggcccatccatgccatggatgcgcagtgggaggggaagtatgccatggttgatgggtgggttggacatgcatagtccagcagcatggggcctgagtgttggagcatctggttggggtcatcagggtgacacttctacttcactcatgcctggggtgcaaactgctggaccaagttctaagggaggagccgacattcaacctctgcaggttgacgagaatgtgagctttaaagatataggtggactttcggagtacattgatgctctaaaggaaatggttttctttccattattgtatccagatttttttgcaaactatcacatcactcctcccagaggtgttctgctttgtggcccaccaggcacaggaaaaacattgattgcccgtgccttagcctgtgctgcctctaaagctggccagaaggtcagtttttatatgcgcaaaggagctgatgttcttagtaaatgggtgggtgaggctgaaaggcagctaaagttactttttgaggaagctcaaaagaatcagccgtcaattatattttttgatgaaatagatggcctggcacctgtgaggtctagcaagcaagagcagattcacaattcaattgtttcgacattgcttgctttgatggatggccttgattcacgtgggcaagttgttttgattggagcaactaacagaattgatgccattgatggagcattgcgtagacctggccgatttgatcgtgagttttattttcctttacctggctatgaggctcgagcagaaatactggatattcatacaaggaaatggaaggatcctccaccgaaggaactaaagatggaacttgctgctagctgtgtgggctattgtggagctgatttgaaggcattatgtacagaagcagctattagagcatttagagagaagtatcctcaggtctacactagtgatgacaagtttgtcattgatgttgattcggtcagtgtcgagaagtaccactttttggaagctatgtctacaataactcctgctgctcacaggggatctattgtgcattcaaggccactttcaacagttatcgctccatgtctgaagagtcatcttgagaaaataatggaacatatttctgatattttccctttcctttcatccatagattttagcaagttctctgctctctcctatggatcttccatccctcttgtttatagacctcgccttttgatatgtggtggtgaaagtgtcggactggatcatgtgggaccagctgttttgcatgagcttgagaagttctctgttcactctttgggactgccgtctcttctctctgatccaagtgcgaagacacctgaagaagctcttgtgcatatctttggggaagccaagagaacaaccccgtccattctatacatacctcagttccatctttggtgggatacgtcaagtactttctttatgttacaggcacacgaacaactaagggctgtgttgttgactctgttgaacgagttgccctccaaccttccagttttattgcttggaacatcatcagtggtttttactgaccttgaagaagagtgtgcttccatattctcttctcgcaatgtgtatcaagtggatcaaccaagttttgacgatagattgaggtacttcagtatattgtttgagtcattgctctctttccaaatggaagaatcaagaaacaagtcaaagaaacagaagtctgctattgaccttcccaaagccccgaaagaagtggagggccctaaggtttctgagctaaaggctagggcagaagctgagcagcatgctgttcgtcgaatgaggatgtgcctccgagatatctgtaatcgcattttgtacaacaaaaggttcaatgtatttcacttcccagtattagaagatgaggtgcctgactatcgatcaataatccacaagcctatggatatggctactgtcttgcagcgggtggactctggacagtaccttaccagggcagcatttataaaggatattgatcttattgtctcaaacgcaaagacttacaacggggatgactacaatggatctaggattgtcagtagagcatgtgaactcagagatgtggtccaaggcatgttgtcacaaatggacccatctttggtgtccttctgtgataaaattgcttcacaaggggggccactgcaggctgtggatgatgaagatagagctattcttcaagcagcacctgttgctcagctggtttctggtactagaataagtgcaaggcttcgaaatgtacagcctgaagtaaacctgtcacaaagttatgaagtgctaaggcggcaaaagaaaagtgcagaaaatgaacaaagcatgactagagatgaaaagtctcctgaagatgtagatttgtcgaagccaactgacgcagaagaagctgcaaaagaaccagagtcaaatggcactacgaaagaagccaacgattcaccagccaaagaaccagaagtatctacttcccctgaacccatggagagtgacaacggcaaaattgccgcggctactggcgacgacttgttagaacagctagaagccctgaagcaacgcttcatggaactcactgcaagctatggcgtgccgcagctcgagaggctgtattccaagataatgaaaggagcaatagagttgacaagtaaagaaagcaacgaggatcataggcggttagtagttaggtatttgtggacattcgttgagaacagcaacaatttttaacctggcgccaataagattcttgttttccttgtacatcctctttggaacgaaacaatagtagccgttcatcttgggagttgtccccgttccatgccttgtaacaaatcttccaaatgctctagtgtcagtgacacagttttgccatgaaatgatgtagcaagtgaacccttcctagatttgtacctcagtttgatgaatttatgaggtggaattccctcttaatgcataacatgtgttaccatgcttgttatcttaggccat

SEQ ID NO: 3476 - DNA, 1499 bp, Zea Mays
gagcgttgcacttgcagctgatctcatctgatccgatcaatcaacgtgacatgatctgcagacgctcgcctgcccaccaaatcggcaaatcctggcgtacaggaggacgacccaacccaagcggcacacaagatccaagaggatgccgccgccgccgccgctcgtgctgctggcgaagccgctgttcccgaacttcgcggcggcgctggagggccggtaccgcctcgtcctggccggggacgccgacgcggccacggcggcggaggcccgggtcctgctcgtgccggggctcgtggccgtgacagccgagctcgtcgaccggctcccggcgctggagctcgtggccgcgacctccgtcgggctggaccacgtggacctccgtgcctgccgccgccgcgggctcgccgtcaccaacgccggcgcggccttctccgtcgactccgccgactacgccgtcggcctcgtcgtcgccgtgctgcgcagggtcgccgccgccgaggcgcatctccggcgcggcgggtgggctaccgatggcgagtacccgctcaccaccaaggtgagcggcaagcgggtggggatcgtggggctcggcagcatcggctcgctggtggcgcggcgcctggccgccatggggtgccgcgtcgcctaccactcccgcgcgccgaagccgtcgtgctcgtgcccctacgccttcttccccacggcgcgcgccctggccttggccagcgacgtgctggtgctgtcgtgcgcgctcacggaggagacgcggcgcgtggtgggccgcgaggtgctggaggcgctgggacagggcggcgtgctggtcaacgtcggccgcggcggcctggtcgacgagccggagctggtgcggtgcctgcgggagggcgtcatcggcggcgcggggctggacgtgttcgaggacgagcccgacgtgcccgcggagctcctcgccatggacaacgtcgtgctgtcgccccacagggccgtgctcacgccggagtccatgcgcgggttgctggatgtcgtcgcgggaaacctcgacgccttcttcgccggcaggccgctgctcagccccgtgtcgctgtgaattctgaaccacatgtaggatagatacgtcaagtcgtcaagttccattccatccaagaagcatcaaccagacaaccagtgtgtgagactcaccacgaacaatacggaagaacactcagaattggtagggtggttcgggtttcttactttctgttccaagttcatcatccaaaagccaaatttcaaaatgacaacagttcgtcttttatacttgctactggaaaaccaaaacgaattggaatatattacagccagttggctccaccataattgggattcgccttcttagctctatcagtcggctggttcctgtagtcgaatcggcacggtccttatgtagtgcattctgtcttgacaagttgctgacatattcccctcctcgagcttgtccctaaaccctagttggtgcaaaagaa

SEQ ID NO: 3477 - DNA, 1924 bp, Zea Mays
ctcagtgacccgcatggattagcgagacagtcaataaaagggataagtggctgttctggagactgtagctgtcattacacatgacaagaagaagaatgattcacaacatactaattccccaaaacctttccaaataggtgacatgtttggaggccaagatgaaacctccgatgacttggaaactgtgattgataaagaggataatgtttttgtgatgtcaaatcgtaaaacaaagtatccaactcttcagctagatttacgattgattaaagatctggtaattataatcgtttcagctactggtggtggtatcatgttctcttttatggggcagccggttatcgttggctacctgcttgctggttctctagttggacctgggggtttgaactttatcaatgaaatggtgcaggtggagacttttgctcaatttggtgtagtgtttcttctttttgctcttggtctcgagttttcactgactaagttgaaagtcgttggtcctgttgctgtacttggaggtctgcttcagattgttctgttcatgttcttgtgtggcctcactgcagcgttgtgtggtgctaaatcatctgaaggagtgtttgttggtgccttcttgtctatgtcatctactgcagtggtttcgaagtttttagtggaaaaaggtagtacaaacacgcttcatggtcaagttacaattgggacgctaatacttcaggattgtgcagttggcctgctgtttgcactccttcctgttcttggaggtgctagtggcatttttggaggagtgatgtcaatggcgaaactgttgctagtgctatccgtatttgtagctgttacatatatgatgacatggtcaattgttcctcgattcttaaaactgatgattcagttatcttcacagtgcagtgactattgtggattgagtcttgagttggggtcatttcttgctggtgttatgatatcaaccacagattttgctcatcatactatggagcaggttgaagccattcgcaatctatttgcagcactcttccttgcaagcattggaatgctcatacatgttaagttcttgtggaatcatgttgacatattacttgcagctgttatactggttataatagtaaagagtattgtcgtagctattgttgtaaaggcatttggatacagcatgaggaccgcttttgttgttgggctgtccttggctcagataggagagtttgcttttgtgcttttgagccgggcctcccatctccatcttgttggggggaaaatgtatctattattactgggaacaactgcccttagcttggtaacaactcctctcattttcaaactaattcctgtggtaatgcaccttggcatccttatgcgttggttcccctcggaaaacagtatgcagagtgaggaaaaggcggttatgcttgaagcccacaacagatcactctaacattgcctagccacaacattcttttgactgacggtgatttatttgtgcatcgactctttgcgcatgccatggaaacattggagaaacaattacacaccagtactccctttttgcggcgatatgggaacacgatgggatggacagagttaacagcttggccagccttggggctctccgtatagcattcttttttattgcgcttttgagttgtacatataggggatactgtacatgtcgtcaaggtagcatacagggggaaggcgccgatgggccttggttttgtatcattgttgccaactcgatcagtcgacagtctagaaagctagatagggatttttggtacctcgtgctcaaatgtacacttattgtcagaagacgatgggaaagttgtatgttatgtatttgttatgcccttgtgacgactaattgaccatggacacatgaatggtaacgtgttcaccgtatcgattactccct

SEQ ID NO: 3478 - DNA, 1161 bp, Zea Mays
gtacaacactgtgaccaaggaatcgggctttagggatccctatgtccagtaccaccacctcgcctccgccgccggccgccggggaccatccccgcgttctgctccgaggtttcctctcccgtgagacatgcaaggagctggagttcgtgcaccggagctgcggcgcagcggggtaccgcccctcggtgatatcgacatctctgccgcacctggcggccaccggctgcggccacctcctgctcccgttcgtgcccgtccgcgagcgcctccgcgacgctgtggagtccttcttcgattgccacttcgatctcttcatcgagttcaccgggcttatcagttggtgcaagggagcttctattggatggcacagtgatgacaacaagccttatcttaggcaaagggcattcacagcagtttgctacttgaacaatcatggagaggactataagggtggaattttgcagtttcaggatggtgatccttcctgtattgttccagttgctggtgatgttgtcatatacacggctgatactcgtaatgttcattgtgtaaatgagtctggttttgacatacgatgtgctagagtgcatattctggggtttagttttcactcaagtagtggtgaatgcaatatatctgcgtcaccagctgaagatgacccaatagagttgcttggaaagcaactgcggctcgggaggggagatgatgtctttgagaaaatattttctaacagcttacatgctcttcaggtggtgcaattctactactggaaaaaacatgagctggcagcaaggagggaacaaagtgttgttagttcaggaacagtctgctgtccagttacacatcattcaaaaggaacagaattaccattaccatgcaatcacgcacttgcacaaactatatttggatcatataatactgaggagattgtccagtggaatgattttgcattagctgttgctatgtgggaaaaatattcagaagagttaaagaaacagttgttgacatttttgccatattggttgtccaatgaaaccatttatgttgttgatacctctgagctgcagagagccgaaccaatctaactctccaatggtgatttggactgcctcattcttatgcgacatagctgtggcgtagatatgtttctctcaagctcca

SEQ ID NO: 3479 - DNA, 5876 bp, Zea Mays
gtgggcccagcggggaccaagaggagagggagaccgttcctcttcctcgcctcacctcacctctccacctgccgtcgtcttcctttcgttcctagacacgctagacttggctttggccataccttggactccccttccctctcctctccccgtctcccggcgtgcgtgcgtactacttactgcttgtccaatcgccgcgaccagagctcccgcgcacgctactggagaggattccagcgcccgtcgagcaacaggactctagcgcccgacccgacaaacgacagatagtagctactgcctccctacaccgtctcggcatctccgggggcacggcacgggaacggaggagcggagaaatccatccgccgaaccgcttgctttgcttggcaggcaccccgtacaattgggggttccggttcgaggaacgctcgggggggcgtgtgtgcggccgccttcgctcctcatccagaccacttgattacgccgcgctccctacgacaggaggtgcccaggccgaggtccttcgccggcgacgagcaccaaccagccaattccagagcaaccaaccgcaagggcatgtgacaaactgccgcctgcggtgccttcgccccaggcaatgtgctccgacatggatcagcgcgaccaccacgcaaccagggaggctgcaccagaggctaatggttaccatcacagcccccatggtgtggaccagagtcaggttgtggatgctgataagcatataaaccatcattccacagacgacaatgctccctccagcgcttcaggccacagacatggtggtatcagccgtcatgcatccacatcttctgttgatgaccgctccatcaagtctggtgacgattctgatggggccgagagtaccaatggcagaagcagtaacacggagatctcgtttctagaaaatgataccgtctggataccacctcaagcggcagataaggaggatgaggcccagagttttgctacaagcattgcttatgacgacgacgatgacgattatagtgatgggataaagtggggccagtcaagtttcccatcccctggtaagcagcatgacgccggcactagcaatcatagggaggtacgagaaaaagcgatgctagaagctatgaatggccagctgaagatacttgtcagtcggtttctcgcatctgttggcattccgtcttcgaacgaggaggctagcgatagctggcttgacattgtcacctccctgtcatgggaagcagcgctacttatcaaacctgatggtagcatgggaaaggaaatggaccctggctcttacatcaaagtcaaatgcatagcatctggtactcgccggcaaagtgaggtgatcaaagggttagtattcaagaagaacgctgctcataagcacatgccgacaaattgccacaatcctaggcttctacttgtcaaaggagtccttgggcattctgatgtcggtttgtcgtcgtttaattcaatgggtcaggaaaaggacctgttggagagagctatcggtaaaataatggagatatgcagtcccaatgttgttctggtcgagaaaactgtttcacgaaacattcaagaacttcttctgaaagaagaagttttggataaaccgaagctgaagcaatgtgactactttcatatcggaaaatttaccgaggagcacaacaatgccagtgagggtggaaagatgacatctaaaacattaatgttcttggaaggctttccatgtccactcggttgcacgatcttgctaaaaggagcaaacagtgaagaattgaagaaggtcaaacaagtaatgcattttacagtctttgcagcatatcacttgatccttgaaacatctttctttgaagatcaaagggtttttctgaatgatagtactacaaaagaaacttctgctactgctacagaagggacttatggtgttgctgctcttagtgggcctattcctaactttccttcacatgatgattctccggcacttagactgttccatgccacttctaatagctatgctgatgtgaacaaacctttgatatctccaagaaatgtggataaattcagtgcagtatccagcagctcttcaaatgaccttgaacaaggtgcaaatgtcaggtccaataatgccgagaggttaacattaccagtccaagggccactaaggaaattgttcgctgacatgttatgtcaccagaatatttacttacccgttacatcattgcaagaggcaaatgataacaggaaggaagtcagggttgaatccagtcaagaaactgttagtaatggtttccataggccaaagacaggagagtctgtgatttccattgaaaatggggagtccataaatgatgcccagacacaagaaattactcaagcaataatgccaactggttcttctgtaagtgataaggatgcagaatcacctgttatgggagacaatggggcacatagtactacaagtatcattatcaaagagaagcatgctgacggcgatcaagctgatgatgcacttgattctcacagcatactgattttgatgtctagccagtgcacagaaaagcaggttatctgtgaacaaagccatttaacccgtataaaatactatgggagttttgatgtgtccttggggcgatatttgcaagacattctacagaatcagcagaaactgagttgctcttcatgtggagagcctccagagtcgcacatgtactcctacacgcaccgcaatggaaatttgaccgttctagtgaaacgtctggtgcccaaacactatttgcctggcgaatctgaaggaaaaatatggatgtggactagatgctcaagatgtgatcatgaacatggggtatccaaaccaactccaagagtactaatatcagctgaagcacgcaacctctcgtttgggaaatttctggagctcagtttttcaagccactctgcagcaagaaggttatctatatgtggacatctggtcaacagggattgcttgcgtttttttgggctgggctctaaagttgctatgttccggtactcacctgttgaaatttacactacctgcaaaccacaacctactctccaattcgtcaaccccatcagacaggattggtttgaaggacaaaggagaaatgttcatgctaaaagtatggcacttttctctggggttgcaagatttctacagaacttgaagaatgaacatcctgatgcaataacattagcagtcaattgtggcctcacactccctgttaaggacttcactgaactagaagagttgttgataaaagaaaaggcccagtttgagagttctttggacaaggccactgacgaaaatgggaaaccattcgggtctgtgcatggagtattgaatataaattggtactatcaggatcttctacttaagctttacatttgggaccgccgtctatatcaactattctattgcaaatctgtccaactagaaagttgttctaattacaagaatcctgctggtactgttgatgggaactgtgatgataactttggtgttgataagaaaatcggtgaaattacatctgatgaaattacggcagctttgggggtatccagtaccatggagtctgcaagtaacaaacttgatcatcaatcaggtgacaccacagcactcttacttcataaaagccaggaagctgggcactcggaatttccttgcaatggaggtagtaaagctgaagaatcttctattgctcatggtcaaataaaggtagatggcacaacagaaaccacaaatgatccttgttttgaaatatccaatgatatggaggtccaggccaatcttacagtagcagatccaatacccatggaacaggagcgttgtagcactccccaacaattcaaatatccttattgggatgacagggagaggtggatttggaattcattttctgagtctcaaatggcttacagggatgacattgaaattggatatttgggcaaatttgaactcattaacaattatttgccacattatctttctcccttgtttgaacaacatgatgattcatactctccgcagttcgcggtaggtccaggtagtaatattttgtgcataatggaagatgagatatccagcataatagctcgtgctcttgccatatctgatgaacgccaccatttgatagatttaaaattcgagaacggaatggattattccaaaggagagtatgctaaagcaatagagaaatcttttagttttctgtctgaaagttctttcagctcatcaccatggtcatctacagattctgaagcaagcttatcgtctctgtcttcattttcatctgatgacttttctggttatgatagctcatctttattgtccccaatgcatccagaaatgactgtgaatgggaaagtaactctcaaagacaaatattcagttactgttgtatatgacaatcaattctttgcactccgaaaaaagtgttgcccatccgagcttgcatatattacttctttaagccgctgcaagaagtggaatgctcaaggtggaaagagcaaggcctattttgcaaagacgacggatgacagccaaacttgtctcgccaaaatattaggaatctatcaggttaagcaaattaagcatggtaaagaggtaaagattgacttgatggtgatggaaaatcttctctttggccacaatatttcacgaatttatgacctcaaaggtgctacattttcgcgacgcatcactgactcaaatgatcatgatactgtttacctggatcaaaattatgttgaggacatggggttttctccaatctatattggtggaagaacaaagcatcttttgcagcgtgcaatctggaatgacacggcttttctcacttcggtgaatgtcatggactattctctacttgtgggagtggacaaagagaagcatgaacttgtgtttggcatcattgattatctgaggcaatatacttgggacaaacaactggagacatgggtgaagacttctctggtagtacccaaaaatgttttaccaactgtaatttcccccaaggaatacaaaaaaaggtttaggaagttcatggcgaagtactttctgtcagttccagacacatggagtcctgataatccgtctaagccatgcaaatcccttggtcagagcaatcgcaagttggcggaagtccagaatggtgataacctgtcagagcacccaaatgaagttgaggggtgtgcctaatcatgtgcaggatttcctggcagttttgttgaatcctatcatgttgttgtttggctatatttcactttgtaaaatggtgtacatagaaggacctcactgttgatttatccaaaagtttgcggtttttaggcaaattgttgggcaagtgaggtccacaggacgtgtacctatgttcattgttaatttcacaattattatagtgaaattaagaattcatatgatcatttttttggacctaccacttgtgagactgaagcagtctattcttcacttatgactaactgtccaagaccaagatagacatttcctacctctattgaaattaggtcaatttgagtattatgttgtactgtgtacccccactgtactgctgggatatgtaaaaggttccgtataaatgtctgctcccctgaccttgtttgttgcacgcagcacaatacatattttgtgtttgatggatgtccagtttctgtattgctgcccacttgcacttttttttggttctgcacaatgtacaaccttttcagatctcctggtatagaacatattgcaagctattttctttcgtaaaccgagttacattgttactcagaatgggtaagaataagttacttagtttgttcaatatgcatttatactctgaaaccat

SEQ ID NO: 3480 - DNA, 6136 bp, Zea Mays
gtgggcccagcggggaccaagaggagagggagaccgttcctcttcctcgcctcacctcacctctccacctgccgtcgtcttcctttcgttcctagacacgctagacttggctttggccataccttggactccccttccctctcctctccccgtctcccggcgtgcgtgcgtactacttactgcttgtccaatcgccgcgaccagagctcccgcgcacgctactggagaggattccagcgcccgtcgagcaacaggactctagcgcccgacccgacaaacgacagatagtagctactgcctccctacaccgtctcggcatctccgggggcacggcacgggaacggaggagcggagaaatccatccgccgaaccgcttgctttgcttggcaggcaccccgtacaattgggggttccggttcgaggaacgctcgggggggcgtgtgtgcggccgccttcgctcctcatccagaccacttgattacgccgcgctccctacgacaggaggtgcccaggccgaggtccttcgccggcgacgagcaccaaccagccaattccagagcaaccaaccgcaagggcatgtgacaaactgccgcctgcggtgccttcgccccaggcaatgtgctccgacatggatcagcgcgaccaccacgcaaccagggaggctgcaccagaggctaatggttaccatcacagcccccatggtgtggaccagagtcaggttgtggatgctgataagcatataaaccatcattccacagacgacaatgctccctccagcgcttcaggccacagacatggtggtatcagccgtcatgcatccacatcttctgttgatgaccgctccatcaagtctggtgacgattctgatggggccgagagtaccaatggcagaagcagtaacacggagatctcgtttctagaaaatgataccgtctggataccacctcaagcggcagataaggaggatgaggcccagagttttgctacaagcattgcttatgacgacgacgatgacgattatagtgatgggataaagtggggccagtcaagtttcccatcccctggtaagcagcatgacgccggcactagcaatcatagggaggtacgagaaaaagcgatgctagaagctatgaatggccagctgaagatacttgtcagtcggtttctcgcatctgttggcattccgtcttcgaacgaggaggctagcgatagctggcttgacattgtcacctccctgtcatgggaagcagcgctacttatcaaacctgatggtagcatgggaaaggaaatggaccctggctcttacatcaaagtcaaatgcatagcatctggtactcgccggcaaagtgaggtgatcaaagggttagtattcaagaagaacgctgctcataagcacatgccgacaaattgccacaatcctaggcttctacttgtcaaaggagtccttgggcattctgatgtcggtttgtcgtcgtttaattcaatgggtcaggaaaaggacctgttggagagagctatcggtaaaataatggagatatgcagtcccaatgttgttctggtcgagaaaactgtttcacgaaacattcaagaacttcttctgaaagaaggtgtcactctaatttttgatttgaaactcaaccggctacaaagaattgcgcgctgtactggctctcccataatatcgttttcagaagttttggataaaccgaagctgaagcaatgtgactactttcatatcggaaaatttaccgaggagcacaacaatgccagtgagggtggaaagatgacatctaaaacattaatgttcttggaaggctttccatgtccactcggttgcacgatcttgctaaaaggagcaaacagtgaagaattgaagaaggtcaaacaagtaatgcattttacagtctttgcagcatatcacttgatccttgaaacatctttctttgaagatcaaagggtttttctgaatgatagtactacaaaagaaacttctgctactgctacagaagggacttatggtgttgctgctcttagtgggcctattcctaactttccttcacatgatgattctccggcacttagactgttccatgccacttctaatagctatgctgatgtgaacaaacctttgatatctccaagaaatgtggataaattcagtgcagtatccagcagctcttcaaatgaccttgaacaaggtgcaaatgtcaggtccaataatgccgagaggttaacattaccagtccaagggccactaaggaaattgttcgctgacatgttatgtcaccagaatatttacttacccgttacatcattgcaagaggcaaatgataacaggaaggaagtcagggttgaatccagtcaagaaactgttagtaatggtttccataggccaaagacaggagagtctgtgatttccattgaaaatggggagtccataaatgatgcccagacacaagaaattactcaagcaataatgccaactggttcttctgtaagtgataaggatgcagaatcacctgttatgggagacaatggggcacatagtactacaagtatcattatcaaagagaagcatgctgacggcgatcaagctgatgatgcacttgattctcacagcatactgattttgatgtctagccagtgcacagaaaagcaggttatctgtgaacaaagccatttaacccgtataaaatactatgggagttttgatgtgtccttggggcgatatttgcaagacattctacagaatcagaaactgagttgctcttcatgtggagagcctccagagtcgcacatgtactcctacacgcaccgcaatggaaatttgaccgttctagtgaaacgtctggtgcccaaacactatttgcctggcgaatctgaaggaaaaatatggatgtggactagatgctcaagatgtgatcatgaacatggggtatccaaaccaactccaagagtactaatatcagctgaagcacgcaacctctcgtttgggaaatttctggagctcagtttttcaagccactctgcagcaagaaggttatctatatgtggacatctggtcaacagggattgcttgcgtttttttgggctgggctctaaagttgctatgttccggtactcacctgttgaaatttacactacctgcaaaccacaacctactctccaattcgtcaaccccatcagacaggattggtttgaaggacaaaggagaaatgttcatgctaaaagtatggcacttttctctggggttgcaagatttctacagaacttgaagaatgaacatcctgatgcaataacattagcagtcaattgtggcctcacactccctgttaaggacttcactgaactagaagagttgttgataaaagaaaaggcccagtttgagagttctttggacaaggccactgacgaaaatgggaaaccattcgggtctgtgcatggagtattgaatataaattggtactatcaggatcttctacttaagctttacatttgggaccgccgtctatatcaactattctattgcaaatctgtccaactagaaagttgttctaattacaagaatcctgctggtactgttgatgggaactgtgatgataactttggtgttgataagaaaatcggtgaaattacatctgatgaaattacggcagctttgggggtatccagtaccatggagtctgcaagtaacaaacttgatcatcaatcaggtgacaccacagcactcttacttcataaaagccaggaagctgggcactcggaatttccttgcaatggaggtagtaaagctgaagaatcttctattgctcatggtcaaataaaggtagatggcacaacagaaaccacaaatgatccttgttttgaaatatccaatgatatggaggtccaggccaatcttacagtagcagatccaatacccatggaacaggagcgttgtagcactccccaacaattcaaatatccttattgggatgacagggagaggtggatttggaattcattttctgagtctcaaatggcttacagggatgacattgaaattggatatttgggcaaatttgaactcattaacaattatttgccacattatctttctcccttgtttgaacaacatgatgattcatactctccgcagttcgcggtaggtccaggtagtaatattttgtgcataatggaagatgagatatccagcataatagctcgtgctcttgccatatctgatgaacgccaccatttgatagatttaaaattcgagaacggaatggattattccaaaggagagtatgctaaagcaatagagaaatcttttagttttctgtctgaaagttctttcagctcatcaccatggtcatctacagattctgaagcaagcttatcgtctctgtcttcattttcatctgatgacttttctggttatgatagctcatctttattgtccccaatgcatccagaaatgactgtgaatgggaaagtaactctcaaagacaaatattcagttactgttgtatatgacaatcaattctttgcactccgaaaaaagtgttgcccatccgagcttgcatatattacttctttaagccgctgcaagaagtggaatgctcaaggtggaaagagcaaggcctattttgcaaagacgacggatgacaggttcatcattaagcaaatcaagaaaacagagtttgagtcatttattaaatttgcacctgattactttaagcatgtttaccattctctggacactggaagccaaacttgtctcgccaaaatattaggaatctatcaggtaattatatcacgagctcgagttggattcgtttcgttttactgttttctttcccatgtggactaacttgcctgtttcaggttaagcaaattaagcatggtaaagaggtaaagattgacttgatggtgatggaaaatcttctctttggccacaatatttcacgaatttatgacctcaaaggtgctacattttcgcgacgcatcactgactcaaatgatcatgatactgtttacctggatcaaaattatgttgaggacatggggttttctccaatctatattggtggaagaacaaagcatcttttgcagcgtgcaatctggaatgacacggcttttctcacttcggtgaatgtcatggactattctctacttgtgggagtggacaaagagaagcatgaacttgtgtttggcatcattgattatctgaggcaatatacttgggacaaacaactggagacatgggtgaagacttctctggtagtacccaaaaatgttttaccaactgtaatttcccccaaggaatacaaaaaaaggtttaggaagttcatggcgaagtactttctgtcagttccagacacatggagtcctgataatccgtctaagccatgcaaatcccttggtcagagcaatcgcaagttggcggaagtccagaatggtgataacctgtcagagcacccaaatgaagttgaggggtgtgcctaatcatgtgcaggatttcctggcagttttgttgaatcctatcatgttgttgtttggctatatttcactttgtaaaatggtgtacatagaaggacctcactgttgatttatccaaaagtttgcggtttttaggcaaattgttgggcaagtgaggtccacaggacgtgtacctatgttcattgttaatttcacaattattatagtgaaattaagaattcatatgatcatttttttggacctaccacttgtgagactgaagcagtctattcttcacttatgactaactgtccaagaccaagatagacatttcctacctctattgaaattaggtcaatttgagtattatgttgtactgtgtacccccactgtactgctgggatatgtaaaaggttccgtataaatgtctgctcccctgaccttgtttgttgcacgcagcacaatacatattttgtgtttgatggatgtccagtttctgtattgctgcccacttgcacttttttttggttctgcacaatgtacaaccttttcagatctcctggtatagaacatattgcaagctattttctttcgtaaaccgagttacattgttactcagaatgggtaagaataagttacttagtttgttcaatatgcatttatactctgaaaccat

SEQ ID NO: 3481 - DNA, 1282 bp, Zea Mays
tccactccgctccatcctcactccctcccgatgccttccacttccctcgccgtccccaccggcgccgtcggcgtcgccggctctcgccgctatccattcatcagcaaccgatcagcctcaagcgccccgcgcctccgccgcgcgccccggctcgtcatggtctccgcctcggcgtctctcgaggccctcatctttgattgcgacggcgtcatactggagtcagagcacctccaccgccaggcctacaacgacgcgttcgcgaacttcggggtgcgctgcccgccgggctccgccgacctgctgtactgggacgaggccttctacgacaacctacagaaccgcatcggcggagggaagcccaagatgcggtggtactttggggaaaatgggtggcctccttcaaagatctttgagacaccaccttcgactgactctgataaggagaagctggttgatataattcaggattggaaaacagagagatacaaagaaataataaactctggaactgtgaagcctagacctggtgtcttgcagttgatggatgaagtaaaggatgcgggtatcaagcttgctgtttgctctgcagcaactaaaagttcagtcataatgtgccttgaaaaccttattggacttgagcgatttaatggcctggattgcttccttgctggtgatgatgttaaactaaagaagcctgatccaacaatatatataacagcatcagagaaattaggtgtggaaagcaagaactgccttgtggttgaggatagtgtcattggattacaggctgcaaaaggagcaggaatgtcatgtataataacatatacaccttcaactgctagccaagatttcaaggatgcaattgctacctatcctgaccttaataatgtcagaaaactcttgttactggatagcaaagtgtcttgttttccccaaagaatacattgaaaattttcttgatgcatgataatccacgctattattccctggatgttgaacagttggtgatgagtgttgaacagtagatgaatccaaacatacatcttgttgaacagttggtgctggatggtggaaggcatgattactcagatagataattaatgcaactagaaagatagatagttacgattgttaaaacttttgttgtgaagagtgatacaattgttgtgtatcgaaaaacaattttatcttacattttggagagaaaaattattatctcggggtgcccctcacatcgtgttttacaactgaaattgagaagttcatatgtgataaagtcttg

SEQ ID NO: 3482 - DNA, 1627 bp, Zea Mays
ccgagcagcggagggggcggcaaaacatttcttgtttgtttattgcgccgaaaaaactaacagacccagaaaaggacagaaagaggctgcacagtaggcgcgtatatttggcagcaggagcggcctcgtcgtgccccgtatcactcctcagttgcttcgacgtatttctctctctatctatacgattccgaagaaggtagagagagaaactcgaaggggagaggacagaagagggagatacaggtaccagatcatctgatttctcagaagcaaaatgttgtttggagctcagtgacaccatcttgtaatgcctgtgattttacgggaaatggaggatcattctgtccatcccatgtctaagtctaaccatggctccttgtcaggaaatggttatgagatgaaacattcaggccataaagtttgcgatagggattcatcatcggagtctgatcggtctcaccaagaagcatcagcagcaagtgaaagcagtccaaatgaacacacatcaactcaatcagacaatgatgaagatcatgggaaagataatcaggacacaatgaagccagtattgtccttggggaaggaaggctctgcctttttggccccaaaattacattacagcccatcttttgcttgtattccttatacttctgatgcttattatagtgcggttggggtcttgacaggatatcctccacatgccattgtccatccccagcaaaatgatacaacgaacactccgggtatgttacctgtggaacctgcagaagaaccaatatatgttaatgcaaaacaataccatgcaatccttaggaggaggcaaacacgtgctaaattggaggcccagaacaagatggtgaaaaatcggaagccatatcttcatgagtcccgacatcgtcatgccatgaaacgggctcgtggatcaggaggacggttcctcaacacaaagcagctccaggagcagaaccagcagtatcaggcatcgagtggttcattgtgctcaaagatcattgccaacagcataatctcccaaagtggccccacctgcacgccctcttctggcactgcaggtgcttcaacagccggccaggaccgcagctgcttgccctcagttggcttccgccccacgacaaacttcagtgaccaaggtcgaggaggcttgaagctggccgtgatcggcatgcagcagcgtgtttccaccataaggtgaagagaagtgggcacaacaccattcccaggcacactgcctgtggcaactcatccttggctcttggaactttgaatatgcaatcgacatgtagcttgagatcctcagaataaaccaaaccttcagttatatgcaagccttttttgaggttgctgttgctgtacctgagaactgtggttaggttatgagtttgttcctcaaaactgacccatacatgacatgctaccttgtgctgagtttctgagacaaagccatcgaaacatgatcttgtggttcagtactttgctgccattagtgtctgataaactagctccccagtttgcagtttctctgaattccagcatgtctagcctcagccaacgttttgcatttgatgtgacgatgacataccatacacatttgtgcattcatctatgttct

SEQ ID NO: 3483 - DNA, 2080 bp, Zea Mays
ccgagcagcggagggggcggcaaaacatttcttgtttgtttattgcgccgaaaaaactaacagacccagaaaaggacagaaagaggctgcacagtaggcgcgtatatttggcagcaggagcggcctcgtcgtgccccgtatcactcctcagttgcttcgacgtatttctctctctatctatacgattccgaagaaggtagagagagaaactcgaaggggagaggacagaagagggagatacaggtacactgcccctgacccctcctcgattggtcagttctgttcttgagcgcactgccaccacagattggacggcttgtctgctctccgttcccggagtggcgtcgtgctcactctgctgggttgctttgccttatagtcttgctctgcggtttgatttgcttcatctttttttttcttcaatcttgtcactcctaaggtttcccccctctggttttcttgattccccgcttgggaatttgtgaagtttaacaggatttttttggctgagttcgcatgtttctgttcttggccatgcccatgctatgcttgcttggataagctttggcttcagcctagctcgcattgcacgatgcgttgttcctacttcctagaatccgatcgcaagtcctatgagctgaccactatttcgtggattgcccggggcgtgggctgctgatggtttcggcaatttgggtaccagatcatctgatttctcagaagcaaaatgttgtttggagctcagtgacaccatcttgtaatgcctgtgattttacgggaaatggaggatcattctgtccatcccatgtctaagtctaaccatggctccttgtcaggaaatggttatgagatgaaacattcaggccataaagtttgcgatagggattcatcatcggagtctgatcggtctcaccaagaagcatcagcagcaagtgaaagcagtccaaatgaacacacatcaactcaatcagacaatgatgaagatcatgggaaagataatcaggacacaatgaagccagtattgtccttggggaaggaaggctctgcctttttggccccaaaattacattacagcccatcttttgcttgtattccttatacttctgatgcttattatagtgcggttggggtcttgacaggatatcctccacatgccattgtccatccccagcaaaatgatacaacgaacactccgggtatgttacctgtggaacctgcagaagaaccaatatatgttaatgcaaaacaataccatgcaatccttaggaggaggcaaacacgtgctaaattggaggcccagaacaagatggtgaaaaatcggaagccatatcttcatgagtcccgacatcgtcatgccatgaaacgggctcgtggatcaggaggacggttcctcaacacaaagcagctccaggagcagaaccagcagtatcaggcatcgagtggttcattgtgctcaaagatcattgccaacagcataatctcccaaagtggccccacctgcacgccctcttctggcactgcaggtgcttcaacagccggccaggaccgcagctgcttgccctcagttggcttccgccccacgacaaacttcagtgaccaaggtcgaggaggcttgaagctggccgtgatcggcatgcagcagcgtgtttccaccataaggtgaagagaagtgggcacaacaccattcccaggcacactgcctgtggcaactcatccttggctcttggaactttgaatatgcaatcgacatgtagcttgagatcctcagaataaaccaaaccttcagttatatgcaagccttttttgaggttgctgttgctgtacctgagaactgtggttaggttatgagtttgttcctcaaaactgacccatacatgacatgctaccttgtgctgagtttctgagacaaagccatcgaaacatgatcttgtggttcagtactttgctgccattagtgtctgataaactagctccccagtttgcagtttctctgaattccagcatgtctagcctcagccaacgttttgcatttgatgtgacgatgacataccatacacatttgtgcattcatctatgttct

SEQ ID NO: 3484 - DNA, 2067 bp, Zea Mays
ggttcatcgggcacgtctgaatggccaagaggttgtgatcaaagtgcaacggcctggtctgaaggagctgttcgatattgatctgaagaatttaagggtaatagctgaataccttcagaaagtggacccaaaatcagatggcgccaagagagactgggttgctatttatgatgagtgtgcatctgttttatatcaggaaatagactatatgaaggaagcatttaacgctgaaaaatttgctgaaaacttcaaaaaattggattatgtgaaggttcctgaaatttactgggcacacactactcctcaggttttaacaatggagtatgtcccaggaattaaaattaacagaataaagcagttagataagttaggagtcgatagaaaaagattaggtcgttatgctgttgagtcctaccttgagcagatcttatcccatgggtttttccatgctgacccggaaacattgctgttgatgatgtcaatggagggagacttatcttctatgacttcgggatgatgggaagtatcagtcaaaatattcgggaaggattgcttgaagtattctatggagtttatgaaaaggatcctgacaaagtgcttcaagcaatggttcaaatgggtgtccttgttcctactggagatatgactgctgtcagaagaaccgctcaatttttccttaatagctttcaagagcgcctagcagcacaaaggaaggagagagaaatggcaaccgcagaactgggattcaaaaagcaattaactaaggaggagaagtttgaaaagaggaagcagagacttgctgcaatcggagaggatcttttggcgattgctgctgatcaaccatttcgcttccctgccacatttacatttgtggtcagagcattctcagttctagatggtattgggaaaggccttgatcctaggtttgatattacagagattgctaagccatatgccaaggaattgctaagatttaatgacgctggtgttgaaatagttgtgaaggatgcaaagaagagatgggaaaggcagtcccgtgccttttacaatttgttccgccaacccgatagagttgaaaagctcgcacaaattattgaacgtttggagcaaggtgaactcaagcttcgtgtcagaacgctggaatcagaaagagcatttcaaagagttgccgctgtacagaaaacaattggatatggagttgctgcaggtagtttgatgaaccttgcaacaatgttgtacttcaattcaatccggggaccagcaaccattgcatactccctctgcgcatttttcgggctgcaagttctgatcgggcttgtcaaggttaagaagttggatcggcaggagagactgataaccggtactgcatgagctatgagttattcacgatcaatcggtgaggactgaattacaccacttttcagcgttgtcgcgacacctttttttttcttttgcccaaattttacccccaccacgatttagcataggcatgccatacccccccttccgggttgtatgtaaatgtaatgataacatataaagatgtacatagtgtataatagacattctccttgtattgtttcgttttcatgatgtaccagtatgtacaggattttgtttcacatgctacctgattggtttgctggctgcgcatacccaggctatcgtcagacttgtggcgggtccgatatggacatttttggcgtaggcaaataacttcaaaaggacttattttgtatccgctcatggtactaacgtctctcgcgtgcaggcaattaaatatatgctcggccaaagtcaatgcacattggcgcataatgagatggtatggataaccaaactgatggatgatgattcaaggtgaaatgatcgatttggaaagtgatttttctatatctttctcacaactttattgctgacccgagtgtttgagattcgaacctagagcatatgatgacgtcgttactcaacatatcatcaacactactctagcctaacattgttgtgaatttaatctacaataactcttcgtcaaattgatatgttcttgaccttgttgaactatac

SEQ ID NO: 3485 - DNA, 1603 bp, Zea Mays
cacgtaccaccgcatcttgggcttccctccgccgatgcggttctgtaggttgtcgtagaaggcctcgtcccagtacagcaggtcggcggagcccggcgggcagcgcaccccgaagttcgcgaacgcgtcgttgtaggcctggcggtggaggtgctctgactccagtatgacgccgtcgcaatcaaagatgagggcctcgagagacgccgaggcggagaccatgacgagccggggcgcgcggcggaggcgcggggcgcttgaggctgatcggttgctgatgaatggatagcggcgagagccggcgacgccgacggcgccggtggggacggcgagggaagtggaaggcatcgggagggagtgaggatggagcggagtggagtaggcgccaacggcaacggtcgcttatctagctgactagctcttctcagggaatataccatccacagaaaaaaagcgccccgcctcatcccgagatcagaatcagaggccacgcggcgatggcgatggcgatgccgatggcagtggcgcgggtgaccagcctcgcctgcgccccccgacaggcgcagcatcgccgccgccatagccttgccccgccgtgcgcctcgggtgcggtggaggtgcgggtctgcacgaaccgcacgtgcgcgcggcagggtgggcgcgaggtcctggctgcgctcgcgggactcgcgccgccggcggtcgacgtggcctcctgcgggtgcctcgggcgctgcggcgccgggcccaacgttgcggcgtccgtccctgggagcgccgcggtgttcggccacgtgggcacggcggcgcgaggcgcgcagctactggagcacctcctcggccccgcggaattcgatgcggccctagggctcaccgcgctggccacgagggagaaggcggaggctgccctcgagaagggaaacgcggacgaagcggaagcccttctcaccgaggttattgggttcaatgcttgtggtggtctgcatttggtgtacatgagcaggtctaaggcgagattggaaattggggatatccctggtgcacttggggatgctgaggaagcaataagaatagctcccagatttcctcaggctcacttattgcgaggcgacgcactttttgcaatgggtgaatattctgtcgcggaagatgcctatgcagatgccttggatcttgatccatctattcgccggtccaagtctttcagggctcgcgtggaaaggctacgagagaagcttgttagtgccaataatccgtagttcattttgaagctctctctccatcagaagttcgatccacaagtaacgtagatatgttcttggtgaaggtaataatgctcacacactttgcaagccactggtcaggaattgattgttgccacagcttggaggatccaacagttcatatgaatggcttctggaattttctcatgattacatctggactgatgagaacaaactactaagtctcaactacaagtgttttgaaggtctccagacgaaaggaaaagtgaaggaattttgaaggattgaaatctaataagaaatttttctatgtgactctttggaacaaaggattgatctcctataaatcctataaaatt

SEQ ID NO: 3486 - DNA, 1238 bp, Zea Mays
tttgccgaatgtctttatacgtgtgtaaatgcactcgtgctggataagcagcctctggtccaagaaaaaaaaaaggttccaggttctcatcaggcagaggcagaggtcaccttctgctgctcaacgcaacactgcacatacatacatacagatgggttccgacttccgaggggccttctcccgtcaccaccaccgtccacgtcactgggttcaagaagttccacggagtcgccgacaaccccaccgagaagatcgtgcgcaacctcgcgtcgttcatggacaccagagggctgcccaagggcctggtgctcgggagctgcaccgtcctcgaggccgccgggcagggcgcgcttggcccactgtaccaactgctggagtccaccgtcgtctccggccggggacgtgggatgccggctcaggagcgagtgattctgctccattttggcgccaacagtggttcacataggtttgcgcttgagaatcgagctgtcaatgaagctactttccgttgccctgatgagctaggatggaaaccacaggtttgctataattttacggttgctctcatgtacaagcatgttaattctttgtgtcattatatcttcttggtttctttacactccagaggacgcctatcatatcatccgatggaaacatcttacacgcaagacagaccacactgccactgaaggaaataagcaagtctctccagcaaatgggatatgatgtgatgccttcagatgacgctggtcgatttgtgtgcaactatgtctattaccactcgcttaagtttgcagagaagcatggcatcacgtctctcttcgttcatttccccctcttcctggcaattgatgaggaagttcagatgcaatttgttgcctcccttcttgaagtcctcgcttccttgaacttctagtagtaacctgatggtagatctatctcttccagcggtgtattgttcccaatttatttggaagggttcccaatttacatgtggagtgaataagaatgaggaatcattcatggagttatgtgtgcttcaaaatgtgtaaaaaaacagctcttctcaaagaacatgtccaggcagtacagatgtacaaatatccaaagtggtttatatgacaggtgctattgttctcagagatgtgtttcactctgttctttgacatttacagaaacatttttctgatcatcagatcatatgtaataaagtaacttacaaacatggtgcaacgatc

SEQ ID NO: 3487 - DNA, 1053 bp, Zea Mays
tcttactctacacgccacaacttcctccgtccccagccgcacgagctttccgcgggatcccggccctccattgcgcgtcgtcccccgacccgacggccagatccccacagctgccgccaagcgagcccggtccgacttggcctctcccccgccaaacaacgcctcgacgcgacgacccagcccagccccgcgccgcgatggccatgaccgtgatccgcctcgccgccatccgcccgccgtcggcctcttcctccgccgcgtccccgtcgctgtggccgcccgcgcggctgcgcctccgcgtgaggtgccgcgccggcggggacggagggatgaagaaggaggagggggaggccgaggcgcccgagtcgctcttcgccagggagctccggcggcgtgggatggcgccgggggccgccgcgcccgcgggcgctagcaaggaggccgaggagggggcgccggaggccggggccaagcgcggggtggcggccaccgagttcgagcgcggcgccgcggcggacggccagcgggagcgctccatggcgctcaacagcgagggcctcgagggtcttgttcctcgggcgaagttactgctatcacttggcagcaccttctttctggcgtttgggcccctgattcttgtcaccgtctcccttttcgctgttttatacgttactttggaccgagttttgtacacgatgcaagcaagacgccggtgtcgccgccaccgtacattgatccatacgagctactggaggacgagaggctcagccggccctccccagatgtgttctgaacatgaacagtgcaagaaccagtgcataattgattacaagaaatagtcatacatagcccaaaacttatcttttttactagacgtatagttgtaaatgcaactataaccatagagtgttataatcacttaatcagaagttttagcacgtagtattccatccatcgatttcagatctgaaacagttaaggtgtttggtttctagggctaaattttagtcctacattttattccattttagtctctaaattgtcaaatacgaa

SEQ ID NO: 3488 - DNA, 1354 bp, Zea Mays
ccgaacatccttccccaaaacccccccacccaaaggcgaggcagggggagagccgtgcctggtgtggtggctcctgaccaaaacggagtccctcgccgccgccgcttcccgaaatccgccaaatccggagccaatgccgccgtcccctcccaccccggcggcacccaaaactatcgccgacttcttcgcgcgccccgccaagcgcctgcgcgctgccccggccgcctccctctcctccaactcctctccctcctcgctgtcgccggagcagcgccgtcgcgccgacaccaacctggcgctcgcccgcgcgcggcgcaacctccgcctcgccgagtccaaagcgcaagcatcggggggcgcaccgaagctggaggagctcctggtggaggagacgtgggcggaggcgcttcgcggtgagctgcgcaagtcatacgcgctcgagctctgccgcttcgtggcccacgagaggctccacggcccgctgcccgtgtacccgccgccgcacctcgtgttccacgcgctcaacgccaccccgttcgaccgtgtcaaggcagtcatcatcggtcaggatccataccatggccctggtcaggccatggggttgtctttctcagtaccggaggggataaaaataccttctagcttagggtgttcttatgctcaataccgtcctaactgtgagggagcatcaagccaactcacatgccaagaaaggatgggagcagtttacggatgaggtcattaagactatatcacaaaagaaatcaggattagtattccttctttggggaaattctgctcaatctaagacaagattgattgacgaaacaaaacatcacatattgaaatctgctcatccatcaggtctgtctgcaaacaggggtttctttggatgcaggcacttctccaaaacaaacgagatcttagagaagctggggctgtctgccatcgattggcagctctagaaaaatcccaagacgacatgtgatttctctgtttgagcttgacaaccaccgttgctgtatggagtggagcagaagcacatgcctcaagggctatcatattcggtcaagattatgtggcgactaaagttgttattcatacatggccaatatggatgtgagtgcttaacgcttcttttgtgccgtgtcttatcctgctttatttactttggcactgtaccagcttgttgcggccattgtggttgtcgtgcgtacgtgcaactactttgcttggcgctaggacacgcccatttgggctgccttgctagatctaagcatctgacgtactagagcttaaccaaccaccctatatatatgcataaagggcctgcctctacggctctaccttccgc

SEQ ID NO: 3489 - DNA, 972 bp, Zea Mays
ggccgcctctcccgcccccgaccgcgccccgccctgcccccgtggagcccgccccggccgccaccgcgatcgcctctctcgcccccgaagtacaagaaggaggagacagccacgtttgcgctctatggttgaagaggtggttgacatttcaaattgggagaaaaaaggtcttcaactttttagtaaattacgctaagtttgtggcaagaaacggaagttacaaagctttagagatgaggagtactacataagttcagtacctcaaaaccatcatttggaagctgggctgtcggtgagggacaatgaaggatttgttgaaaataggttggatgctgctgttcttgatttagttgatgatgaagcttctggtatgcaagcgcagaaaactcgatatcactggatgaaggtgatcagtcaagccatgtttggtagtgaagggcgacgtccagagagtaagaacaaggtgacacagtatggactcgatatgactgagcaacaatatcttgagcattcgattccatggatagctgccaatgatgctgcttggcgtgcgttatgtcattattgggcttcacctccacctatacctacatctccatctaccgaacatcagacccctccagctaccttgccgacgcatgaacaagaggacgggttagactttgtcgaaaccctcttcaatagtggaggtattgaccatcactcttcactgtaacccgatggtgatcggcgaccatgagcttccatgttattgcgttctgatacttgatacttttattatgactatgtatgagatattgtcttttattagtactggatgatgatatgtgtcttattatgactatggatgagacttttgtgatgtaattgatgagactatggatgagacttttgtgatgtaattgatgagactatggatttaaatattgttatgtgattgtgtgtgagatgttttatgtgaaaatatgttgt

SEQ ID NO: 3490 - DNA, 917 bp, Zea Mays
ccttctctttcaccttcagctggaccccgcccctggcccgctcgtcaggcacccaagcaccccacgcgacgcggcacttccacaaggtggatagcgaacccacagcacgtctccatctctggtttgaccgccgccgccgccgccctacgcggctacgccaggcgccgaggccttcgtcggcattttcgtcggcaagcactcaccagcaggtattcagccatggtttttcttgaggcagagatgtcatggaatgtgttgatctcacctagccagctggaccgcaagggcctcctgctccgcaaggctatcattgtgcgtcttctggaggatgtcacaaacaggagggcttcgaaagagcatggctactacattgctgttaatcagctgaaggcaatatctgaagggaaagatcctcaagcatggcgtgttcctcaaatccggacccgtggagagcatcttcctggctgagaagtcgatgagtaattacaagtacataggtggggagaatgcgatgttcatgaacgaccactcgaagctggagaaggacaccgccgtgcgcttcaaggtcctagggttccgctggatggaggctgaccgccaattccagctccttgctacgatcgctggtgacttccttgggccgctgtgaactgcttccacaggtcaaacaggttctaatgtacattgctcgttagatggtggatggatggttggatctgatgtgtagaattaaactttgctaccagtggtttggtcttgtagaacctgagacatggtaggttttctagatgctgttgccagtgatatttagctctggtttgaacgtatcagtgtacctgtatgatgaacaagcgttgtcatggatgtaccttttctatgcttgcttggaagttaacgttacatggtgttccctgatc

SEQ ID NO: 3491 - DNA, 695 bp, Zea Mays
gtcgtcccctgggccataaaattcgtgcgccatggccttctatcccattccttcgccgttcctcagtcgtcgatttccagagagagagaaaggatgtccttctgccaggaacttggcggctccgcctcgggctcacgactgcgtgctactcggtgaaattaaaggggctagggtgtgtcgtcgaggttcgttgtccacgagtgtggtttgcggtggtcggaaaagcacgaggttactggggatttctcgccggaggtcatttccgtcgcgacgtcgaggacagccttgcgcccaccgtctcctttggtaccactggacaaggcgcatgaaggatgttgtgatgagttcgtgagtggtctaggctgtcgtctcccagtcaactatggttgttggttcgttgtctatatatgatgtaattatttagctattttttacataactcctattatatagtaaagatgtgacatttgtttctgtaccatgagtcatcatatgtgtgagacttggtcccagcacacttggtgactattacgcgcctgggttttggacccctaaaaccctggtgtgacacattcccttaggaacgacttcagagctttttcaccattacctaggtgaataaatcggggctctacatttccttaggaacgacttcagagctttttcaccgttacttaggtgaataaattggagct

SEQ ID NO: 3492 - DNA, 1945 bp, Zea Mays
aactaattttagcggttaactactagttagctactgaagattccaaaaccaaccccccatccacgccgcgatgctccgccgccgccgggcaccgctcctcctggccgccgccgccgcgggcgccgcgctggctgccacctctccctccggcgaaaatggtcgaagcgtcgcctccgcgctccaccaaggcatcgctcgctcctcccgttccgtctacacgattggttttgtgatggcagattacaagtattcgctgaggggtctggatgctggatcggcggattaccgtgttaagctctccaaggttcatctgcggtcagcaaaaaaactacttaaactatgtgaagtgaatggagggttttatgtcaaagctggtcaatatgtatcttcactaagacaagtgccaaaggagtactcatcaactctctcctgcctgcaagaccaggcaactccatccaagtttcaagatattaaagcagtaatagagcagaactttggcaaggaattgtatgacatattcctggaatttgacgaacatccgattgctgctgcatcaattgctcaggttcatcgaggtcgattgcataacaatcaagatgtagctgtcaaggtttttcctgattataaatttgacagaatactaattgaatttgagaaatccatgacaatggagcttgattttacgcgggaggctaagaattctgagagaacagccagctgcttcaggaaaaatagtgttgttaaagtgccttatgtgttctggcaacttacaaccagggaggttttgacgatggagttttgttatggacacaaggttaacgacttggacttcctgcggaaaacagatattagccctacaaaggtagctaaggctttgattgaactctttggtgaaatgatatttgtacatggttttgttcacggtgatccacatcctggaaatatattagtttctcctgaaggccatgggaaattttcactagttctgttggatcatggaatttatagagaattggaccaaaagttcagattggactattgtcggctatggaaagcactgatattgttggattcaaacaaaattctggaattaggcgaacagtttggcgttggcaaatatgcgaagtactttcctgtaatattcacagggagaactatagaaagcaagtcagctcttggcacacaaatgtctggtgaagagcagaggcgtctgaaggaggacttaaactctcttgggatggatgatatatcttcatttatggaatccttgccaccggacttctatgtcatactacgaacagacggactattgaggtccattttagggaatcttggggcaccacgccatgttcggcttctcacttatgcaagatgtgctatacacggtcttgagaagcagcacaaaatggagtctgatgttcaattgtgttcaggtgcaatcagacgtatgttcttgaatgtcaaaacaaatgtcagctatctccgtctgagagtgattattgaaatagcggtattattagctaaagcaaatggtgccaagcagaaagtcgtgaacaaactcagacagatgttacaggagaccagtcaaggttttcaccgccgtatgtgatgcccagaagtcagcgacgtggtgaaattaaggctacgagaaaggtgggggaagttggaagtacgtcaggactccggagtagaatcataactgtgattgttctgtttcaacttgtaaattggaggttgtattgtgtcaaggagtccaatcataactgtgagtgctctgttgtaacttgtaaattctacttctacgtcgagtctgcgctcgagagtccaggtgttttttttttgttggaccaagtacgcatcccaaaataagtctacatcccaaaattcgaggagtcaaacaaatcttaatttgaagtttgcctaaatttataaaattggtattaac

SEQ ID NO: 3493 - DNA, 1956 bp, Zea Mays
aactaattttagcggttaactactagttagctactgaagattccaaaaccaaccccccatccacgccgcgatgctccgccgccgccgggcaccgctcctcctggccgccgccgccgcgggcgccgcgctggctgccacctctccctccggcgaaaatggtcgaagcgtcgcctccgcgctccaccaaggcatcgctcgctcctcccgttccgtctacacgattggttttgtgatggcagattacaagtattcgctgaggggtctggatgctggatcggcggattaccgtgttaagctctccaaggttcatctgcggtcagcaaaaaaactacttaaactatgtgaagtgaatggagggttttatgtcaaagctggtcaatatgtatcttcactaagacaagtgccaaaggagtactcatcaactctctcctgcctgcaagaccaggcaactccatccaagtttcaagatattaaagcagtaatagagcagaactttggcaaggaattgtatgacatgttcatcgaggtcgattgcataacaatcaagatgtagctgtcaaggttcaatatcctggattggagcagcgaatgaagatagacattatgacaatgtcattcttgtcaaaaatggtctcttgggtttttcctgattataaatttgacagaatactaattgaatttgagaaatccatgacaatggagcttgattttacgcgggaggctaagaattctgagagaacagccagctgcttcaggaaaaatagtgttgttaaagtgccttatgtgttctggcaacttacaaccagggaggttttgacgatggagttttgttatggacacaaggttaacgacttggacttcctgcggaaaacagatattagccctacaaaggtagctaaggctttgattgaactctttggtgaaatgatatttgtacatggttttgttcacggtgatccacatcctggaaatatattagtttctcctgaaggccatgggaaattttcactagttctgttggatcatggaatttatagagaattggaccaaaagttcagattggactattgtcggctatggaaagcactgatattgttggattcaaacaaaattctggaattaggcgaacagtttggcgttggcaaatatgcgaagtactttcctgtaatattcacagggagaactatagaaagcaagtcagctcttggcacacaaatgtctggtgaagagcagaggcgtctgaaggaggacttaaactctcttgggatggatgatatatcttcatttatggaatccttgccaccggacttctatgtcatactacgaacagacggactattgaggtccattttagggaatcttggggcaccacgccatgttcggcttctcacttatgcaagatgtgctatacacggtcttgagaagcagcacaaaatggagtctggtgcaatcagacgtatgttcttgaatgtcaaaacaaatgtcagctatctccgtctgagagtgattattgaaatagcggtattattagctaaagcaaatggtgccaagcagaaagtcgtgaacaaactcagacagatgttacaggagaccagtcaaggttttcaccgccgtatgtgatgcccagaagtcagcgacgtggtgaaattaaggctacgagaaaggtgggggaagttggaagtacgtcaggactccggagtagaatcataactgtgattgttctgtttcaacttgtaaattggaggttgtattgtgtcaaggagtccaatcataactgtgagtgctctgttgtaacttgtaaattctacttctacgtcgagtctgcgctcgagagtccaggtgttttttttttgttggaccaagtacgcatcccaaaataagtctacatcccaaaattcgaggagtcaaacaaatcttaatttgaagtttgcctaaatttataaaattggtattaac

SEQ ID NO: 3494 - DNA, 1961 bp, Zea Mays
aactaattttagcggttaactactagttagctactgaagattccaaaaccaaccccccatccacgccgcgatgctccgccgccgccgggcaccgctcctcctggccgccgccgccgcgggcgccgcgctggctgccacctctccctccggcgaaaatggtcgaagcgtcgcctccgcgctccaccaaggcatcgctcgctcctcccgttccgtctacacggttcgccctcccgtatctgttgctattactcctgagtttcggatgctgcttttgctcgattttctagccgttggctgtcgcagattggttttgtgatggcagattacaagtattcgctgaggggtctggatgctggatcggcggattaccgtgttaagctctccaaggttcatctgcggtcagcaaaaaaactacttaaactatgtgaagtgaatggagggttttatgtcaaagctggtcaatatgtatcttcactaagacaagtgccaaaggagtactcatcaactctctcctgcctgcaagaccaggcaactccatccaagtttcaagatattaaagcagtaatagagcagaactttggcaaggaattgtatgacatgttcatcgaggtcgattgcataacaatcaagatgtagctgtcaaggtttttcctgattataaatttgacagaatactaattgaatttgagaaatccatgacaatggagcttgattttacgcgggaggctaagaattctgagagaacagccagctgcttcaggaaaaatagtgttgttaaagtgccttatgtgttctggcaacttacaaccagggaggttttgacgatggagttttgttatggacacaaggttaacgacttggacttcctgcggaaaacagatattagccctacaaaggtagctaaggctttgattgaactctttggtgaaatgatatttgtacatggttttgttcacggtgatccacatcctggaaatatattagtttctcctgaaggccatgggaaattttcactagttctgttggatcatggaatttatagagaattggaccaaaagttcagattggactattgtcggctatggaaagcactgatattgttggattcaaacaaaattctggaattaggcgaacagtttggcgttggcaaatatgcgaagtactttcctgtaatattcacagggagaactatagaaagcaagtcagctcttggcacacaaatgtctggtgaagagcagaggcgtctgaaggaggacttaaactctcttgggatggatgatatatcttcatttatggaatccttgccaccggacttctatgtcatactacgaacagacggactattgaggtccattttagggaatcttggggcaccacgccatgttcggcttctcacttatgcaagatgtgctatacacggtcttgagaagcagcacaaaatggagtctggtgcaatcagacgtatgttcttgaatgtcaaaacaaatgtcagctatctccgtctgagagtgattattgaaatagcggtattattagctaaagcaaatggtgccaagcagaaagtcgtgaacaaactcagacagatgttacaggagaccagtcaaggttttcaccgccgtatgtgatgcccagaagtcagcgacgtggtgaaattaaggctacgagaaaggtgggggaagttggaagtacgtcaggactccggagtagaatcataactgtgattgttctgtttcaacttgtaaattggaggttgtattgtgtcaaggagtccaatcataactgtgagtgctctgttgtaacttgtaaattctacttctacgtcgagtctgcgctcgagagtccaggtgttttttttttgttggaccaagtacgcatcccaaaataagtctacatcccaaaattcgaggagtcaaacaaatcttaatttgaagtttgcctaaatttataaaattggtattaac

SEQ ID NO: 3495 - DNA, 5260 bp, Zea Mays
tctagagatgagctacgtcttgtctatggtgtttctgagcgtacagaaagcgatggtgcagctaatttaattcagaagttgagagctataaactatgctctgggtgaactaggacagtggtgtgcttacaaggttgcactgtcattcttgacagcactacagaatgatgaaagggccaactatcaggttgatgttaagtttcaagagtcatacttgagaaaggtagttgatttgttacactgccagttgactgaaggggctgcaatgaaaagtgacagtaatgatgttgaaatgcataattctgaaaaccccaagccaaatgaacttgaggagggagagctacctgacagtcatgctgtttctgtaggtgaacatgtagatgaagtcattggtgccgcagtggccgatggaaaagttaccccaagggtgcaagctttgataaaaatacttctcaagtatcagcacactgaggattttcgtgctatcatatttgtagagcgagtggttacagcattagtcctccctaaggtagggactatgttttcaacatcttaagatcaattacttctcaaccttttatgaattctctgacctgtttccctttcacgacggcttaggtctttgcagaacttccatcgttgggctttatacggtgtgcaagcttgataggtcataacaataaccaggagatgcggtcgtgccaaatgcaggatacaatcacaaaatttcgtgatggccgtgttacactgttagttgcaactagtgttgcagaggaaggacttgatattaggcagtgcaatgttgtcattcgctttgaccttgcaaagactgttttggcctacattcagtctcggggtcgtgctagaaagcctggatctgactacatattgatgcttgaaagaggaaatatgtctcatgaagctttcttgagaaatgctcggaatagtgaagagacattgagaaaagaagctattgagagaactgatctcagtcatctcgatggcacttctatgctaagccctgttgatatatcacctgattctatgtatcaggttgaatcaacaggtgccgttgtcagtctgaactctgcagttggactcgtacatttttactgctcacagctgccgagtgacagatactctattcttcgaccggaatttattatgcaaaagcatgagaaaccagggggttcaacagaatattcttgcaaacttcaactcccttgtaatgccccattcgagaaacttgaaggtcctatatgcagttcaatacgcctggcccaacaaaggaagtggggaaggagaaaagactgaacaaaatgatgaaggtgatccactgcctggaacagcacgccatagagagttctttcctgaaggggttgctgaaattctacatggagaatggattttatctggaagagatggttaccaaagttcacagtttattaagttatatttgtattctgtgaactgtgtaaacattgggacttcaaaggaccctttcgttacacaactttcaaattttgctcttatttttggcaatgagctggatgcagaggttttatcgacgacgatggatctctttgttgctaggacaataataacaaaggcatctctcgtattccgtggaccaattgaaattacagaaagtcaggttaattttctttgcaatgatgtatcaaagttcatttctattttttacattaaatgttgctaaacttgctcatgtgcttccagctgatcctgcttaagagctttcatgttaggctcatgagcattgtacttgatgttgatgttgatccctcaacaactccttgggatccagcaaaagcatacctctttgttcctgtgggagctgagaaatgtatggatcttttaagagagatagattggactctagttaatagcattgtgaattctgatgcctggaacaaccctcttcagagggcacgcccagatgtctatctaggcacgaacgaaaggacacttggaggggataggagggaatatgggttcgggaagttgcgccatggaactgcatttggacagaaagcccaccctacgtatggtatcagaggagccatcgctgaattcgatgttgtcaaagcgtctggattagttcctggtcgtggatggggacattttaatgattatcaaaataaaggcaagttgttcatggcagattcatgttgggatgccaaagatcttgctggaatggttgtaactgccgcccactcaggaaaaaggttctatgtggacagtatttgctataatatgaatgcagaaaattctttccctaggaaagagggctatctgggtcccttggaatacagctcgtttgctgattactacaagcagaagtaagataagttttgagtgctggaagcaaaaggagttctctcttagctctacctccttttgatttccctttttttttggcaaagtagctttatggcagcataccatgatgattcttgtttttcctctcaggtatggtgtggagttagtttataagaaacaacctcttatacgggcacgcggtgtttcatactgcaaaaatctactttctcctagatttgagcattctgaagctagcaatggagagttctcagagaatcttgacaagacatactatgtatatttaccacccgaattgtgccttgtgcatcctctccccggatcacttgttcgtggagctcagaggttaccctcaataatgagaagggtggagagcatgcttcttgcaattcaactgaaggacataattgggtatccagttcctgcaaataagatattagaagccttgactgctgcgtcatgccaggagacattctgctatgaaagagcagagctgctgggtgatgcatacttgaaatgggttgtgagtagattccttttcctaaaatatcctcaaaagcatgagggacagctcacaaggatgcggcagcagatggttagcaacatgatcctgtatcaatacgccctgaataaaaacctccaatcttatatccaagcagatcgatttgctccatcaagatgggcagctccaggagtgttacctgtatttgatgaagaaacgagagattctgaaccatccatctttgatgaggaatttactcctagcagtgagttacaaaagaacttgtatgatgactatgatggcgatagcatgcaagaagacggtgaaattgagggagattctagctgctatcgtgttctatcaagcaaaacattagcagatgttgtggaagcacttattggtgtctattatgtagctggagggaaaattgctacaaaccatctgatgaaatggatcggtattaatgcagagttggatcctcaagagatcccatcttcgaagccatataacatacctgagagcataattaaaagcatcaattttgacacattagagggtgcattgggtatcaagtttcagaataaaggcttacttgttgaagctataacacatgcatcaagaccatcatcaggtgtttcctgttaccagcgcctggaatttgttggtgatgctgtattggaccatctcattacgaagcacttattttttacttatacggacctacctccaggccgcttgactgacttgagagctgcagctgttaataatgagaactttgcaagggttgcagttaaacataagctacatgtacatcttcgccatggatcatctgcattggagacacagattcgagagtttgtgaaggatgtccaggaggagctttcgaaaccaggtttcaattcttttggccttggggattgtaaggctccaaaggttctcggagacatttttgagtctattgctggcgcaatattccttgatagtgggtgtgctacctccgtagtctggaaggtttttcagcctctgcttgatccaatggtgacgccggacacccttccgatgcaccctgtaagggagctccaagagcgctgccagcagcaagccgaaggattagaatacaaagcatcccgtacaggcaatgtagctacagttgaagtcttggttgatggcatacagattggtgtagctcagaacccacagaagaagatggcacaaaagttggcggctagaaatgcacttgttgtcttgaaagagaaggaaaccgcagcaaagaaagacactgaaaaggatggcgagaagaaaaacggttctcagttcactaggcagactctgaacgacatctgcttgagaaggcaatggccgatgccacagtacaggtgtataaacgagggtggccctgcccatgccaaaagatttgtttatgcggtaagggtaaatacatctgacagtggatggactgacgagtgcattggagagccaatgccgagtgtgaaaaaggccaaggactctgcagctgttcttctgctcgagctgctgaatcgaaattaccgtggcaagcctgatggaaaataatctttggtgatgttctgtggtggtaggtagacgtggaagcatccatcattctgattatacccccatgcagtgcttttcagcaaagcaaattaatggcctttgttgatgttcttggtggcggtattggtgatatggaggcattcaatgcaagcataagcagagctatggggagtgggattagaggattattattagttttgtctgaggtgactactaggtattttactggcgaggtactgaggtcacaactcacaaatagcagttgcaaattgcaatagaggaaatgatgataggttgatataggatattggaggcctcttattcatcgattgtataagatgtttacagaacagtgcattgatccattaaatttatattgattgatatttttatagtggatgcgcctgcagctgggaactcggggttctctatcttggcctcgccgaccaaatatcacgtacgtcgacgtccgcgaacagtatatatatggtaggcttggcgggcgtgatccccttgcgcatggtacagagcaagacgctgagctggatattctgataatcccgtatactccaacagaaactacagaatggaatcaagttgtacctgcgtttctgctgctcaaaaattgcgagatggaccatggacgtgtgttgtttggcaacaacgacgcaaccagcacggacaagaaggggggacatgcagtctctcgaaacctgtcctatacaattagaaagaaaaaaaagagggaaaataaaaggaaaagaacgcgagggcagggccggccggtcggtcggtgcctgcgccgcacttttgtcatgtgcctagcaca

SEQ ID NO: 3496 - DNA, 1833 bp, Zea Mays
ggttggttggggtggaggaccgtcgccttccccgtttcgtcttccggtcctcgttttatcccctcgcccttgcactcctccgccgcacccctttcctccttccgccctccgccgcgcctggctttctcccttcccgagaggccacgctccatccccgcccgcgctgcctcccctggcgatcggcggcgaccgcggcccaacgaaagcgtcgtggtcggccgctgtcacgcttcttgcagacgctgggcggactgggaacaagcgccaatggggatcgcggtggtggctctacacaccatgccgggggcgttcaccacccactccccggcatccattctgtcccttcggccagactttacgaggataaacagccgcaccaattcggtgccaaacgccaggacactgcaaggcgtcctaaggatcccgaggctgaggtcggtcaggcggctgtgccagcggatcgatgaccgggttacagaggggaacggtccttgggtcaaggatgccatgaataacgctagccaggttcttggcgacatcagcgtgcttggtcaagctgtaagtggcaatggtggtctaaatgggagtgctgccaagactccacctcagaggcggaagtcctcttcggttgaggatgaggcctgggaacttctgcaggagtcaatggtttactattgtggcagtcctgttgggacgattgctgccaacgatccaaatgacagtgatccggtgaactacgatcaggtgtttattcgggacttcataccatccggcattgcttttctacttaagggggaatatgaaattgtgcgtaatttcattctacacacacttcagcttcagagctgggaaaaaacaatggactgccatagtccaggtcaaggtttaatgcccgccagcttcaaagtgcggacaattccacttgatggtgatgaggatgcaactgaggaggtcttggatcctgattttggggaagccgcaataggccgtgtggcacctgttgattcaggtctatggtggatcatattgctgagggcatacggaaaatgttcaggggatctgtcagtacaagagagaattgatgtccagaccggaatgaaaatgattctgaagctttgcttagctgatggtttcgacatgttccctacattgctcgtaacagatggttcatgcatgattgatcgtcgaatgggaatccatgggcacccacttgaaattcaggccttggtcataccacaatggaggatcctggccaacattactgtggcagctcacagtggcatgcatcaagatgaacagaccagaacttgctgccaaagctatagaagtagctgagaggcgaatcgctactgacaaatggccggagtactacgacaccaagagagcacgattcattgggaaacagtcgcggctgtaccaaacgtggtctattgctgggttcctagtagccaagctactaatagaaaagccagacgctgctaggattctgtggaacgatgaggatgctgaaatccttaatgcttcgagcacaaacagaaaacgtggcaagaaagtgttgaagaaaacatacatcgtgtgagttctcgcagcaagttcgattaaattcctcagttagcatttttaagttgtaatataggaagtgttgtccctgtatataaacttaaatgaggttgcatttttgctggggagggtgcctgctgttggaattggatgctgttattgtcgatgcatctggctttgcaacaaatcatagacctgcctcgtagtttcgctatacactttatttggcatgacaagttttcggagtctcattaccggactgaagccatattt

SEQ ID NO: 3497 - DNA, 1109 bp, Zea Mays
gggacatgctcctccatcgcagcaagagcgagccaggcagcggcgcccgccgctagcaagcccgaacgagcctggtcgttctcctccccgtcctaataatcagggaaaggctcgccgcgaggctccgcccctatcgcgcgccgccagcgacagagaatgcttgcggtcccggtggcgaggatggccggccgcgggggcagggcaggggccggggcaggaacgccatcgatctggggcgcccccggcatcgcagcttctctcgcctcctaggaaatcacggagcttccgaacaggaagattatgttacgagagattttggagtcaattctgtaatgcctcataagtataaagggatgtgtgatgtggtctacgggtggactggaagggtgtgacatcccatccagcatttgttaaagtcttcctcagcatatgaacggaccaatgatatcctctttctcagatttatgctacctgcggactggatttctctttcaggatctataggattgaacagaaccactgaacactgataatctctcttccttagcatttgttacaacccgatgcactggtctcctgaagatcccattgttcagtatctgtgtaaaaagaaataacagcagagccttttatcctaagaaagttgggctgtcccggtggcgaggatggccggccgcgggggcagggcaggggcaggaacgccatccatttggggcacccccggcatcgcaacttctctcgcctcctaggaaatcacggagcttccgaacagggctcctacacgatctacatgaagattgtcggggatgacaacgaggagctgagctgcatctcgtttgggttcagcatcagcttcgtcgcgtccgagcctgggcatgagaggcagccagcccatggatgattctgatgaggacgagactgatgattccgatgaggacgagacagatgaaaccaattgccttttaatggtctatgttatcattcaaaattgtcttatgttgacactatgtatatatgctattcacaataatagagccattcatactgttgggcgccttggatgaactatcttttcttcaacaaagatggagctcatgcagattgattta

SEQ ID NO: 3498 - DNA, 474 bp, Zea Mays
cggacgttttttttccagaaaccctggctgctctcggaccttggacgacacgtcgacaccagtgcagcagccaccaaagatccggcccgcccgcgccgcacgagaccgccgcccgcgccgcacgagagtcatgacgacgccgcggcggcacgctgatccgtcgccctcgccctcgccctcttccccgccgcagcttctctcccgcctccgctccggggcctccagtttcctggcgcggcagtacagcacggggaagggaggcgataacaccggtccttcgaagccgaaaggtggtggctcctccgcgccaaggcacctcaggccaggattcgtggatccttcatcatggaaacattttgactcaagggctgttggcattaaaccgggtgctatacatacagatgcatgggcggttttaaaaaagctcagacgtgaagttgaatgcggataagaatgtatgcagtattcaagaaa

SEQ ID NO: 3499 - DNA, 1414 bp, Zea Mays
tcctcgtcgaacccgtcgccacacgtcttcacacctcaggcatggctcaacagtttcaggcattgccaaatagcagtgttctccactgttggcgcgttcggatcgcggtgcgatgcgtgctagaaatgtttgtgtggcttctgtggacttgttcagccaaaacagcgcagttgctactgctgcgagagaggatgggatacaatgtgtgacgctcctcacctacctcgccgccgcacagatctacaggacgaataggtctcggcactatcgtgttatggtcctcgataatgctcaccattccacacccgcaggggtctcctgttctgctgctgatggcgtgcgtgacctagatctggcgaaggcgtccgtggatacagatgcccaacacacattgttttaaagtgatgtgcgccaagtattaaagagatgcaaataaagaataaaggtaagatctagatgctttgtcaatagttttatatgctaaacaatcttgtccaagtgccagggactcatctaagtaaaggccaaaagagtcaaaggaaaacagacaaaggatcaaaaaaagggtgctgactgcgcagcaccggacggtccggcgcctctcaccggacagtccggtgtgcaccaaacagtctggtgcacggtctgcgaactcgtcgctctcgagttttttcctagctacatcggctataaatcaccgaacagtccacgggaggcgccggacagtccggtgctccagccgtgcaacggctaactaccacgtcgactagtgccaacggtcaaatggtgcaccggacggtccggtgccccacagaaaaggaaatcagccaatcaggggattctctatcgcgtactgtgctcatactattcactgtccgatgcgccaccggacagtccggtgcaccgacgaacagaaggcaagaattgcctatcaaatggagttccaacggctcctagctgccttggggctataaaagggacccctaggcgcatggagcactacatcaagcctccattgaacattctaagacgcctagactccacaaacacgcattcggatcatcgtgtttgagatttgagcacttcttgagtcgtgaactccctgcgttgtgtttgtgtgctcatctcttgacttgtgtgtgggattgctgtgattcttgttcttgcgtgtgtttctttccctcccttactcttgtgtgtttattgtgatcaacattgttagggcgagaggctccaacttgtggagattcctcgcaaacgggaaaagactgctaagaaagaaaatcatggcactcaaggttgatcattggatcacttgagagggattgagtgcaatccttgactgaaggaggtcaccacaatgtggagtaggcattggctgaaccacgggataaaaattaatgtgtctcttgtc

SEQ ID NO: 3500 - DNA, 1434 bp, Zea Mays
atgtccgtttcgctttcccgtcgccaggttcggttgctcagccaccagtccgactcccctccatcaggaacccatcccctgctgctaccggtgacgggcttgtacaagcgagaaggaattatctgccgaccatttttcaccacactgctgggcattaaggatatgaaggccgtcccacttcctcgcccgagggcagccacgagaaggcgcgcgtggatgctcgccgttgcagcttttatcttcgtcgcactagtctgggcttatctgtatcctcccccgcgttacacctctcctgtgagagattggcttcctggtaggctccctgcggaaccagccagggaattcactgatgaggagagggcctcgcgtgttgttttcagacagatcttaacaacacctcctgttcgatctaagaactcaaaaatagctttcatgttcttgactccggggacactgccatttgaaaggttgtgggaaaagttctttgaggtaacttggggtacaatttctatggttgatgctgagaggaggttgctggcaaatgctctacaagacatggacaatcagcattttattttgctatctgatagttgtgtacctttgcacaattttgactatgtatatgactacctgatgggtgcaaatctcagttttattgactgcttttatgatcctggaccgcatggaaattttagatattcaaagaatatgttacctgaggtcacagaggctgattttaggaagggttcacagtggttctcagttaagcgccaacatgcgttgatgatcattgcagatagtctttactataccaagttcaagcttcattgcagacctgggatggaagatggtcgcaactgctatgctgatgaacattatttgccaacagtattccatggaagtggcacccgaaagcttacagggcaaaggatgtcactttcgagcttctgaagaatataacatcaattgacataagtcaccatgtcactagtgatagcaagaaagtggttacagagaaggcctgcctatggaatgaaacaaagagaccatgctacctgtttgcgagaaagttctaccctgagtccataaacaatctcttgaccttgttcgcgaattatacacttatttgagcttctaggtggcgcttagaggctacacaggaaacattttgttatacaaaaccttgtacattggatagcaacagagtaggacattaattaacagaatagcaatagctattggtgaggagaaggctttcgctgcagcaacacagtggcttcagatttatcacgacaggccattggtactcctttagcctcgttactttcatagtttgtcctctccacatatttttagctgcggttttaccatgtacatcaagcttatttggacaatgaatggtcattaaatggaaaatcagagatcatggtctta

SEQ ID NO: 3501 - DNA, 2663 bp, Zea Mays
gttttaaggcattctaaacttagctctggacctcagttttcaaaactgcggtattataaactacggtattgtcataactaaagtatagtatagtatttcaaaaactgtggttttcaaaaactttgttcccaaacagggcctaagtgtgcaagtgcaagtgcaaccgcgagcgcgaccttttcccgtgggcgcctaggaaaaacagccgtttcctgcgcccgtccctcaccttcacgtcggcgaccgaccggcagaccgacaaactcgaggcaggccccaatggcgttggctcgcctccgcctcctcgaccgctacggtctcctgtcgccggcgctctctgcgacggcgctgcggtccttgggagacctgcgcgcgctctgcacgctctccaccacgctgcggtccggcgccggcgaggacgagatcgagcgcatccgccgcgagttcgatgacgccaagcgcaactacctcagcattcccgccgccatcaaggacatgcccaagatgaatccgcaaggcatttacgtcaacaagaacgtcaagctggacgacctccaggtctacggcttcgactacgactacacgctgtcgcactactccgagcacctgcaatgccttatctacgatcttgccaaaaggcacttggtcaatgagttgaagtatccggagagttgcttgcagtacgagtatgaccgcaccttccccatcaggggtttgtactatgacagacttaaagggtgcctactcaagcttgatttcttcggctctattgaaccagatggttgcttctttgggcggcaaaggctgagtttgagtgagataaaagagctctatggcacacggcatattggcagagatcaagctcgtcatcttgttgggctgatggatgtcttctgttttagtgaggcatgtctgattgccgatattgttcaacactttatagatgcaaaactggagtttgatccatcttacatatatgaggatgttaatcaatcgattcagcatgttcacagaagtggtttaattcacaggcaaattctttccgagcctgagaaatttctgataaaaaaaagccaggtgttccgtttcttgaagatgctgaaagagaaagggaaaaagctatttcttcttactaattcgcctttctactttgtagatggagggatgcgttatttgctagaggaccaacattttgatggaaattcctggagggaactgtttgatgttgtgattgcgcaggcaaataaaccaactttctataactcagatcacccattcagggtgtatgacactcaaaaggacaccttaacttttactgcagttgacaagtttctgccagatcaagtatactatcatggctgtttgaaatcatttctacagatcacaaaatggaaaggctcagaggtgatatattttggtgaccatcttttgagtgacttgagaggaccttcaaaagctggttggcgaacagctgctgtaattcgagaacttgaggatgaaatagaaatccaaaacggtgacagctaccgattccaacagattgggactgtgagagggaactgttcatgccgcactgttgatcggtacaatttgaaaggcacagtcggggcctgtttggcaaaattgagtataatacatgatctacttgggaaagtccatgcagctgttgttagcaccgagaaaggccaagtctataaagcattgctcaatgagttgaatgcagaaagacgtcaatgccgatctgggatgcgagatttgttcaatacctcttttggtgcaacatttcttacagacacgggaagggaatcatcattttcctatcacattcatcaatatgccgatatttacacgagcaagcttgagaacttcttatcatatgcccctgaatcttggcttcatccacctcatgacataaagatcatgccacacaatgcgaaggtcccagcgagccttttcagtacctcctagttcatcctttctctatttcggtggagaaccaagccgtagtacccccacctatggtttctgtgcgtgaccacgtgacaggattgtggactgctgctgcattcgcttgcgttatactataactgaagcaccatatgatgcatcaatccagcagaccagcaagttagcattctctagaattgccatggaattatcagtcatgtgagtagttaaccgactcatttgcctgtatgacgaagcctctgttttccgtttaaaataaaaaaaggaagcatctgagaggccgcatacttgtgttcccatgaaaccctaccaacctgtaatggccgccaataaaacagtcacacgcaacccatctcgtttccccattttattcgcattctgctacactctttgctgcactcatgttacactgaactcgcctggtggcatctgacaagttttttgggatgagcagaagataatttgggttcgggcaacggataaattataaaatgcttatttgtccttgtctggaacaggaaggctatcttcaattctattgtttatggtcctagagactggatggagttccagttcttgctttgcatgaatgtggagatctggaatgtcaagaataatggcaattagtgcactcatatgaacacagaaaacataatattctgattcttcactgacgaagattttgttaaaaacta

SEQ ID NO: 3502 - DNA, 2363 bp, Zea Mays
ttttctttgtactctagtggtgaaatactttttgaaataattatgtgatactgtaatatgggctttgcagtctactggagcaactggaatctattgagcaatctttgaatgagtctggcttagaagctctctcatcctttctgaaaaccaaaaagaatttagaccaactggaagatgcaaaagatttggatgaaaatggcggcgttcacgttttgctgaagaccttgctgtcattatcttatctaagatcaattctaatgaagggtctggaaagtggccttagaaatgatgctccagatagtgctattgcaatgcgacaaaagtggcgtctttgtgaaattgggcttgaggattattcgtttgtattgttaagtagatacatcaatgctcttgaagctttaggtggatcagcttcacttgcagagggtcttcctacaaatacaagtctatgggatgatgcccttgatgcccttatcattggcataaatcaagtttgcttttcaggttggaaaccaaatgagtgttctgcaatagtgaatgagcttctttcttggaagcagaaaggtctatctgaatttgaaggttcttgggaaagcccttggaatacccgagaacagtgtcagaacatacactgaggctgaaattcgtgctagtgttatttttcaggtctcgaaactttgcactgtacttttaaaagcaactcgagcagttcttgggtcgtctgtgtgggatgttcttgttcctggagtggcccatggagccttgatacaggttgaaagaatagctcctggatcattgccgtcatccatgaaagaacctgtcgtgctagttgtaaacaaggcagatggagatgaagaggtcaaagctgctggggataacatagtgggcgttgttcttctacaagaattacctcacctatcacatcttggtgttagagctcgtcaattgtatcaaacaaagatgactgtgctgccatgtcttcagagccatccgctggaggagatctatttgcacagcaattctcactattgactacagacaagaagttagaattgtctgagggaccttcacttcagcaaaagagctatacttccgtagcaaatggtatgtctggtgtgctcgagctttcagaggcatcgattgaatcatctggtgcaaaagctgctgcatgtggaactctttcggttctttcctcaatgtcaaataaagtttacaatgaccaaggaactccagcagcattcagagttcctgcaggtgctgtgattccttttggatccatggaggacgccttgaagaaaagtggatcactcaaatcctacactaatcttctagagaggatcgaaacagctcaaattgaaaatggtgaacttgatagcctatcctcgaagcttcaagcaactgtttcacttctttctccatcggaagaaatcattgaatctttgaagaaaacatttgatcagaatgttcgactaattgtgagatctactgctaatgtggaggatttggctggaatgtctgctgctggactctatgaatcaattcctaatgtcagtctctctgaccctagatcctttggagctgcggttggacaggtttgggcatcattatacacaaggagagcaatccttagccgtcgagcagccggtgtacctcagagagacgcaaagatggcggttctcgtgcaggaaatgctgcagccagatctctcttttgtgcttcatacaattagcccagttgaccatgatcccaaattagtagaggctgaggttgcccctggtcttggagaaaccctcgcttctggtacccgtggcactccatggagactctcatgtcacaagcttgatggcaaagtcacaactctagcttttgcgaatttcagtgaagagcttatggtgctcaactctggccctaccgatggtgaaatgagtcgtaggaccgtagactacagcaagaagccgttatctgttgatgcaacctttagggagcagtttggtcagcgccttgccgccattggacagtatctggaacagaagtttggaagtgcccaagatgtggaaggttgcctggttggccccgatatatttatagttcagagcaggccacaaccacaataaacaaaaagttttgtgtggttacctggctagctgaataaaaatggatactggctgaagaaatatatggacttcgtagcacgcgtagcagtgatcgagtcttttttaatatgctatctcaggtaaaataataatttattggcacaggtttagccattcactaacttgtatcaattttgtgaactaaagaacttactattacatgtgggagccacatgctattctatttcgatggtacctattttttcgact

SEQ ID NO: 3503 - DNA, 1670 bp, Zea Mays
aaagcccaaccccgaacaggtagatttccctcaaagaaacaaaaaaaataaaacaaagataaatcattggggttgggggattgcaattgcaagttgccgctgtgcggttgcggtcgctcccctcccgactctggccagcagcagcgacggtgccggcagtcgattactccacgcggcggaggcggcggtagcccatcctttcccgttttctgatccagtcctactgataccgcgcacagcacgcctgctctattaaagaatgttttgcttgaggggctactggtcgccttcactagctccagtgagggaagggcctgttcgacatcatataaagttcaattctgtagtggtttgtggtgctaggggaccgagaccgagatatccccgtgtgtggaaaactcgtaagaaaattgggactatttccaagtcgcagaagcttgtcgaatgtgtcattaaatggatgttcaacaaaggtcaagggaagacaatgggaagctattacaccttgttgaatgctttgatcgaggatggacggattgaggaagcagaagagttatttggaatggtgttctcacgatatatggagggtttgcctcgtacatttttcatgagaatgatttctttctattacagcgtggaagcgtatgataagatgtttgagatttttgctgatatggaggaactaggcgtaagacctgatggttctattatcaggatgctaggtgatgtatttcagaagttagagatgatggacaaatatgaaaagttaaaaaagaaatacccaccaccgaaatgggattatcgacacatcaaaggcaagcgcataagaatcagagtttatcctgatagcaaccctgaagtggcggcaaaaggagaccctgacactgatgagctcgaagagttagaaagcacacaccttaataacgaattggatgaagcagcaagctcaggcctcgacaggagtgtattggacgatgcagcttctggagaccttgaatatatgtagaacccatgtcgtcatacttccaagacatctctgttttggtttgacatcccagaacccatgtcgtcatacttccaagacatgggcatcgctatcttctgaagtattttactacctagaatgagtagaaactacatgccaggctttgccatcagcagtcttttcaagacatcatggtggtttcaccgcgatatgtgttcttcagagtttggttacctgattcacttgcataaggctcatgcctttttgaatgcttccagccaggttaaaaacatagcgatggcattaggacctgtagtatctgagtgctttcgtgaacatatatggttgattgttgaaggcaatgtcctggacatcagacagggcagtagccattactatggtcctgtttggcacagctactgcttgttgaaaaagcagcttatctgagaagctgatgaaaagcagcttctgcttgttggctgcttttagtgtattctgagaagcagctgaactaataagctgctgtagaagctggctgtttggcaggacttctgcttaaatttgcgaagaagctgaaaataagctgaaaataagctgtgccaaacagggcctatatcatccggtatggtcctttgttcggcatggaaaggcgccatattttcaggcatgaaagactctattgtgt

SEQ ID NO: 3504 - DNA, 1762 bp, Zea Mays
aaagcccaaccccgaacaggtagatttccctcaaagaaacaaaaaaaataaaacaaagataaatcattggggttgggggattgcaattgcaagttgccgctgtgcggttgcggtcgctcccctcccgactctggccagcagcagcgacggtgccggcagtcgattactccacgcggcggaggcggcggtagcccatcctttcccgttttctgatccagtcctactgataccgcgcacagcacgcctgctctattaaagaatgttttgcttgaggggctactggtcgccttcactagctccagtgagggaagggcctgttcgacatcatataaagttcaattctgtagtggtttgtggtgctaggggaccgagaccgagatatccccgtgtgtggaaaactcgtaagaaaattgggactatttccaagtcgcagaagcttgtcgaatgtattaaaggtctgtctaatgtaaaggaggaagtttatggggcacttgactcatttgttgcatgggaactggagtttcccttgatagtagtaaagaaggcactgaagaaacttgaggacgaaaaggaatggaaacgaataattcaggtcattaaatggatgttcaacaaaggtcaagggaagacaatgggaagctattacaccttgttgaatgctttgatcgaggatggacggattgaggaagcagaagagttatttggaatggtgttctcacgatatatggagggtttgcctcgtacatttttcatgagaatgatttctttctattacagcgtggaagcgtatgataagatgtttgagatttttgctgatatggaggaactaggcgtaagacctgatggttctattatcaggatgctaggtgatgtatttcagaagttagagatgatggacaaatatgaaaagttaaaaaagaaatacccaccaccgaaatgggattatcgacacatcaaaggcaagcgcataagaatcagagtttatcctgatagcaaccctgaagtggcggcaaaaggagaccctgacactgatgagctcgaagagttagaaagcacacaccttaataacgaattggatgaagcagcaagctcaggcctcgacaggagtgtattggacgatgcagcttctggagaccttgaatatatgtagaacccatgtcgtcatacttccaagacatgggcatcgctatcttctgaagtattttactacctagaatgagtagaaactacatgccaggctttgccatcagcagtcttttcaagacatcatggtggtttcaccgcgatatgtgttcttcagagtttggttacctgattcacttgcataaggctcatgcctttttgaatgcttccagccaggttaaaaacatagcgatggcattaggacctgtagtatctgagtgctttcgtgaacatatatggttgattgttgaaggcaatgtcctggacatcagacagggcagtagccattactatggtcctgtttggcacagctactgcttgttgaaaaagcagcttatctgagaagctgatgaaaagcagcttctgcttgttggctgcttttagtgtattctgagaagcagctgaactaataagctgctgtagaagctggctgtttggcaggacttctgcttaaatttgcgaagaagctgaaaataagctgaaaataagctgtgccaaacagggcctatatcatccggtatggtcctttgttcggcatggaaaggcgccatattttcaggcatgaaagactctattgtgt

SEQ ID NO: 3505 - DNA, 845 bp, Zea Mays
tgcaagcgtggattcattttatcagcaaatgccttctggacgggaaccttttgcaaacgaaaatccacaatattggcgcaacacttgtaggagttgacaagtttggtaacaaatattatgagaaactacatgacactcagtatggaaggcataggtgggtagaatatgcagagaaaggtcgttacaatgcatcccaagtgcctgctgaatggcatggatggctgcaccacatcacagatagcaccggggataagctgctgaaccagaagactgctaggtaccttgtagagcacaagcagaactactccggtgagggtgaagagcttatctaccactccaaggggcatgctttgaatccgggacaaagggactggacgaggtatcagccctgggagccaaagaaagagcaagcctagctcgtgagtacattgtggggaagctgctgaatgttttgcgttttcttgcattgcgctgggtcaggtatcaccgagctgaatagcctctgggttattgcctggacgggacccaaataatgttgttctgaataccaatatattgtatatttgatcatcttttgacattgaaatgttgttgctgttgtaaaagcagctttgaggaatatctcatgcaggtgttactgacttcggttacgagacattgggtctatttgtttcagttttttttttgctgattctgaccgtcagaagttgttgtagaccaaacactaagcttttcagtcagcttttatatgaatcactttagtattacggggcgtttggatcccttcattttagaggaattggaattcactcaataaagtaacttatttagtttggaatttgaca

SEQ ID NO: 3506 - DNA, 1483 bp, Zea Mays
gttagcagttgcatttggggacggcggctatgcgttgcgagcgcctgagagatcctgtgtttagctctaccgccgggaattcctcttgctcttgcacaagcccacgaaactcgagaaaaactgaaagccacacactctgagttagctgaggagagggccattgagatcgtcatcataaagaccacaggagacatgatcttggacaaaccccttgcagacattggaggcaagggtttattcaccaaggagatagatgatgcgctcttgcagggaaggattgatatcgctgttcactctatgaaagatgttccaacatatctacctgaaggcacaatattgccctgtaacctaccacgagaagatgtcagagacgcattcatatgtttgactgcaaattcgcttgcagagcttcctgctggcagtgttattggaagtgcttctctgcggagacaatctcagattctctacagatatccatcactgaaagtagttaacttcagaggaaacgttcagacacggttaaggaaactcaaggagggagatgtctctgctacattgttggcactggctggattaaggcggctaaatatggcagaaaatgcaactgctgtactatcagtggaagaaatgcttccagcagttgcccaaggtgctattggaatagcttgccgaagcaatgatgacaaaatgatggagtatctatcagcgttgaaccatgaagataccagattagctgttgcatgtgaaagagaatttttggcagttcttgatggtaactgccgaactccaattgcagcctatgcttaccgtgacaatgatgggaattgctcattccgcggtctattgtcttccccagatggatctaaagtatttgagacaacaagaagtggaccgtactcttttgacgacatggttgagatgggcaaagatgctggtcatgagctgaaggcaaaggctgggcctggcttctttgatagcttgcaatgaaaagaatgagcggccatgagcaatttcaattgtcactcttttgggtagaaacagagggcccaagtagagtgttgagaggtttgtttttgtttattctttctcctactagttctgctagagaagggtgtacctggtgtagtggtgagctgagtcatcaggtcgcgggttcgaagcatccagtctccgtatttgtgggagaaggtttgtctcggtttatctcttttccgctactcatatgggagaaatgtgggagcctcagtctgctcttttttttttccatactagttctgctagtgccttgtactatcactcgtattgagcagccccattcagctttataaaaatacagtaaaaacaaagaagctggtatggattaaagaacgaacaagttgattaatgtgatgtttactccggatctagatataaaaatgtgcatatgcatatttcccccacgttgttccaatataacattgtcatccatttttatgttttgtcg

SEQ ID NO: 3507 - DNA, 1548 bp, Zea Mays
gtttggcccacgagcggttactgggtggacaggtggctccgcgtgtgcgcgttcacccgcctcatcctctccttcgcaagacggcaaagaggagtcgccatcgcccgccccatctagtcggtgtcggtgtggtgtgggggcggtgctgcgcgtgtgcgctcctctgttcggcaggactccttcaagcagaaggggcggagcagcatggcggggcgctacgacggcaaccccttcgaggaggaggacgtgaaccctttctcggaacaagcgcgcggcaaggctggcgggcagtccaacttcggcggtggtgcgttttacatgcctaacaccagaaacatgcctcctgcatccaattcgcgcctttcgccgcttcctcctgaaccagcagacttcagtgctacagtggacatacccctggactcgtcaaaggacctgaagagaagggagaaggagctgcaagcaagggaagcggaattgaacaagagggagaaggaactaaaacggagagaggaggctgcagcgagagctggcattgtcattgaggagaaaaattggcctccttttctgccactcatccatcatgatatcaccaatgagataccgagtcaccttcaaagaatgcaatatgttgcatttgcgtcgtttcttgggttggtttgctgcctcttctggaatgtcatagcagttactacagcttggatcaagggggaaggcgttaagatctggttgttggcaataatctacttcatatctggtgttcctggtgcatatgttttgtggtatcgtcctctatataatgcaatgagaggaattttgccagcaattgatcttattagcgtgaatgctttggttgggatattctactttgttggatttggactgttctgtctggaatcattgcttagcatctgggtcatccagcaagtgtacatgtacttccgtggaagtggaaaggctgcagagatgaagcgtgatgcgacgaggggtgcaatgagagccgcattttaagtgtggtgtggtattttttttgtgatgacagtcctaggcccaagcgcatacttccggtggataggttgtgcaccgaacaaaaagcagatgtttcttccttggttgctgactatgataccaaactgccagtaggttatcatgatgttacaagtgacattatatcactccccgtcctgatctaacaagaatggggaatgtgcagcttttacagctttacttaatcgttttgttcttgctagttgaaatgtggaatggattatgaatcaagtttagttaagttgtacagtgctgttaactatttgtactccttttgaacggctattggtacttcgttggaacaataatacagtggtgatattggcggaagcatttggcaaggcagcaaatgatcatgcgtgatcgtgtattgtttgaatgcggtgtttgaagcgtgtgcgtcttcaattgaaaaggaatggttttgcaaaattagatgcttagcttattttgatgtcatggagtggtatgaaaataagctagtttttagcttttaaaaaaaat

SEQ ID NO: 3508 - DNA, 1086 bp, Zea Mays
cgtcggcggcggcgcgggcgcccaaccagccatgtgggttctccggagcctcctccgggcagcctcgccgtcgctccgccacagctccgggcgcttcaccgcgaggggcgaggcgctgtccgcggccttgggctccgctccggcgcccgcggggctgctggcggtgagaccacgagccgaaggaggctggcggcgggcgatgtcgaccaagggtaggaccatgcggaccaaggtggagaagcggatggcgagggagaccggccgcacgcagcgggagctccgccgcgccgtcaagctcaggaagaagctcatgacggaggacgagaagttcatctacaacctgcgcagggccaagaaaaaagttgctttgcttctacagaagctcaagaagtatgagctaccagacttacaagctcctcgtcatgatcctgagctgttaacagctgagcaactacaagcatacaagaagattggattcagaaatagaaactatgtgcctgttggagttcgtggagtctttggaggtgttgttcaaaacatgcatatgcactggaaattccatgagacggtgcaagtttgttgtgacaatttcccaaaggaaaaaattaaggaaatggctgcaatgctgacaagattgagtggtggaatagtgatcaacattcataataccaaaacaatcatcatgtttcggggaagaaactaccgtcaaccaaagaaccttatacctttcaacacacttaccaaaaggaaggctttattcaaggctagatttgaacaagcgcttgaatcgcagaaactaaacatcaagaaaatagagacacaactccgtcgtaaggggatcaatccagaggacccagttgctatggccagcatccagcgtgttgcctctacgttcttccgagccatagatgagcagcaaggttcatctcagagatagaaactgcagcagagaagcaatgggaggaagaagaggctgcagagaaagaagaatcttcaagaatgcgatattgggagagggaagatgtaggtgaccggagggatttcaatagaagttatgagaactcagattatgaggatagaggacag

SEQ ID NO: 3509 - DNA, 2496 bp, Zea Mays
gccccggcccaaagcaccagcaccggcgcggcggtccaaagccagaagcagaacagaaaacaactgagacagctagagcagagcccccttcacaccaaaaatttcctctttgcgtcgcgccccgtcagctgagtccccgcggatgggctcggtctcgcggggctagggtttggtcggtcgtctcgtcggcgtcgagggcgccggcgctgctagctagtagtagctcgctcgcgctagggttctcaggagccatggtgatgcagcgcttctcgtggccgtacggaggccggagcgcctccttgtgcggcagcttcaccgggtggagggagtatcccatggggctggtcggggccgagttccaggtcgtcttcgatctgcctcccggggtttaccagtaccggtttttggttgatggtgtctggaggtgtgatgagacgaaaccctttgtatgtgatgaatatggactgatcagcaatgaagtgcttgtggaaaacaatgtgcaacctgttgtgcagccagagccttctatcagaggaactaatttggatgagggtaccgttttgacaacaatgcccccggagtcatcatctcagaacccaggcgtgcaaatagcagttttccgccatgtggtctctggaatattattacacaataccatatatgaagttgttcctctttctagcaagttagcagttttggacactcagctacctgttaaacaggcatttaaaataatgcatgacgagggtcttgctctggttcctctttgggatgaccatcagggaaccataacaggcatgctcactgcattagattttgtattaatgttgagaaagttgcagagaaatattcgagttactggcaatgaagagcttgaaatgcatcccatttctgcttggaaagaagcaaagctacagttttatggtgggcctgatggtgctgccatgcagagaaggccattaatccatgttaaggattccgatagtttggcggatgtggcactgactataatcagaaatgaaatatcttcagttcctatctttaagtgcatgccagattcatcaggagtgcctttccttaatcttgcaaccctccaggggattttgaaatttctttgctcgaagctacaagaacaggctggaggctgttcccttctgcacaatcagcttctcagcattcctattggtacatggtctccacatacggggaggtcaagtagcaggcatctcagaactttgctactgagttctcctttaaatacctgcctggattttctgcttgaagatagagtaagctcaattcctatagttgatgacaagggagcgctccatgatgtttactcactcagtgacatcatggctctggcgaagaatgatgtttatgctcgcatcgaacttgaacaagtgactgtgcaaaatgctttggatgtgcaataccaggtgcatggtcgacgacagtgttatacttgtttacagacaaataccttgctggaagtcttagagggattgtctattccaggagttcgacggcttgttgttattgaacaaagtaccagatttgtggaaggaatcatctcattgagagacatatttacatttctccttggatagcatctgtgtagccattccatacatgaaaaagcttgttgtacttggttcaaacgaaataaaaaggttacaaatgtgatagccatcttctatcttccttcttgatttggttcatattataccgcagacactacataattgagttgcaccgaaggaaagaacaggtaggtgctgcaggatggagaagtgttcaggtgattgtttcctgctcgaccagtccagccgccaattatttgcaggcttccagaattgttacttgcaaggggattttttgaaggaaatgaatctcgtggatttttcttccttggaatgaagtcgaaggacctcttcaaatgcgagcatatatatcttttttttgtggaaacatgaacgacgtcatgcaaatgattttcttgaagcattgctgtcattccagttctataagatttgaagtgtttctgtacaattacaatgcttttcatgaccccatttggttttgctttctgttttcaaacaactctgagatttggctcatgagaattgtatatgttcaattatcagtgcatcttggtgtgagtgacattaggcaacggaattttgttatgaaagactgaactgtacaagaaattgctatcataaggaaagcgaattaaggaattttggttgatgctcgaaatatgtcaattattcgcactgtgctagtgattatgtacagaatcagggaatgtctcgcatccaattagggagtgggttggttgggttggactgtgttatactgtctttggtggatcatgtaaaatatgtgatgcgatattgtagatgataatgtttgatattgtttaaaagtttgacattgtttgtagagtgaagtttaaaataaaagatgagatagatgataatgtttgatatt

SEQ ID NO: 3510 - DNA, 580 bp, Zea Mays
gcaggcgcctcccgcaactcccacgagatccgagtatccgactcggacgaaactctcctggctggccaccgtcgcggcgtcgcggcaaccggctgcgcacagggaggccgcacagtggtttacgagggcgcggttgtcggctcgtcgctggtggggctgggctgtggttctggttcctgaaccggcggctgtacaaggagtacgaggagcggcggttgctggtgcaggtcctcttcggcctcgtcttcgccttctcctgcaacctcttcgagctcgttctcttcgagatcctccccttcctgtccaagcatgcacgccttcctcacctggcacctcgacttcttctgcctcctactactcctcgtcttcgtactcctctactattactgctatcttctgctccgtaactcaggggtgaggagggagcgggcgtggctcggcgattcacttccccatgccttcatcggagaaggttttttttacgatgtcgcagttgttggtcagtaggattggggtgattggagtgagtgtcatggctgttctttctggttttggtgccgtcaatatgccatacagttat

SEQ ID NO: 3511 - DNA, 3630 bp, Zea Mays
cccccacacaccagtactagcgctctagcgattttccccacttggtttccctcctctttctgcctgtgcttctgtctctcttctgcccttctccaagaaaccggataatccatccatccatccgcgatccgccccgcccacccaaggaaggaaccgatcccgactcgccgcgggctcgaccccccgcgccgacggctacgcgtggcaggcacagcaagcgcgccgcttcgccgacgtccacgccgcctgctctggctgtgggcggaatgcgtcagctgtagaggacggccacggcacctttcagccttttcctcgtctgctcctcctctcggccgggctcagtcggtcggtaacgactcctgctgtgctgtgctccagcctccggcagcgcctgctccgcaaacagttgcctctcctgtgctcacccaagggtcaaggggccagtccatccatccgcccgtccaggaaggaaatcgttcatccccagaagacaaagcgatccacttggataccggataagccctgtcctggcggcgtcgcatcccctctcgattcccgcgacaggtcgcagtgaatgacgacggaaatcagcggcccttgaagcgaagactcccccccgccttcgctgctctccaccgatccgacgaaggcagcgctcgggcactgctgctggttccccttcgcccaattcggtctgacgcaggatctcagtttctgcggcggcggagtagtagggggcagacggtgattttctgattctctcaccttggctctgtggactaaatgtgacctgcaagagctaaaagtggcagcgattgactttcagatgagtccatttgtgctggccgtggtgagcgttgcattcctcagcttgcggtttttgcaggctcatggaagcgggttgcttctgagctgtggctcgaacagcactgtcgatgctgatgggcggagatggatcggcgacataacccctgaggggaattttaccttgagcagccctgggcttgcggcgtcactggtcgggaagagcagttctgatgagatattcggaccgctttacagctctgcccgtttcttcaacgcggcaacttggtataccattagtgtgctgcctggaagttactgtgtcaggttgcatttcttcccttcgaccttcgggaatttgagcgcgaacaactccgtgtttgatgtcacggcaaatgatttcaagcttgtttcaaaattcaatgcgtcagaggagattgcttggagagcctctgtgagcaattcggtcaccagcgcagttgtcaaggagtactttcttgtagtcggtgctcgtggcctgagtattgagtttgatccaagacctgggtcgtttgcctttgtgaatgcgattgaggtcatgctgaccccagataatttgttcaatgatacagtgagcaaagttggcagtccagtcacgcagcttcctcttggtttgaggggcagaggtgttgagacaatgtaccggctgaacattggaggtcctgcacttaaatcgcccagtgatcagtatctccacaggccatggtacactgacgaagcgttcatgttttctacaaatgctgctcagactgtgtctaatgcttcaagcatagtgtatgtatcaagcaacgagtcgacaattgcgccgattgatgtttacgagaccgcaagaatcatgggcaataacatggttgtggacaagcggttcaacgtgtcgtggcggttctatgtccacccaaactttgattacttagtacgccttcatttctgtgagcttgtctatgacaagcccagccagaggatcttcaagatctacatcaataacaagactgctgctgagagctacgatgtgtatgctagggctgggggaattaacaaagcatatcatgaggacttctttgacaactcgacgcagcaggcagacacactttggcttcagctaggccctgactccatggccagcgcttcaggtgctgatgcacttctgaatggtgtggagatattcaagctcagcaaggattccgacctttcttatgtgcttggtcatattgacacgggcaaccagatggattcttcaaaaggggggaagattaaaggcctatgggaagaacttggtattggctcagcatcttttgttgcggttacaagcgttgttctgttctcatggtgttacataagaaagaaacgaaaagctgtcaacaaggaggcccctcccggctggcatccgttggttctccacgaggctatgaaaagcaccacagacgcccgtgcagccagtaaatcgtcatcggctcggaatgcctctcccattggtcataggatgggaagaaggttcggcattgcggagattagggctgccacgaagaacttcgatgagtccttagtcattggaacgggagggtttggaaaggtctacaaaggtgagattgacgagggcgctacagtggccatcaagcgcgctaacacattgtgtggccagggcctgaaagaattcgagacggagatcgagatgctttccaagcttcggcaccggcaccttgtggcgatgatcggctactgcgaagagcagaaggagatgattctggtctacgaatacatggcgaaggggacactgagaagccatctgtacgggagcagccttcctcctctgacatggaagcaacggatcgacgcgtgcattggcgcggcccgcggcctccactacctccacacaggagcggaccgaggcataatccaccgggacgtgaagaccaccaacattctgctggacgacagtttcgtcgccaagatagccgacttcgggctgtcaagaaccggaccaacgctggaccaaacccatgtcagcaccgcggtgaggggaagcttcggatacctagaccccgagtacttccggaggcagcagctgacgcagaagtccgacgtgtactcgttcggagtggtgctcttcgaagttgcctgcgcgaggccagtgatagaccccacgttgcccaaggaccagatcaacctggcggagtgggcgatgaggtggcagcggcagcggtcgctggaggcgatcctggaccctcgcctggacggcgacttctcgcccgagtccctgaagaagttcggcgagatcgcggagaaatgcctcgccgacgacggcaggagcaggccgtccatgggcgaggtcctgtggcacctcgagtacgtgctgcagctccacgaagcttacaggcggaatgtggtggagtccgaatcgttcgggagcggcgagctggggttcgctgatataccatccttcttcagccttccccacgtcatcagggagggggaggaggaacaccaccaccgatcgaagaagccgtcaagtatcagagaggaactagacacacattaccaaccccctcatccctcccaacagaaagaagacacagaggtgtcaagagtttccttgacaactgtatgatgcaatctgcatggccaccgttcatgcaccgctgcctgtgtgacctgtataaatggcactgatataattactgcctttgaggttttgatgtagcaaacgggattgagaaaggtggtatggtagtgcagctcgagaatgtgtggtactctgttttgcgcgcgctacggaacggtatgtgtgcg

SEQ ID NO: 3512 - DNA, 3645 bp, Zea Mays
cttgccgctcgggagtcgggtctcccccacacaccagtactagcgctctagcgattttccccacttggtttccctcctctttctgcctgtgcttctgtctctcttctgcccttctccaagaaaccggataatccatccatccatccgcgatccgccccgcccacccaaggaaggaaccgatcccgactcgccgcgggctcgaccccccgcgccgacggctacgcgtggcaggcacagcaagcgcgccgcttcgccgacgtccacgccgcctgctctggctgtgggcggaatgcgtcagctgtagaggacggccacggcacctttcagccttttcctcgtctgctcctcctctcggccgggctcagtcggtcggtaacgactcctgctgtgctgtgctccagcctccggcagcgcctgctccgcaaacagttgcctctcctgtgctcacccaagggtcaaggggccagtccatccatccgcccgtccaggaaggaaatcgttcatccccagaagacaaagcgatccacttggataccggataagccctgtcctggcggcgtcgcatcccctctcgattcccgcgacaggtcgcagtgaatgacgacggaaatcagcggcccttgaagcgaagactcccccccgccttcgctgctctccaccgatccgacgaaggcagcgctcgggcactgctgctggttccccttcgcccaattcggtctgacgcagtttctgcggcggcggagtagtagggggcagacggtgattttctgattctctcaccttggctctgtggactaaatgtgacctgcaagagctaaaagtggcagcgattgactttcagatgagtccatttgtgctggccgtggtgagcgttgcattcctcagcttgcggtttttgcaggctcatggaagcgggttgcttctgagctgtggctcgaacagcactgtcgatgctgatgggcggagatggatcggcgacataacccctgaggggaattttaccttgagcagccctgggcttgcggcgtcactggtcgggaagagcagttctgatgagatattcggaccgctttacagctctgcccgtttcttcaacgcggcaacttggtataccattagtgtgctgcctggaagttactgtgtcaggttgcatttcttcccttcgaccttcgggaatttgagcgcgaacaactccgtgtttgatgtcacggcaaatgatttcaagcttgtttcaaaattcaatgcgtcagaggagattgcttggagagcctctgtgagcaattcggtcaccagcgcagttgtcaaggagtactttcttgtagtcggtgctcgtggcctgagtattgagtttgatccaagacctgggtcgtttgcctttgtgaatgcgattgaggtcatgctgaccccagataatttgttcaatgatacagtgagcaaagttggcagtccagtcacgcagcttcctcttggtttgaggggcagaggtgttgagacaatgtaccggctgaacattggaggtcctgcacttaaatcgcccagtgatcagtatctccacaggccatggtacactgacgaagcgttcatgttttctacaaatgctgctcagactgtgtctaatgcttcaagcatagtgtatgtatcaagcaacgagtcgacaattgcgccgattgatgtttacgagaccgcaagaatcatgggcaataacatggttgtggacaagcggttcaacgtgtcgtggcggttctatgtccacccaaactttgattacttagtacgccttcatttctgtgagcttgtctatgacaagcccagccagaggatcttcaagatctacatcaataacaagactgctgctgagagctacgatgtgtatgctagggctgggggaattaacaaagcatatcatgaggacttctttgacaactcgacgcagcaggcagacacactttggcttcagctaggccctgactccatggccagcgcttcaggtgctgatgcacttctgaatggtgtggagatattcaagctcagcaaggattccgacctttcttatgtgcttggtcatattgacacgggcaaccagatggattcttcaaaaggggggaagattaaaggcctatgggaagaacttggtattggctcagcatcttttgttgcggttacaagcgttgttctgttctcatggtgttacataagaaagaaacgaaaagctgtcaacaaggaggcccctcccggctggcatccgttggttctccacgaggctatgaaaagcaccacagacgcccgtgcagccagtaaatcgtcatcggctcggaatgcctctcccattggtcataggatgggaagaaggttcggcattgcggagattagggctgccacgaagaacttcgatgagtccttagtcattggaacgggagggtttggaaaggtctacaaaggtgagattgacgagggcgctacagtggccatcaagcgcgctaacacattgtgtggccagggcctgaaagaattcgagacggagatcgagatgctttccaagcttcggcaccggcaccttgtggcgatgatcggctactgcgaagagcagaaggagatgattctggtctacgaatacatggcgaaggggacactgagaagccatctgtacgggagcagccttcctcctctgacatggaagcaacggatcgacgcgtgcattggcgcggcccgcggcctccactacctccacacaggagcggaccgaggcataatccaccgggacgtgaagaccaccaacattctgctggacgacagtttcgtcgccaagatagccgacttcgggctgtcaagaaccggaccaacgctggaccaaacccatgtcagcaccgcggtgaggggaagcttcggatacctagaccccgagtacttccggaggcagcagctgacgcagaagtccgacgtgtactcgttcggagtggtgctcttcgaagttgcctgcgcgaggccagtgatagaccccacgttgcccaaggaccagatcaacctggcggagtgggcgatgaggtggcagcggcagcggtcgctggaggcgatcctggaccctcgcctggacggcgacttctcgcccgagtccctgaagaagttcggcgagatcgcggagaaatgcctcgccgacgacggcaggagcaggccgtccatgggcgaggtcctgtggcacctcgagtacgtgctgcagctccacgaagcttacaggcggaatgtggtggagtccgaatcgttcgggagcggcgagctggggttcgctgatataccatccttcttcagccttccccacgtcatcagggagggggaggaggaacaccaccaccgatcgaagaagccgtcaagtatcagagaggaactagacacacattaccaaccccctcatccctcccaacagaaagaagacacagaggtgtcaagagtttccttgacaactgtatgatgcaatctgcatggccaccgttcatgcaccgctgcctgtgtgacctgtataaatggcactgatataattactgcctttgaggttttgatgtagcaaacgggattgagaaaggtggtatggtagtgcagctcgagaatgtgtggtactctgttttgcgcgcgctacggaacggtatgtgtgcg

SEQ ID NO: 3513 - DNA, 1790 bp, Zea Mays
ggaccaagaaacagttttacacaaagacccctcctcctcggtgctctcgagtctcgagagtcgagactcaggggacctgatttcctcgtccggccatggcgaccggtggcaagtccgctgcccctcagccacctcccgccgcgtcctcctcctccgaacgcgcgctggagtcagtccacttctcttccggaaaccctcgcatcgaggagacccgcggcgtcgtcgtcctccaccccgacccgcccgcggccgcctcctggtctcatgtcccgttggggaggaagccgcgggtgtgcgtgctcgccgtgcccaaccacatgacctacgccgacttctgccgtttctgcggcgccttcgtccctcacacactcgagatgcgcatcgtcagaactgatggagcagaggaccagtacagcgttcttataaattttgacactcagagctccacagacagcttctataagcacttcaacgggaagcagttctcttcgctggaggggggtgtctgccatgtccgttttgtggaagaggtgcactacactgaattgattgagcatgcacatacctcagttacaaacttggctgagcaacctacatgcccagtatgtcttgaacgacttgaccaagatcctggaggtattctcacaacaatctgcaaccattctttccactgctcgtgcatatcaaaatggacagactcctcatgcccggtctgtagatattgtcagcagcaaccagagaaatccatgtgttctatttgcggaacttcggagaatctttggatatgtctaatctgtggccatgttggctgtggaaggtacaagggtggacatgctattgaacactggaaggaaactcaacattgttattcacttgagttagagacacaaaaagtgtgggactatgctggggacaactatgtacatcggcttattcagtcaaaaacagatggaaagctagttgagtacaatttccatggtgatcacacagcagagagcacgtgttcactatgcagtggtgatgccgcaatggatgaagctctactgaacagtaaatttgaagctattgttgaagagtacaatgatctcgtcacatttcaacttgaaaagcaaagaaataagtcaaggaggaaactgagaaagaaatttctgctgctactgagaaagccatgagcacaaaactccaaaagttggaagtaaagtttgacaagtgtatggaagagaaaaaatttcttgatgaagtaaatggcaatcttgtcaagaatcaggagatgtggattgaaactatacgaaaagcacaagcaagggagcaagctgcgctcagattaaaagatgagaagatcgaaaaacttcaggaagagctaagaggtttgatagcccatttcgactgccaaagtgacactgcacaagcttcaaatgcgatctcgagcgatataccagggggcatgattcttccggtagcatcagaatcgtcctcgagcggcggcgttgttggtggcactggaaacggggagcaaaattgagtaaactgcgccctgtataaagcacgtttggatcttagggacctaggtatattcttgcttccaaacccccaccgttgtatgttcagttagggtaatacacacttgttagctgtcacctcactgcccctcgattctactgtcactagccgctagtagtgtggtactagggatgaaaacgatttcatttttttttggtttttcgaaattcgtttccgatttttcgaccgtatttaatggttatggtatttttcgaaaacataattggtta

SEQ ID NO: 3514 - DNA, 1900 bp, Zea Mays
gtcagatcggacttggttcctacaactttttcggcctggccaaccgtgctgtgcaggagagcagtgcagaggagagcgaggaggcgtgcgattgcttgctttgcttccgagtttcgacacgcgtgcccaggaatcggtcggattccccaatcccgtcaccatggccgcgccgccttctccttcgtcccgctccccgtcgagcgaggttgccgtccacagattcagcggcaccttggatgtatcatcatcgccctcaaggaccgagttgttgagcatggtgaagaagcactcacatttgattgggtggacgattattggtgccgaggatgatgcatcagatgtgggaatggatgataaattctggcatgaaatgcttgacctattctttgtgcgtggcaggcaatcaaaaagaagtgaagaggatgaccttgtcttctttgttaataacatgaaattgcatggttatggtttcaatgataacatggaagatccacctcccttttttgtacggagatgggctcccacgcttgaaaagatcagtattaatacagtggaggttgattgggagcgttcattctatttgaatttaatcgctcacacgtcgtacactgtcactgttgcaatatttggaattgaagatcttcgcaaccgtgcagtgaaaaacaaacagttgcctccagtttataaggttacaaaaaatgtatacgcgtctcctagccgtgtaaattttcatcttgacagaagaaaggctgtagaaacactaccggcatatcccaacatctttttctctgtagacgacttcgatgatacttttgatgctgtggtaaggttctgtgcaattatatcaaagttgtagttgtacaacattctgtccaggttttgtcagatcctgaacactgctattgtgtgattcttaacgcacatgatggggcagcatttcccgaagaaagtgagtgcaagaatcctgtttcaaatacacagcctggaatgagctgtggtagtgcccaagaaaaaccaccaaagagaactctcttctcagcttatgtgggctaccaaaatgttcgtggggcttatgatgcttgcagatcaaaatttgggagtttcctctcacttgggcatgaccacaataagctcgacagactttttatgaagggcccagaaggacgtggagaggtggaagtagctgtctctggcattgcagatcagagcagtgggaagtcgaagaaagatccaggagatagctttcgagtccttgttcacagagcagcttctgctgcatcaaagctagtgaagcatgcttatgagtcttcatctgctaacagacaaatggatgatgagcttgtccctctgaagtgttgcttgatgtctgtgtctcttccttgggactacattgcccacgatcttttgcacaaggacacacctccgatggatctgtgatagcaattccagatcttcactgccagtcatgggaggaatccaggcgtgatgagatgcaaggtaaagaatcgaagtggaattaggatgtagatgcttttagaccaaatatgtgaagtgtagggtttgtaatgtgcttgtgcacaggttaccatacaatgtaaatacaatgtacatatcatgcatgccttacagaacttgattgtatttcttgaacttgctgttttttccttagcaaataattcttcaatttgcattgatccatagtaggtgctatattcttatctgggatgtagtttgctctgcataggtataactgatacgtaactatgactatttaactagagtggttttgagtgaccaagtgttagctagttagcaagtatttaatttaaaaaatagtaaatgaaagggatctaaaataatctcaactgtccttgtatttttatttataataaagtataaa

SEQ ID NO: 3515 - DNA, 1579 bp, Zea Mays
taaaacaatttattacgacgctgaggcattttctcgtgaaagaaaacgcactcccgactcccgagtgatcccgagtcccgacggccgacgcgcgcttaagggcttacggctaatccggcggctacgaaaggaaacatctaccccgttcaaccgttccatttcttctcccgttccgttcaccccccccgcgagctctatctttcgtggcgcagctcggcagctgggcggccgccccccgccggcgccacgccctaagctacgccaggttcccagttcttcgtccgtccttttgctaggtcttcgttggacacttaaacggcgacgagcaccgccagacgcgctggtgcctggatccggcgggagtgcttcaggttttgacggttcgtctctctcgttgtttccggcggggttatgaaggcggtgggatacagcccctacgacagcagcgcacaaaatagaggactaagagggcgatctttcagtgggaatgtcgtagcatctgctggggcatttccttacatgagggcaaataatgatctggagagtgaaatacatcgggttgagcaagatgcatatactggtattcttagggcatttaaagtgcaatctgatgcaatatcctgggaaaaggagagcttgattactgaactcaggaaagaactgagggtttctgatgaggagcatagggagctattaaataaagtcaatgaagatgggaccatccgtcgaatgagggagttaagacaggcaggtggatccccaagtggtttgcatcatggcaacatggttttatatggtgcagaacctgggtccactaccaagaggcaaagggcatctcattcgattcctttgcaatcagcaggcctccagtcccctatgatgccctcccactcagtttcatctgcaaaatggggtcctttgcaagcaagaggcacgaaagcgaggacgcccattcctttggcgttaccatctgtggatccaagttcactaataaaccataaagtttatacaaggtggccagaagacaacaacttctatgaggccaccataacacgatataaccctgtgacgggtgagcatggacttgtctatgacatgggcacacaagccgagagttgggaatcagttagactttgtgatatggcacctgaagatataagatggggatttgatggacacctttcaaatcgtgatgtctggagcccttctggccctatgttgatgaggcacatgaccaacaatggtgctatggcaggttcaatcaagggaagagggaggttatcaataaatgagactataaaggactatgctccacctgaaaatggcaccaataggaattttgatcatgtcgacataccaaataccggaagtgttgttatggaggtgaagagggtattgttcaacccaaatatgcctgaaatcgagaaggcaaggaaacttttgaaagatcaggagcagtcattacttgatgcaattgccagacttgatgaagcatctgatagcgataatgtgtttagggtgatgaacagtgacacgctacatctagagggagagagaagcggaccgacacgtagggggc

SEQ ID NO: 3516 - DNA, 2903 bp, Zea Mays
ccttaaaccctaaaccgtctgccggccgccatgcggcgccaccaccacctcttcgttatcctccgccgcgcggtcgcctcctctgcctcccagcgcgcgcagccccttcccttgctccactccgttgcgctccgaaatggcgcagctggttccttctccccgtgcttcttctcctcccgcgcccgttcctcggtcggcgccgcgaagagccttgtggaagacgaggcggagctcagcgactggattagcgacctcaaaactgactcgttccacctcggtctcagcagcggagacgaaggcgatgcgccgtccacccgcaggtcctcggtcggctcatccaggggcggccgaggtgggtcggactccaggggttcgttcccgaggtcaagtacggccggcggtgagttcagtggagacagacgcggcggcttcgagcagagggggaggatgattagtagtggactggatgatgctgattccggctttggttcctccaggggaaggcggggacggggtgagaggacgtcggggttcgtgagaagaggagggagggggaatggatttgatgaggaggccacatttaggtctcctagggagcagcgaagccagcgagggagggcttcaggtgtggcgagaaggggagggaggtacagtgactttgaccaagatgatggtgacactggatttgggtcttcaaggggaagacacggtgccagtggtcaactgtctgtatcctcacacagaagaggaagggtgagtgatttagatgacgatgaggatagtgatgatgatttggttgggtttggggatcttgatggaaagcagcatcatggtcgcaggaaagggggaagggaaaacacagttgggctgggccgaggtcggggcaggagggatttgggtctgtcacgaaagggagggagttacaatgattttggtgattatgatgacggaaggagaaggacgtccgatcttttgcagagaacagggagaggaagcgatttagatgacgatgaagatgatgatgctggtccagttgggtttgatggttacagtgtaaggcagcaaggtggcaggagaggcaaaatggcgaagagtgttggaccacatcggggtgggaggggcagcgatacggactttggtcaccgacagccaaggggtctgaaaaaaattgactttggcttgtcagaggatgatgatgaggcgggggaagttgatgaggaagatgagccatcggggttcgaagatgatctttttgaagacgagggtgataaggaggatgtgggacatataataggtaataagtctggctcatctatgttacccgaagatgagccagctaaaaatgaaagtgtacagggcagaagtgctgggggtggtgattcttatctgagccagaagaggtttgatgaatgcccgttatctcccttgtcactgaaaggtgttaaggctgctgggtatgaacggatgactgctgttcaggaggctactcttcctattatacttcaagggaaggatgtactagccaaagcaaagacaggaactggaaaaactgtagctttcttgctaccagcaattgaagttgtttcgaaattgccacctgttgatcgtgatctaaagaaacctcccatcagtgttgtagtagtgtgccctacacgtgagcttgctgatcaggctgctgcagaagctaacaagcttcttaaatttcatccatcaattggagtacagcttgtaataggcggcactagaatggcacttgaacagaagcgcatgcacactaacccttgccagattctagtagctactcctggaaggcttagggatcacatggagaacactccagggtttgctacaaggttgttgggtgtcaaagttctaattcttgatgaagctgaccgcttgttagatatgggattccgatcagatattgaaaaaattgtggctgcactaccaaaacagcgtcaaacacttctattttctgcgacagttccagatgaggttcgtcaagtatgtcatattgccatgaaaagagatcttgaattcgtcaacactgttcaagaaggaagtgaggaaacacactctcaggtgaagcaaatgcatttaattgcaccactggacaaacaattctccaacctatatggtcttctaactgatcatatttctgaaaatgttgactacaaggtgattgtattctgtacaacagcaaaagtaacaagccttgttgctgagcttctgtctgagttgaagttgaatgtacgtgagatccactccagaaaacctcaaagctacagaactaggatatcgaaagaatttaaggagtcaaagggtctcattcttgttagctctgatgtatctgccaggggtgttgattatcccaatgtcacactagttgtgcagttgggggtgccaactgacagagagcaatatattcatcgacttggtagaactggtcgcagaggcaatgaggggacaggaatcttactattggcaccatgggaagaatatttccttaggagcatcaatgacttgcctattacagaggcaacacaaccattaattgatctggatactaagaaaaagaggtttctattcttttgataaacccatctgggttttatcttcatcagcagacatgaaggtcgataaggctcttgcacatgtggaggttaaagacaaggaatccgcttatcaggcgtggcttggttactacaattcaaataaggtcattgggcgcgacaaataccagcttgtatcacttgccaatgagttcagcagaagcatgggtctcaacaaccctcctgcagtgtctaagcttgccctcaggaagatggggctgaacaacattccaggaccttcagcggagaataagactccaacaatagtccctttgtggtgctagatctttt

SEQ ID NO: 3517 - DNA, 3210 bp, Zea Mays
ttaaaccctaaaccgtctgccggccgccatgcggcgccaccaccacctcttcgttatcctccgccgcgcggtcgcctcctctgcctcccagcgcgcgcagccccttcccttgctccactccgttgcgctccgaaatggcgcagctggttccttctccccgtgcttcttctcctcccgcgcccgttcctcggtcggcgccgcgaagagccttgtggaagacgaggcggagctcagcgactggattagcgacctcaaaactgactcgttccacctcggtctcagcagcggagacgaaggcgatgcgccgtccacccgcaggtcctcggtcggctcatccaggggcggccgaggtgggtcggactccaggggttcgttcccgaggtcaagtacggccggcggtgagttcagtggagacagacgcggcggcttcgagcagagggggaggatgattagtagtggactggatgatgctgattccggctttggttcctccaggggaaggcggggacggggtgagaggacgtcggggttcgtgagaagaggagggagggggaatggatttgatgaggaggccacatttaggtctcctagggagcagcgaagccagcgagggagggcttcaggtgtggcgagaaggggagggaggtacagtgactttgaccaagatgatggtgacactggatttgggtcttcaaggggaagacacggtgccagtggtcaactgtctgtatcctcacacagaagaggaagggtgagtgatttagatgacgatgaggatagtgatgatgatttggttgggtttggggatcttgatggaaagcagcatcatggtcgcaggaaagggggaagggaaaacacagttgggctgggccgaggtcggggcaggagggatttgggtctgtcacgaaagggagggagttacaatgattttggtgattatgatgacggaaggagaaggacgtccgatcttttgcagagaacagggagaggaagcgatttagatgacgatgaagatgatgatgctggtccagttgggtttgatggttacagtgtaaggcagcaaggtggcaggagaggcaaaatggcgaagagtgttggaccacatcggggtgggaggggcagcgatacggactttggtcaccgacagccaaggggtctgaaaaaaattgactttggcttgtcagaggatgatgatgaggcgggggaagttgatgaggaagatgagccatcggggttcgaagatgatctttttgaagacgagggtgataaggaggatgtgggacatataataggtaataagtctggctcatctatgttacccgaagatgagccagctaaaaatgaaagtgtacagggcagaagtgctgggggtggtgattcttatctgagccagaagaggtttgatgaatgcccgttatctcccttgtcactgaaaggtgttaaggctgctgggtatgaacggatgactgctgttcaggaggctactcttcctattatacttcaagggaaggatgtactagccaaagcaaagacaggaactggaaaaactgtagctttcttgctaccagcaattgaagttgtttcgaaattgccacctgttgatcgtgatctaaagaaacctcccatcagtgttgtagtagtgtgccctacacgtgagcttgctgatcaggctgctgcagaagctaacaagcttcttaaatttcatccatcaattggagtacagcttgtaataggcggcactagaatggcacttgaacagaagcgcatgcacactaacccttgccagattctagtagctactcctggaaggcttagggatcacatggagaacactccagggtttgctacaaggttgttgggtgtcaaagttctaattcttgatgaagctgaccgcttgttagatatgggattccgatcagatattgaaaaaattgtggctgcactaccaaaacagcgtcaaacacttctattttctgcgacagttccagatgaggttcgtcaagtatgtcatattgccatgaaaagagatcttgaattcgtcaacactgttcaagaaggaagtgaggaaacacactctcaggtgaagcaaatgcatttaattgcaccactggacaaacaattctccaacctatatggtcttctaactgatcatatttctgaaaatgttgactacaaggtgattgtattctgtacaacagcaaaagtaacaagccttgttgctgagcttctgtctgagttgaagttgaatgtacgtgagatccactccagaaaacctcaaagctacagaactaggatatcgaaagaatttaaggagtcaaagggtctcattcttgttagctctgatgtatctgccaggggtgttgattatcccaatgtcacactagttgtgcagttgggggtgccaactgacagagagcaatatattcatcgacttggtagaactggtcgcagaggcaatgaggggacaggaatcttactattggcaccatgggaagaatatttccttaggagcatcaatgacttgcctattacagaggcaacacaaccattaattgatctggatactaagaaaaagaggtttctattcttttgataaacccatctgggttttatcttcatcagcagacatgaaggttactcattgccctccctccctccagccatcttctgagtatcaggttcatattgagaaacgggcacatagccagcggtagcggcttcaggtcgataaggctcttgcacatgtggaggttaaagacaaggaatccgcttatcaggcgtggcttggttactacaattcaaataaggtcattgggcgcgacaaataccagcttgtatcacttgccaatgagttcagcagaagcatgggtctcaacaaccctcctgcagtgtctaagcttgccctcaggaagatggggctgaacaacattccaggtctgagatcaaagtaaccaattgccatgtatactgtatacatgtcttgaagtcttttttgcacatgatctgacatctgagcacgctattccatactgatcgagttgagttagtttctggtaataaatttattgtacgttttatgcttgcagaagtgcacgaatattcataatatgttctcattcgtttgttctgttactgagataacaaatgataaagatgaacgtgttttgctattaaagaaaataaagggatacaaataaatgaagataataa

SEQ ID NO: 3518 - DNA, 1660 bp, Zea Mays
cactatactccaactccatataaggcagccatgtatccctttcccttgcattgtaccatcaccttcctcctgtttttcttgcctgtctccatactcaccagttgcttttgaggagctgatcgagctacaagcaatcgggcaaaggatatttccgagctaggtattattgcaaggaagaattaatatgcatccaggaggtggaccactgtcggtgccaccaggcttccgcttccacccgaccgacgaggagctcctctactactacctgaggaagaaggtttcctatgagcccatagatcttgatgtcataagggagattgatctcaaccagcttgagccatgggatctcaaagaaaggtgcaggataggcaccgggcatcagaacgagtggtacttcttcagccacaaggacaagaagtacccgacgggaacaaggacgaaccgcgccacgacggcggggttctggaaggcgactgggcgagacaaggccatcttcctcggcaacgcctccaggaggatcggcttgaggaagaccctggtgttctacatcggcagggcgccacacggcaagaagactgactggatcatgcacgagtaccgcctggaccaagagaacgttgagattcaggaagatggttgggtggtgtgtagggttttcaagaagaagagctatcaccagagaggcctcaatccggctgaaatggccgccgcactggacgacgacgagctccagcctttccctgttcctatccccggcagctccctgcagccaacagagcacaagaccaaccctactcacctcatgcaatatgactatccttccttcgacccttccatgcagctcccacagctgatgagcgatgaccaggaacaggaacagcccgtgcggccaaccctcctccccggccatcccggcgttgctatggcctccatgagctcactcaacattgagtgctcgcagaacctgacgaagctcacatctaacggcagcgacgagatgctccacgtcggccacggcggtggggctggaggtggtgtagtcgtcgaccgcttcgctggcacgacgacagattggtcgatcctagacaagctcctcgcctcgcaccagaacctcgaccggctcttccacggcaaggtcgtcaccacggcatctgcctccccaatggcggtaccggtataccatcagcagctcatggaactcggtggctcgtcgtcgtccttgcagaggcttccactgcagtacctcggcggcgagacggccgatctcctcaggtaccccaagtaattggatcgacctcaagtttagctacctctctcttgttgagcagtgaccagatcagggtttttggttgactactagatcgatcgactgcttaattaattcggtctactttgtatggagagtttagtgctcctaaatgtatatatatggtgcaactgttttgggcatgcaggcatggaatgccatctactgtggttgattgtgtttggtcaggactcaggaggatctttttgctgttttcattttggcttagggttgcttgttaggtacggtgcttttggtggaaaaaaatgtgaagagatggcatggtcagtcaagaacttctatttgtttcctcaaacatattactacttccactagtagaaaagagctcaaagc

SEQ ID NO: 3519 - DNA, 1738 bp, Zea Mays
tgccggctgccgcgtcacgtcacgtgcagcgcacacaccatccgccgccagggcggggcccatcgcggcatcgccgtcgagtcgcctctgcattccttttccttcccagttcactcccacttcccacttcactcccagtcccagctcccaaaccatctgatctgctctgctcccaccaatctccgtcgccgtcgctttcgccatggcttcccatcgccacttcctacgcctcctcgaagaccccttctcccccttcccaccgccgccaccttcctcctcctcctgcccgttcctccttgacggcgtctcagattacccgtccccgttccccgccgcctccccattccccgacctagatgatctcctcctgccccccgcgccggcgctcgaccccttcttggccttcacccccaccccgctcattctccgagacctcaccaaccgtgtcgccgcactcgaggtcgccgtcgccaccgcgcgccgccgccccggaccccccgccacccggaagcgcacctatgtcactgaggccggcggccgcaaggtcaagtggacttccgtcgagaagccgcgcgccggggagcggacgctcaagtgggaggccgagatcaagtcccccgacgacgacggcttcgaccgcaagtggaagtgggaggccaagggcggatcctccgcagccagcgccaggaagctcaagtggggtgccgcggtcaagggcaagggatgtctcgagccctggtcccaggcctacacctgggaggaggacttcaccgccagcgacagcgacaaagaagaggaggagcgcgcggccgacaagaacaaggccaagaagatcaccatgaacaagaatgagaagaaggaggtgaaggctgtcaagaaggagaagaaatgccccttcgccaccgtcaagatcgaggagatctcggaagacaatgatgctggatgcgtcgccatcaaaaaggcatttgctaagggcaacggcaagggaaagaggaaggagctctcaccgcaggacgctgcattgctcatccagatgacctacagggctcaccttgctcatcgctcccaggcaccgcattgcgcatgaccacgaagagcgccagaggttctctgagaagatcatcgtgctgctcatcaccgtagatgcactcgagggacctgactacatggtgaggaccgcgaagaaatctatgctagaggagctcgaagcaatgctggaggttgtggaccctcagcccccagggaagcagcgatcactgagccgcaggaaatttgatctcccagagggtggagccatccccgatgagaaaaccgctgctgtgaacaaagccatcaggatcatcgaggaaggcaagtgaagtgatgcaccaccaccttgttactggcaggattgaatcctgatgaaagctccatatctatccgtgtatcgtctaggagaagtttatatccgtgtgctttgctgacactcgagggaggagaactaatatctgcactttattgtaccttaaatgatagccatgtttttattgtgaacctgtagtatgttgctaggcagtcagtttgaacattacaaatagcgtaagggcctctagccgggttggttaggtagtctgagtagcacttcctcatgtcctggttgtgggagcgaatgtcagactgtggttaaaaaaatatcccatcgtttgtcccacgccaaagtacaggtctaaagcttagtctcagtcgcggtcattctcat

SEQ ID NO: 3520 - DNA, 4525 bp, Zea Mays
ctcctctccctctccctctccctctcccctcttctgctgcttgttcttgtcaatagcgctcccaatcctgtcaccatcatcactagtccctcccgccccagctcctctgcctgtaaagatttcgttcgttcctctttcgaatctctgatcccgttctcggtcctcgattccgcctgcgaaagaaactcgtctttgctgcaatctatagaagtagcagggaggactttgtgcagagtttattttccttttcttcttcttcttttggtccggaggaacctagttcgccagtggttgcttgccactgacgaatcacgttcgggttgcgttctccgatccgtcccagcctaattctgggggcgcaggggaaggattcgggacggaaggaactagtttctgtgcttccttggattccacggcaaagcccggctgcgacgtcggcgtcgtctccaccgcattccggctacggttcccaagcaaccttgctgtggtggggatggtgtcgcaggctcccgtggcgggcgccagcctcgccgcgtcgctgtgcaagaagagcaaccgcgtcgcgcgggtgctcgcgtacgcgctgctcgagtggatcctcatcgcgctgctcctcgccaacggcgtcttctcctacctcatatcccggttcgccgccttcttcggcctcgcgccgccgtgcgcgctctgctcccgcctcggcgtcgacagcctcttcgagacccgcccgccgcaccaccgaggcgccgagcccctgcgccgcttgctgtgcgacgcgcacgccgccgagctgtcgcgcctcggctactgcagcgcgcaccgccggctcgcggacgccggggacatgtgcgaggactgcgccgcggcggcagcgcccgggaaggcgctgttgtcgtggatgggccggagcgagctgggtgagcgggacctcgcctgtgcctgctgcggtgtcgcgctcgagagcggcttctactcgccgcccttcttgctcaccacgtcggcgccgcgtggttcagattgtggcctcaagcaagaggaagaggcagcgatgccaaatggagacgtggtcgttgtctccaaggaaggtcctgtgatcgagctcttcgacgataagccgtttgtggaggatgactcaatcggcgtcttggctgccgaggttgttgccaatgttgagcggccggttgctcttgaatcaattgactcgttggtggtcaccatgggcaccgtgtcatctcaatccggtggcgaaggaaaggaagcagttgaccatggtgttgtaaggcagaacaacgtggacatggagaacacagttagtagcaatgaggagaaaattatgccatctgatgataaggtggatgtggttgatcggctgattgatgaacagattgttgccgtagtccttgtgccagcttgtatagaagctacacttgatggtggcataaatgcagacaaaaccgtggatgcctttgctgatcatcagtctcttgaggatgacagtggattggaagttaaggaccagaaaatatcatttgaagatgaggtatttgaaggtgagcaagctgaacaggttactcaacaacaggaactgtgtgctatgccaacagatcctagtgaccatgaatttgttgagaggttagatagaagtactgagttggagcattttccactggctgagtcaaagcataaaatgaactctatgccagtggaagcttctaagcacgttgctgtaactcagattgaggggaagcaggttcaacaagctgaggtaaatcaggagttggattcaataccaaaatgttccagggagcatgctgatgaagaacttcaaggagagagaactgcacaggctgggttggaacaagagtgtgactctgtgccaattgattatggggaacacggttcccttacttcatatgctcatactgatgatgagcaagatgaggcgatgcagaaagtcacttctgtaactcggattgaagagaagcaggttcaacaagctgaggtaaatcaggagttggattcaataccaaaatgttccagggagcatgctgatgaagaacttcaaggagagagaactgcgcaggctgggttggaacaagagtgtgactctgtgccaattgattctggggaacacggttgccttacttcatatgctcatactgatgatgagcaagatgaggcgaagcagaaagtcacttctgtaactcggattgaagagatgcaggttcaacaagctgaggtaaatcaggagttggattcaataccaaaacgttccagggagcatgctgatcaagaacttgaagtagagagaactgcacaggctgggttggaacaagagtgtgactctgtgccaattgattctgaggaacacggttgcctgttttcatatgctcatactgatgatgagcaagatgaggtgaagcagaaagtcacttctgaaacagcagatgttctacattatgcagcagacacttttaatgttaacacaaactcatggaaagatattgaagaggattcaactgaagctgctctaacagccatacatcaaatttgttacgaacctttgacgagcatagtcaagttctctctagatcatagtgtctccgaagaagacagagagcctgatacgccgactcatattgaaggtatatgtgattcacaggaactgctggattctaaagcagttgtttctgatgctaaatctgtagattcaagtgttgctactttgtctactgatctggaaagcactgaattggtgagtgtggatcaactaaaatctgctttggcttccacacgcaaatcattgaacaccctatattctgaacttgaaaatgagaggaacgctgctgctatagctgccgatgaaaccatggcaatgataaaccgcttgcaagaacagaaagctgcaatgcagatggaggcgattcaataccagcggcttatggaggaacagtcagagtatgaccaagaagcactgcagaggttgaatgaactagttgttaagagagagaaggagaagcaagatctggagagagagctcgagctgtatcgccacaaggttcatctctatgaggtaaaggtgaggaaattgtccaggcacaaggctgatgaccagaatggatcatcgtcaacttcatcgagtgctgaggatagtgatgacctttcacaaagtttctatgaaggtgatgaatcttcccatggtattaatggaagcaatgggagtattcctacagatgttgtgctacaagaaactgccaggcatcttgttacccttgatggctcactagctgattttgaggaagagagactatccatactggaacagcttaaagtgctagaagataaactttttgatcttgatgatgaagagtccgataacatgaagcatttctcagaagaaaaccatttaagtggtgcctcaaatggtttctctgatgatgatagctgctttaagctccatgacaagagaaagaatgtaacctacagaggaaagaaactccttccattgttcgacgatgctaccgtggaagctggaaacgtcccccaaggtaatgatgcacagcattcaacagaggtcacactggaccttgctagagagcaacataagcttgcaattgccaatgaaatcgatcaggtacacgagaggctgcatgctcttgaggcagatagggaatacataaaacagtgcgttaggactttgaagaagggagggaaagggtttgatcttcttcaggagatattacagcatcttcgggacctaagaaggattgagcaacgtgcaagtgcaaggaactctggggagctttcgcctcattacctacatcatcacacggattgaagatccctgcctatgtccagcgaatattgcttgaagatggaaatcatacaacaatgataaggggaaaaaaagattgccgactaagtagtattgtcattggagaagttttgttggttcctggagtggaaggagctcctcctggaacacccgtcacagtcggttcgaagataccattgggaaggcagatcacggagcaattctgccttccaaggtccaggattttttttgtggaccacttcccacgttctctttttgtgttggtttagttttcccggtgggttccaaacttttgcccaagggcaagagggtggttggtgagccgcccgggcccctgtggggctgtgtgtttgtggggggtgtggcggcaatcatggccttgtgcagaagctttagaattcattaacctgaagacatgccgatgccagctttgctgccagatatgttgggcttcactagtttttgttttcttctttttttctaaatcctttccctgtaaatcttctagctgtatgtaatgtgctttcggcctttggaatgatgaggtgttgggtgtgtgcatagcatgactgttgttttatgggtctttttttttctttcccttttgttctttttcgctgttattgttctggacattgcaatattttgatgcaagtgctgcttattagttattgaactctgaaagcaacc

SEQ ID NO: 3521 - DNA, 379 bp, Zea Mays
caaaggagctgagagcctagccttctgagttctgagatggggggcagtcaagagggatgggatataccccgagccccagccaaggaccataactttcttccctctccagcaatgggaaagactcattgccagttgatcttcctaagccgattgaaaatgaaaaaactgtggaagttgcacactccaatgtgaagccattcagtgtgcatccactacccttggcaaagacttctgatgtgctcataaaatcctcaaatggttctgatgattcaaaggaagagaaaacccagtactatccaggtctatacttcatccttattctgtattattggcatttcttcactttatgtccaggttacttgtggttatggtacttaaa

SEQ ID NO: 3522 - DNA, 3136 bp, Zea Mays
acagctcagctgctcaacctcagccaactcagatgttcccgttgcacgattcgaacggcggcgaatcgcaaaaaattgggagggagaggtcgagtgcgaacgcctcctcctcgccgccaccgccaccgccgccgccaccaccacaaccggcgtctcgtcggctataaaaccctaccccttctagtcttcccgtcgccaccagccgcctcgctgaaaccctaaacctctctccccgttaggtctcccccagcgccccgacgatggcggaggacgcaccgcctgcagcccctgtgatgacgccggaggaagtgcaggctgagaccgagctgcggatgcgcgacataggccagcgctttggtgctatcccagaggaccccgacgagctgctccggttactcgaagaagccgaaatctggttgtccagggtggatcaatctccgcccgagagcatgtacaatgctcttcgccccaccatggctgttttgattacaaatgagctactggagcaccctgatcccaacgtgaaggttgctctcacctcttgcttaacagaagttaccaggattactgcgccagaggccccctatgatgatgatgttatgaaggacgtgtttaagagagtcgtagagacttttgctgagttggatgatatgaacagcccctcctttgcaaggagggtttcgatccttgattctgttgcaagggttcgttgttgtgttctgatgttggatcttgacttggaccatatgatactggacatgttccgccatttttttaaaactgcctccaccaagcattcagaacaagtcacccactgtatggaaattataatgatgtttgtaattcaggagagcgatgatgtccatgctgaactggcatcattccttcttcagaaccttacaaaagaagcacaagaaactctcccggcatcttttggacttgcagagagggtactaggcctatgcagggacaagctcaaaccagtgtttcatgagttacttaaggccactctcttggatgaatacagcaatgttgttacgatgttgttccaagatgcttcagatgctggagagaacaatgtcgatgcatcaggaaaagacatggcagctgaaggtaaactttctgaaaagtctgtttctgatgagtcacgacaggaaacttcaaaggtagaccgaaatgtcaattgcctaggccaagaaggtactagcccaagtagtactccaacaactgccattagcaatggtggtgctccgattgacaatgtcaagtctccagatgaaccagattcttcaaaacagaagcaagaactgacttctggtgacgaacagacaccagattcttctaaacagaagcaagaactgacttctggtgatgagcagacaccaaattcttctaaacagaagccagaactgacttttcttgacaagcagaccaaaagttctgagcaattggtatcttgtgatgtagaagtacaagaaccagtgactgttggaactgaaaagctatctgatatcaattcaaagaaagatcacaagcttggttcttccaccggatctgagatgactgaacaacccaaggttgttaaagacaatgagagtctagtagcatctgagttatccccagagacaaatgatggtgataaaaagcagctaacagagtctggcaatataactgctgacgaatcatcaaaaccaatcgatactaaacctgcttctgttaaaccaaagaggggccgacctccagcagcaaagtctcaggagaaaaagcctgttggaaagaaacaggcatcaaacctaaaatctccaaaacttgatcctgtcactgattctgtagggagagctaccaggcaactgaataatgatgttgcaaagtcttcatcaactaaggctgttgatggagaatctgggaagaagcaacataaaaccagtatgaaatttcagaaagaagatgccgcctctgataaagacaccgatgatgatattagtttgaaggaaatggtgtccccaacaaggattgataaatcaaaaggccaacaagaagatagagggacgtcatcaaaaaggaaacgtctgctggaagctcaagatacccctgtatcgaagaaaaacaaaatgcttgacaaaaaccttattggctcaagaattaaagtttggtggccagatgacaaaatgttttatgcgggtgttgttgaatcattcgatgcctcgtcaaagaagcacaaggtttcgtatgatgatggtgatgttgaggtactagctcttaagaaggaaagatgggagttcattgctgaggaacaaggcgctgatcctgatgtggcatctaatatgccacgtggcaggaaagctaaagggagctcggttcaacaaatggagggaaaaacaggaacacctcaaagccagactgaagggaaaaagtgtcgagaaggatactgaagagacacctaagactggcagtaactctaagaaggaaggtgcaaaaccctctcgatctactggaaaggctaaggattctgttgtcaaggcaagcagcaaggatgaggctgatagcaccgacaactcaaaggatgctgctgccagtgaagacaaggattcaaaagatgaagtgaaatccagtgaagctatcgatggatccaagacaaatggcctttcaaccaaaaggaagccagatgagaatgaaggtgagtcatcagaggaggagaaggcgtctactaaaactactaccagaaagaagcgcagaagaaagagccgcaactagttgcccagaagctatgcagctcatcatctaagtggcgttccgcccttgcagtctcaagtctcaaagatgttggcatgaggcatgccatgtactgtacgctttatattcactggaccggttaccagcttagcgctttggtagttggccattatgagtcagctcgtagttatagcagtcttaaactctcaataggagctgtaatgtttggtcttactttttttttgtttctccttgccaacggctgtgcctctggcaaaaatggatttgattcttgcttgggttcaagcttttgtgttaaaacgtgatgcagtttgagttatctgctggcaaacagaaatacgttcctcttatgaagcgaatcttgcaaaaggaaggcacacca

SEQ ID NO: 3523 - DNA, 2332 bp, Zea Mays
ggtgctcctgtcagccccacccccacgacgtcccccggacccccgtttccttccgatccccatccgccatcccccgttcccgttcttctccttccgtccgaccgtccctcgacactgccgaggccgaacctagcagccgcccacccgacgcccaatccgccggtgcaatcgcaatctccgagggttaatcgactaccggcggctacggcgccgccagtctcctggcttaggctgccaggggatgcgaggagccagcgcagcgcggccgccggccagccgcccccgccccactgcctataccgccagctacagtcggaaacggctgcaaggcagtcggaagagggaagccgcagccgggcactgactccgatccccactctagccaaccccacgcggaccggtccacctcggacgaccacgacgccatctcgcacgcgtgcttccacccaaccacacaaatcttctctcccaggcctaaccttcctccccgcgagctgcctctactgattttgcactggcatgccgtgacgcggaaagatgtggagatccatcttggactgatttcttccttactcggttattcgccctctgccggcgcaagatccattttagtttgcccccctcccccaaattggactacccaaggtgcggggacatccgcctatgtttgaacagttctgttggagcatgctctgttttaaattgactgaacctccatgccctatgctgaatttgcttctcagagagctattttttcattaatgttttttatgtttgctgcaaaagctttaatttttcttgtcaaactagattgtgttgtttagggagcttgcacaacgattaattggaaggaacatacgaaagaaaagaaccggaaggattaatcatgctgtatatatataagctatccttgacgctgcttgttgtttgctggttattgcaggttgaagataccttggtagtcagagcatagaataagggtggactgttattaattttccataggatggaatccttgtggaagctgacctacttgctcgagccggcatcacttgctctcattgccacagctatctctgtggcctatgcatccgcatcgcgtgctctagattatggcaaagagatggagagaaacttggatttttcagaggcttccattacattggatcggtcacaggcactaatgattccccttgcaagctcatgcagtctgttgctgatgttctacttgttctcgtctgtctcacatcttgtgactgcttttactgctgtggcctctgcgatggcactgttcttttgcctgtctccgtatgtcacttatctcaagatgcagttcaatctaatggacccattcgtgtccaggtgttgttcaaagtcttttacacggttgcaaggtttgctgatgctcttctgcatagccacagtcttagcctggttggtttctgggcattggttgctaaataacctactgggaatttccatatgtatagcgtttgtcagccatgtgaggcttcccaacataaaaatctgtgcgctgcttcttgcctgcttgtttgtgtatgatattttctgggtgttcttctcagaaaggttctttggagcaaatgtcatggtttctgttgccacccagaaggcatctaatcctgttcacacagtagcaaataagctcagcctgcccggattgcaattgattacaaagaagctggagcttccagtcaagcttgtatttccaaggaatttgttgggtgggattgttccaggaagcaatcctggtgactacatgatgcttggccttggagacatggccattccagggatgcttctagctctggtactcttttttgataatcggaagttcaaggatgtgaattttccaccagatgtgtctcccccaaaacggcggaattatgtgtggtatgctgtaacaggttatggtattggcttggtagctgcactagctgctgggatcttgtctcagtctcctcaaccagccttactgtacctggtgccatcgacactgggacctgtcatgtacttgtcatggttacggaatgagctatgggagctatgggaagggtctgggacgattctgaacgagaaagctcatttgttggaggtctgagatccaagtggacaataagaaggatctgaacccaccgtgattgaatctaattaaacaatacttgacctcctcataccgaaggagagtatttataagctagaatgttcagtcatgtaagccatcacctagtttcgctcgcaagaggaaacacttacaaatcatgtaactgtttgtaatagaaaagttcaatgcatttcagctttttaacca

SEQ ID NO: 3524 - DNA, 1130 bp, Zea Mays
ttctcatcccgcggtacaggccccagccatgacgcttgtaccgttcccaagcagactgcaagtgccaaatgctttcccgtctcctcccgcgccaccatcaccgccgcctcctccaaaccctgtccagggccgccgccgccgccccagatgttgacctccaccagaggctgtgctcttcgtctgcagcgtcaagcccgagcctgtcgatatggcggcggaagaaggagatgggcaaggagggcctcatggtggtggcgcagctcaagcggctcgcggctctgcccccggcggggggtcacccgcgcctggagcagttcatgcgttcgcacgtgtcgcggctcctccgcaccgacctcctcgccgtcctcgccgagctcctccgccaggaccatgtcagcctctcaatgaagatatatggtgttgtgcggaaagaaatctggtaccgccctgacatgtacttctaccgtgacatgctatacatgctagcgaggaacaagaaaattaatgaaacaaggcaggtatgggcggatctcaagtctgaagacgtgctatttgatcagcacacttatggcgacattgtgagggccttctgtgatgctgatttgattgaccttgcaatggaaatctatgatgacatgaggagctcccccgaccctcctctatcattgccgttccgtgttatcctgaaagggttggttccataccctgaactgagggagaagataaagcaggattttctggagcttttcccagatatgattgtgtatgatccaccagataccttatctgatatagatgaagaattcaagttttgatgaatgtacgccttcatccggattcagtgcttctgagttacattccctgcactgcaggcaaacctccatttctcgttcttttggtgggctagatcaattgtaaatgtagctgtctcgatctgcccagtagctgtggtaccaccaattttaacctcttgatgaaccatttttgttaatctatgctttggagaattgtctgcttccgtctgtgtctcgtcctactttgaatcaccttgttctgaagtttggtactgctgctgtgcactgagatttgtgttccgttgatccctgctatataatcatttgtacacttca

SEQ ID NO: 3525 - DNA, 2025 bp, Zea Mays
cttcaaggagataccttttggtttatgctttagtcgtaccaaaacggaatatagctacttaattgctaataagccaaattaggctgataaagtaatggagtggaaaaggaaaaggtccttaattgagcggtgaagatattggcacctttcttttgtcaatataaactactagatgcacaatctgggactatgtaatactcctgtataaatcagatttaggatgtgtacagaggggctgtattcttgtgtataggttctctttctatcggtcaactgttgctgattcggacggaatgttggaggatcaatcttgcctgatatcaaggtcgctgccgggttcctgtgagcaggaatccagactagcttacatgacttaccacctacttgagatcacgaggagtaagcgcccgcctgggaccctgtcgattgagcacgacgtcgtggcagcattgactaaaaggacaaagtcctctgagcaccaaaacagcgaggcgctggattgtcaaggaagtaatggtcagggcgactcagattcaagcaccctgataagttccattggccgggacaactcgatcaactgtcttgctcgttgttctcgttctgactatggttctatcgcatcactgaaccggagcttccgatcgcttgtgcgcagtggcgaactgtacaaggagcgtcggcagcaggggatttcagaacactgggtctacttctcttgcaacgtgcaggagtgggaggcgtatgacccctaccgttcacggtggatgacgctcccaaggatgccccgcaacgaatgtttcatgcactctgacaaggagtcgcttgccgtgggcaccgagcttctggtgtttggaaaggagatcctctcgcatattatcctgagctatagcatcctgacacattcatggtcgcggggcgttgaaatgaacgcccctagatgtttgtttggatcagctagttttggagagaaagcaattatagccggaggcatggatgctgatggaagggtgcttcgctccgtcgagctgtataactcggaaaccaagaggtggacaacacttccaagcatgaataaggctaggcggaagtgctctggtgtcttcatggatggcaagttctatgtgatcggtggaatggccagtaacacagaagtgcttacttgtggagaagagtacgacctagatagaggtacctggcgggtgatagagaacatgtccgaggggctcaatggtgcaagcggcgctcctccactcgtcgccgttgtcgaaaacgagctatatgcagcgcagtacgccggaaagctagtgaggaagtacaataaaagggacaactcgtggacgacgctgggggagttaccggagcggccagaagccgtggatggctggggcattgcgttccggggctgcggagagcggctgttggtcatcggtggaccgagagtgctgggcggcgggatgatcgagctccattcctggattccaagcgaggggccactgcagtggaacatgatcggaagcaagccctcgggtaactttgtctataactgtgctgtcatggggtgctgatacgtgcgcccctcaaaacataccgtcgacgacacacgaaagattgtgatattgggtttttttttattatcaaatggcataaagcactgattaattccgcctgacgggtaatctctgcattcttttttttgacatttcagattttactcaaggttcgtccaatagagctagtcggttccgtgtactcgttaatagctagctacccattggttcctgtgctcagcacattctatttgcagtccatctgtacctttggtccatatgatatactctgttgaaatgagtttttttctgagatggacgcgtacaggtgataaattgtaattggggggtgggtaaccgtgcatctatatgatttgtttgtatcatgttctgaaccgtgtctcaacgctgtaattctattgtgcaaatgtctcttttccaagaactgcatgaaaaaaaaaagaaaagaaagtgccca

SEQ ID NO: 3526 - DNA, 1177 bp, Zea Mays
ctaaacctgatttgttaatcccgctgttctgtcttctgagagtcaccagagtttggcttggcaccttttcctctcctgaatcctgagggcagcatagctggaggaactgctggtgttgtggtggaaacagcactttacccgattgatactataaaaaccaggcttcaggccgctcgaggtggaagccggattgaatggaaaggcttgtattctggattagctggaaatctcactggcgtccttccggcctctgcgatatttgtcggggtgtatgagccaactaaaagaaaattactggaaacccttcctgaaaatctgagtgcagttgcccattttactgcaggggccattggaggtattgctgcttccctcgtccgtgtccctacagaggtggtcaaacaaaggatgcaaactggtcaattcaagtctgcacctgatgctgttcgtctcattgttgctaaagaaggatttaaaggactgtacgctggttatggttcctttctacttcgagatctaccatttgatgccatccagttctgcatttatgagcaacttcgaattggctacaaacttgtggcgaaaagggagttgaatgatccagagaatgcacttatcggtgcttttgctggcgccatcactggagctataacaactccccttgatgtcatgaagacaagattgatggttcagggacaagggaaccaatacactggaattgtaagctgtgctcagacaatcctcagagaggaaggccctaaggcattcttgaagggcattgagccgcgagtgctgtggattggcatcggtgggtccatcttctttggcatgctggagaaaaccaagtcgatgctagccgagaggaggaaccgcgagcttcgggccgtcaaggacgaatgagtggagatcagctcttttttggcgttgagtccttaccctgaaacaaaatacacatttttacttgccggggacaacctcgccggcccgtacttgtactccacggcgttcacgttatcacgtacgtagaaattatgagcatgactgacggtttctacagattgaaaaccaaaacttattacatgcgctggaaacctgccactcactgtttacgttgggagttaataacactatgcaacatttaaatgctatggtaagcctctaaaaccgcaaaatatttttt

SEQ ID NO: 3527 - DNA, 393 bp, Zea Mays
gccccgacgacgaccctccccactggcttctccccggaaatcggagacatcgagaactggatgaagatcatggacttcgattgtaaaagtatcaatgcagccatacgcaatattcaccagtcatgactctgcccgcgattacaatttcacgatttttaggaagtatccgtgtcattacgttctctgattagaattattgggtctggaaaccctctttttatggaaccgtgtctcctgattttcccatgctatgagtgtatgtacccttcaatttcaaagtgatgatatatataggatcaaaatacacctgtctgaggatgtgttcctagtggtgttagtctcgtgccattatcagaacaactgttgcccatcagcttgcatgttcaagaatca

SEQ ID NO: 3528 - DNA, 438 bp, Zea Mays
actctaatcttaggttccaaatacagttgaatttgctgactggattggtcgaacaaagcagaagaaaattcgtgtgacttcgaaatcggagacatcgagaactggatgaagatcatggacttcgattgtaaaagtatcaatgcagccatacgcaatattcaccagtcatgactctgcccgcgattacaatttcacgatttttaggaagtatccgtgtcattacgttctctgattagaattattgggtctggaaaccctctttttatggaaccgtgtctcctgattttcccatgctatgagtgtatgtacccttcaatttcaaagtgatgatatatataggatcaaaatacacctgtctgaggatgtgttcctagtggtgttagtctcgtgccattatcagaacaactgttgcccatcagcttgcatgttcaagaatca

SEQ ID NO: 3529 - DNA, 4073 bp, Zea Mays
atccttcggttttgtattctactccgcttcctttcgtcttccccttcgcccctttctctctctctctctctcgcgtgttctcgcgtcgccgtcgccgctggtgcgagatggtcgagacgaggcggagcgccgccgcgaagcgcccggcggcgggggaagaggataagggggcgccggcatcgcctgcatcggctcccgcggagaacgcgggggcgggtccgagggcgggtgacgatgtcgcgtcgtcgcagcccccgaagcgagccaaggttgggtgcacggaggcggacaccgagaagccgttggtggcgccggcagaagtcggcaccgttgcgggcccactgcccaacacggctggtctgcaggcgctgaccggcgccatggacaagctggaggccctcttgaggcccaaggagggtcagtccaatccggccgggcataagcggggcactaacgataaagatataacggcgaagataaagagagccatggatttatcggaggatttatcagcaaagataaagaaaaccaaggataatgtggctgggatattgaataagccacaggcggcagccaccagcaggcgtcaggagccctgactgggcgaatcatccactgcctcacctgtttgtagactgaagcaggctaagcgaggtgcactccttgaagtctttgaatccaaagttgtccgtgtcaatgggaaatctttggacaaggctgccaaggttaccttaaatggaggagatgaaattatcttccgttcaccagtgaggcatgcttatatatttgagcaacttcatcaggagaaatcaagcactccagcattatcctccacttgcagtagtatccagcaggggcagtgctcacatttcaaagatattcagggtcatttatcatctaaagggcacaaagtcccaaccatttactttggaagaggtcggtcttcattgttgcctagtggttcatcagcagatccactcctgcttaatttatgtaaaacgatggagggccagagccagcatagctccgaagataatatatcatctggtcggtttcagctaataaaggaggatttgataaatgcaacggttgacgcgagtgacatttttgagtcatttgatagttgcccatattatctaagtgatcataccaaatgtgccctcatgtcatcagcatatgtacatttacactgcaaagactacttgaagtttacaaaagatatatcttctcttagtcaacgagtgctgctatctggcccaacaggaactgacatctatcaagaatatctggtgaaggcacttgcaaagaattttggtgctagattgctcactgtagattcttccatgctgtttggtgggcaaacttccaaggagccggagacatacaaaaagggtgatagagtgaggtatattggttcggtacagtcgacaggcgttattcttgatggacagagccccccagattttggttcacagggtgaaatatttcttcctttcgaagaaaatagatcatcgaaggttggtgtaaggtttgataaaaaaattctgggaggaaacgatcttggaggcaattgcgaagttgaccatggtttgttttgtccagttgattctttatgcctcgacattccaggatgggaggttacatccaaacatccattagatgtgatatttgagtttatctctgaagaaattcggcatggcccttttatcctttttctgaaggacacggagaaaatttgtggcaataatgattactatcatggtctgaaaagcaagctaaaacatttcccagctggtgcttttataattggatctcaaatccagcctgccaatcgcaaagagaaggcaaagggtagttctccttttctttcgaagttcccatacagccaaactatacttgacctcgcattacaggacattgatgcgataaatggtaataataaagaaacttcaaaggcagcgaagcatttaatcaaacttttcccaaataaagtgatactcgaggcaccacaagatgaaatggagctttcacggtggaaccagatgttaaaccgagatattgaagtccttaaaggaaatgcaaacatttcaaaaatgcgttcttttctaacaagggttggtttggaatgcactgatcttgaggcgatattggtcaaggatcgcgttcttacaaatgagtgtattgataaaataattggttttgctttgagccatcaacttaagaactgtacaaatccagacccccctttgagtaatgtgcagtttgttctatccagcgaaagccttaagcatggtattgacatgttggaaagtatccagtctggctcgaagagcagcactaaaaggaaatcactgaaggatattgctacggaaaatgagtttgaaaagaggcttcttgcagatgttatccctccacatgaaatcggtgttacctttgaggacattggagctttagaaagtgtcaaagatactctgaaggagttagtgatgcttcctttgcaaagacctgaactttttaaccgaggacaacttatgaagccgtgtaaaggaattttactttttggcccacctggtactggaaagacaatgcttgctaaggctgtggcaactgaggctggtgctaatttcataaacatatcgatgtcaagcatctcttcaaagtggcttggtgaaggagaaaaattcgtgaaagctgttttttcactggcaagtaaaattgctccaagtgtaatttttgtggacgaggttgatggcatgctgggaaggcgggagaaccctggagaacatgaagccatgcgtaagatgaaaaatgagtttatggtgaactgggatggtctgagaacaaaggagaaagaacgtgtattagtacttgctgcaactaacaggccatttgatcttgatgaggctgttattaggcggcttccaaggaggttgatggtgaatttgccagatgcatcaaataggagaaagattcttagtgtaatactagccaaggaagatttggcagacgatgttgatctagaagctatagctaacttgacagaagggtactcgggtagtgatctcaagaatctttgtgttactgctgctcatcgtcctattagggagattcttgaaaaggagaagaaggagagagcttcagcagaaacagaaaataggccattgcctctgtcgcacactagcaatgatgtccgtgcattaagaataagtgatttcatacatgcgcatgaacaggtgtgtgcaagtgtttcctcagattccagtaacatgaacgagcttgtgcaatggaatgatctctatggagaaggcgggtcaaggaaaaagacaacgctaagctacttcatgtagctgatgttgcaagtatatcgggagaagtgccctggcacaaagcagaaatggttggaggcagttgggggtgtgtatcgggtgcagttggaaaagagctaggttcacctgccatccatccattgagagaattgatggctcaggtggagcggaatggagtagtatacacattggttgctgcctccactctgggccatgtatcatgcatctggacatgacggatggtctggcttgcagttgtcctaacaacagttttgagtgcaacatatcactgtctgggaaagaaaagaaaagaaaatataccatttgtgttgttcccactccacaggaagcacggcgacgacatcgcccaacaacccttttccatcgtttcttaaaaaataattcattatttaggttgtaaacatttagagcctgtgcaagtgtacagtatgagcatcaggagtattaacctagtgttgatgtctatacctaatctaatttattgattagaatcatttaacatgaaatacatgattattttgtatcttcgtgccttcgttaggttgataatggtcgaattaaaactaaccttgtggttatgatctctgttcacatcgtgtacaataaatagagagggtcggtacacttagattcgatccatctcactaaagtgaaggctgttgtcgtctatcttattgttcttaagctgacccccatcgttctaatagttaatctcatggctagggt

SEQ ID NO: 3530 - DNA, 2518 bp, Zea Mays
atgaccttacaggcactaacattgtaccctgcatctctcagtagggagcaaaaacggcagcgcattgccaggacagaggtttcttcttcacagcctgttgagaatgtgaatcagtttaagacctgtcgatgtggggagggagacccaaactccacatctgaaactggtgacagcccgccggcctcttgtcctaattgtcaggtccttaagagtggacatttactactttcatctaaaggaattggatggacatcatggaaaaagcgctggtttattcttacaagggcatccctagttttcttcagaagtgaccctaatgtacctccacccagaggagctgaaccgattgttacacttggtggaatcgacttgaatagctctggaagcgttgccgtcaaagaagaaaggaaacttttgacagtgttctttcctgatggtcgtgatggacgaactttcactctgaaggcagaaactacagaagacctaaatgagtggagaaatgcactggagagtgctttagcacaggcacccagcgtagcaaatacaatggggcaaaatccaatattcagcactgatgtagcagcagaacctgctgaagctccagctgaacagtcggaggacagttctgttattggcagacctgcagaatttgcacttgtagatgctgatggtagtccatcatttctggagaaggccctgaagttcattgaagatcatggggtaaaggtagagggcatcctgcgtcagtctgctgatgttgaagaagtcaaacgcagaattcaggattatgaaaaggggaaaaacgagttctctccagaagaggatgctcatgttattggtgactgtattaaggacttggaagaaggttcctgttcttcagatgcttataccgagtctgaggatgatgatgttgataaggaatattccacagataatgacattaatgatgatgatgacggttcttatgattctggtgaagatgacattgaagaagacttggactactctgatgacagtgaacatgacagtaagatcaacactaatgtcaaggatggcaaggttaaaaacaatatctcagaaactgcagaagttgcacaggcaaagggtgcttctcatatggagaccaatagtcaatccaaccagaaacaagaatcatgtggaccaaatggatccaaagatcgtatactaagatcaacttctcgttcatcatcctccagagaaaaatctatggagaaatcatgcagttcggcacacaggggaaaaagaaccttatggggccgtacttcagcaagaaaagacctgtcaacagaggagattgaatgctgcagtgatgatgagtcccttattgagaaacttgagagcaacaaggttgatctccaatcgaaaattgcaaaggaggccaaagaaaatgctattctacagtcaagtctagaaaagcggaaagaagaactacatgagcgccgtttagcacttgaaaaggaagttgaaaatttgagggagcagctgcagaaggagagaagtttgaggacatccttggagtccggggtgatgaatttgcgaagagggcaggtgtccttgccgtcaacaacagacagcaagactaaggctgatcttgaggaggttgcaactgctgaatctgatattataaacttgaagcaagaggtttctgatcttcgtgggcaggtcagtggccagcagctgtgctgtgaatcatgcaacaaaaggctcctaaacacagacaggcttggcggacctgaaagctcatcagtggcagcgtcaccgaccattgggagtgactctgcatctggcatggttaaaaaagaacagaaaacatttcagggtgatatcgagcaatcaaggaagcagacggcacaggattcgccttcttcgacagacaagccaggtcacgaggcggtcgggggcagcagccagagggctcctcaaagaaggcaatcgattgccagggagggccaagatgggtggtcgtcatcatcctctaattcgaagtggaatcttgctcagaaacaatattcaaatagcccattgataagagggcttcatggatccagcagactagaggatttcggtggaagcataccaccagcagcgtcatcggcattagtcaagctgacaaaccggctcaacttcctgaaagaacggagggcgctgctggcaagcgagatgcagagcttggatctgggtcggcccccagcagcagctgctgctccatcagccaagtccccaacaccaaaaggccatgaaaggaagaagagtcgagactgaggaagatgttgtgctcttctgaatgctagttagccttatgattaccagcagtgtagtttgtgtgcatcccattcccttccatagtgctgtctgtctgtacatgtttccacaaattctactgcggatacataatatagatacggctggacaggctgctttgttattgttcaaattgttgctgaattgattcgtcgctcaaagcactttgctgacacatttctgatgttaaaaaaaa

SEQ ID NO: 3531 - DNA, 5597 bp, Zea Mays
ctcttctctatcctctgtgtcccctccaccaaaaccgacggcgacgtcgctctcctccaccggtgctcggcgctctcccccgacggccctctcttctctatcatctttgtcccctccaccaaaaccgacggcgacgtcgctctccaccggtgctagactgtcctgtgaacggcagagctgagcagttttgatccagagcttagcggcggcagagctggaggagggagaacggtgaacatatttgatagggcaaaagtgtccggtcactagttaccaatataatcaaataagatggtaccactaccacgggccattggagctcaggagctgctgctgtgttccggagtccggacttccgattccggcggcgctcacggatgagacgagacgatggctggccactgttcccccaactccgcagcggagagagggagaggaacgccgggcgcgggggcggcgcaatgacgtggcgtcgtccctccatctggaccgcatgccatgtctccaatcgctgctccgatgctgcccgctccattgccaagaatagaacgtactccaatcgtatccatagggagctcaaccaaccaaccatccatccatggattggtgccacaaacaacaagaccggccaagagggaagagcggaggagaggcggctcttgcagctgtcgggccggggaacaacatcggaggggctagtcatggtcttggctaggggatttctgatcgcctcctctcctctcctgccccgccgtgccgcaagccgcaatgcaactatgaaatctgagctcgccgcttccctccgccattcacgtcggtgacatttattcatttccttcattcaggtaacatcctcgacgccccaacatctatatgtttcgaaaatgcacactgccagtcagtctatagctgattgcgatatggatcatggatcgacagtccatgcccttcacacaatcaaaatcgaatcttggttgcacaactggaataacgcacatcgttttcccccctcaacataggatcgtctctgtctgaaagcacagcaagttggtatttggatcaggactcggtaacacgtgtgcctgtttttttcactttttttttttaatttttggtgtggagcataaagccgatgaccttacaggcactaacattgtaccctgcatctctcagtagggagcaaaaacggcagcgcattgccaggacagaggtttcttcttcacagcctgttgagaatgtgaatcagtttaagacctgtcgatgtggggagggagacccaaactccacatctgaaactggtgacagcccgccggcctcttgtcctaattgtcaggcggccggggcaccgtgtgagcgagtgctcgcacaagcagacgaacctggtcgctcctgtgcacagactggtgtggcggccaatctccaaggaggcctcgacggtcgctggtgcggactacgccatggcgggtggctcggcgcttcgtggttcggatgccgcgatcagcggtgtacccgccgtgggcagcgaaggcgcagggccgggtctggtggtggacttggcggtgatcctttgcttctgcctttggggaatttgtcgcccacggctttggacggtcctcgtcctgtgaggtttattgggcgttccaggatgatcgaccgtgctgagttggaacttcgccatgccctgatcgtcaacgttgttggacaggaaggaactggttgcgccacgaaggttagagaggtgctcgcctcaaggtttggccttgacgccgatgcgctccgcctacgtcgtgctgcgccaggctcctttcttgtcctcttcccttcagaggaactggctgtgcgggtgattagtgaaggatcgtcgctccttgtccctccattaaggttgcatgttaagagatggactaggcaggcttttgcttcgggaggcagtgtcttgtcttccctcattgacgtcgagctccatggtatccctgctcacctttggggactggagacagcggaggttttgcttggtccatactgcctgattcagggcctgcacccggtttctatcggcggggaggacttgtcagtcatcaggttgagagcatggtgtcgctctcccgtggggttgccggaggtgttggacctgcatgctgtggagccggcggtcctcgatgaaaacggagtttggattccacgttcgttggtgttccctgtgatagtgaagattattggatcggagggtgtccttgaggaggagctgccgccacctccaccggatccatctgatgatgagccggagcagggtcgtcgggctcggcagatgcggaggctgggtgatcagacctttgccttggacttcggaccagttgatgcccctaccctcccgtgtgttgcggttgaggagctggcggcgcctggtgttctagccttgtatgatgatgtggtacccgattattctcctgatggtgccactgttgttttggctgctggtttgagggaggattcgatattggcagtgagttttgttgacagtgtttcttctgctagatggaatttgaagccacctattttcaaggtctactccaggaggttgagaccatctaatttggatgatcaggatggcacattggttcagtcggctcttgataattctatggtaatttcttcgcccttgtgcgagttccagtgtttggtcactaaaccagtggatgccttgctgccaactccacggtttcccaagagaaggaagaagcctctacccagtaattttataccaaggcggagcaggagggtggccaaatttcctccagaactcggttctgaggctgctgcccaggatgccaggaaatatgcgaagctatttgtttctgggctctgtagcattcatattgctgctttggcagcgctgtttggctggacggtccttaagagtggacatttactactttcatctaaaggaattggatggacatcatggaaaaagcgctggtttattcttacaagggcatccctagttttcttcagaagtgaccctaatgtacctccacccagaggagctgaaccgattgttacacttggtggaatcgacttgaatagctctggaagcgttgccgtcaaagaagaaaggaaacttttgacagtgttctttcctgatggtcgtgatggacgaactttcactctgaaggcagaaactacagaagacctaaatgagtggagaaatgcactggagagtgctttagcacaggcacccagcgtagcaaatacaatggggcaaaatccaatattcagcactgatgtagcagcagaacctgctgaagctccagctgaacagtcggaggacagttctgttattggcagacctgcagaatttgcacttgtagatgctgatggtagtccatcatttctggagaaggccctgaagttcattgaagatcatggggtaaaggtagagggcatcctgcgtcagtctgctgatgttgaagaagtcaaacgcagaattcaggattatgaaaaggggaaaaacgagttctctccagaagaggatgctcatgttattggtgactgtattaagtatgttcttagagagatgccatcatctccagttcctgcatcatgttgcactgccctggttaaagcataccgaagtgacaaggcaagaagacttgatgagataagtagggtgatatatgaagttttccctgaaccaaatcgacaattgttgcagaggactcttaagatgatgcaaattgttgagtcacacaaagctgtgaataggatgtctcaatctgctttggcagcttgcatggcaccacttcttctccgacctcttcttcttggagaatgtgacatagacaatgaatttagtatgggaggggacagttcatttcagctacttcaagctgctgcggctgcgaatcatgcacaagctattgttattattatgatggaggaatttgatcagatatttgatgacttggaagaaggttcctgttcttcagatgcttataccgagtctgaggatgatgatgttgataaggaatattccacagataatgacattaatgatgatgatgacggttcttatgattctggtgaagatgacattgaagaagacttggactactctgatgacagtgaacatgacagtaagatcaacactaatgtcaaggatggcaaggttaaaaacaatatctcagaaactgcagaagttgcacaggcaaagggtgcttctcatatggagaccaatagtcaatccaaccagaaacaagaatcatgtggaccaaatggatccaaagatcgtatactaagatcaacttctcgttcatcatcctccagagaaaaatctatggagaaatcatgcagttcggcacacaggggaaaaagaaccttatggggccgtacttcagcaagaaaagacctgtcaacagaggagattgaatgctgcagtgatgatgagtcccttattgagaaacttgagagcaacaaggttgatctccaatcgaaaattgcaaaggaggccaaagaaaatgctattctacagtcaagtctagaaaagcggaaagaagaactacatgagcgccgtttagcacttgaaaaggaagttgaaaatttgagggagcagctgcagaaggagagaagtttgaggacatccttggagtccggggtgatgaatttgcgaagagggcaggtgtccttgccgtcaacaacagacagcaagactaaggctgatcttgaggaggttgcaactgctgaatctgatattataaacttgaagcaagaggtttctgatcttcgtgggcaggtcagtggccagcagctgtgctgtgaatcatgcaacaaaaggctcctaaacacagacaggcttggcggacctgaaagctcatcagtggcagcgtcaccgaccattgggagtgactctgcatctggcatgggtgatatcgagcaatcaaggaagcagacggcacaggattcgccttcttcgacagacaagccaggtcacgaggcggtcgggggcagcagccagagggctcctcaaagaaggcaatcgattgccagggagggccaagatgggtggtcgtcatcatcctctaattcgaagtggaatcttgctcagaaacaatattcaaatagcccattgataagagggcttcatggatccagcagactagaggatttcggtggaagcataccaccagcagcgtcatcggcattagtcaagctgacaaaccggctcaacttcctgaaagaacggagggcgctgctggcaagcgagatgcagagcttggatctgggtcggcccccagcagcagctgctgctccatcagccaagtccccaacaccaaaaggccatgaaaggaagaagagtcgagactgaggaagatgttgtgctcttctgaatgctagttagccttatgattaccagcagtgtagtttgtgtgcatcccattcccttccatagtgctgtctgtctgtacatgtttccacaaattctactgcggatacataatatagatacggctggacaggctgctttgttattgttcaaattgttgctgaattgattcgtcgctcaaagcactttgctgacacatttctgatgttaaaaaaaa

SEQ ID NO: 3532 - DNA, 2146 bp, Zea Mays
ttgggagaaaccaaaagcaaaaaaaattactccatgtagtagccattgctgcgacgccgtgcccccgagtttgatttgatggaagcgaagacgaaccaaaccagcggcgaggacaggccgcagccggcgatggactcgccgagggcggcgcaggcggcgacgcgccgcaagaagatgacgaagcagctgacggggaagcgcgacgacacggcgatgcacgcggcggcgcgcgccgggcagctcgagtccatgcggcagatgatgtccggcaaggacgccgaggagctcggggcgctgctgtccaggcagaaccaggccggggagacgccgctgttcgtggccgccgagtacgggtacgtggccctggtggccgagatgatcaagtaccacgacgtcgccaccgccggcatcaaggcccgcagcggctacgacgcgctccacatcgccgccaagcaaggggatacgtcgtgagggagctgctgcgggcgctgccgcagctgtcgatgacggtggactcctccaacacgacggcgctgaacacggcggcgacgcaggggcacatggacgtggtgaggctcctgctggaggtggacgggagcctggcgctgatcgcgcgcagcaacggcaagacggcgctgcactcggcggcgcggaacggccacgtggaggtggtgcgcgcgctgctggaggcggagcccagcatcgcgctgcgcacggacaagaagggccagaccgcgctgcacatggccgccaagggcaccaggctggacctcgtcgacgcgctcctggccgccgagccggcgctgctcaaccagacggacagcaagggcaacaccgcgctgcacatcgcggcgcgcaaggcgcggcacgagatcatcaggcggctggtcacgatgcccgacacggacgtcagggcgatcaaccggtcccgcgagaccccgctggacacggcggagaagatgggcaacacggacgcggcggaactcctggctgagcacggcgtgcagtcggcgcgcgccattagcccctgcggcggcggcggcggcggcaacaagcaggcgcgcgagctgaagcagcaggtgagcgacatcaagcacgaggtgcactcgcagctggagcagacgcggcagacgcgcgtgcgcatgcagggcatcgccaagcgcatcaacaagctgcacgaggaagggctcaacaacgccatcaactccacgacggtggtggccgtgctgatcgccacggtggcgttcgccgccatcttcacggtgcccggggagtacgtgcaggacccgggcagcctggcgcccgggcacgatctgggcgaggccaacatctcccaccagacggccttcatcatcttcttcgtcttcgactcggtgtcgctcttcatctcgctggccgtggtggtggtgcagacgtcggtcgtggtcatcgagcgcaaggccaagaagcagatgatggcggtgatcaacaagctcatgtgggtggcctgcgtgctcatcagcgtatccttcctggcgctctcgttcgtcgttgtgggccgcaccgagcgctggctggccgtgtccgtcaccatcatgggcgccaccatcctggtcaccaccatcggcaccatgctctactgggtgatcgcgcaccgcatcgaggccaagcggattcgcacaatcaagcgcaacacgctcacccactcccgctccttctcctgctccggcatgtcggagggcgagtgggtcgacgaggatttcaagaggatgtacgcaatctgacgacccacgctacctgcatgtgtttgagatcatctcgtgcaatggccatcgcgttattgtcaacttgccgtgcttcggaccgggctaacattcttcttccgtcactccttagtggcgattgaagtattgtccaaccgaataaacctacctgtgcgccgcctgcgagagagaagtaataagttttgtcttcatagaaaacgaaacaaaagaaaagtgagttttgtcttaatagaaaatgaaaagctagacttactaaaaactcctgcactccgtattacttttagcttgtcgatcaagccgtgcttccgcaacgtctagagtcttaaaaactatttaaaaaatacaagtactcaatcttttcataaatatatgacaccatttaa

SEQ ID NO: 3533 - DNA, 2170 bp, Zea Mays
ataattatgtgtggttccatacttccatcctcgcatgcatgtgagggccatagctcactgtcgcatgccctgctctgcttcagcaccacacacacacaacaatcagtgtggccataacaagcagctagcgagagctccccgcgtccagccatggcaaccacgacgacggctggtaggaacaatggagaaggagaacagaagaggtggagggagaaaggaggcttcaagaccatgccattcatacttgggaacgacatctgcgaccggttcgccacggccggcttcggcgccaacatgatcacgtacctgacgcagcagctgcacctgccgctggtggaggcgtccaacctgctgaccaacttcggcggcacgtccagcctcacgcccatcctgggcgcgctcgccgccgactccttcgcgggccgcttcgggaccatcgtcgccggctccgtcttctaccagctcggcatgctcggcctcgtcgtgtccgcgctcctcccttcgctccgccccgcgccgtgccccggcgccccggccgcgtgccagcgcgcctccgggtggcagctcgccgcgctgtacctctccctcctctgcacgtccgtcggctccggcgggctgcggccctgcgtcgtggcgttcggcaccgaccagttcgaccgcgagcccggggagcagcaggtcaccgcggaggcggccggggaggtggcggagcgcaagcggcgctacttcaacctctacttcttcacgatgggggtggcggcgctgctggcgctgacggtggtggtgtacatccaggacaacgtgggctggggctgggggttcgggatccccgccgtcgccatgttcgtctccatcgtcgtgttcgtggtcgggtacccgctgtacgtccgcctcaagcccgggggcagcccgttcacgcgtctcgcgcaggtcgccgccgccgcctttaagaagcgccacgtcgccgtgccggaggacgcagggatgctgtaccaggacaaggagctcgacgccttcatctccaccaacggcaggctgctgcacaccgatcagctcacgttcttggaccgggcagcgattgtgacgccgggtgacatctccgcttccgggcagccggacctgtggcgtttgtcaacggtgcaccgcgtggaggagctcaagtccattgtccgcatgctgcccatctggtcagcagggatcatgctggccaccgctggctcgcacaacggcaccttcaccatcttgcaggcgcgcaccatggaccggcacatcacccggcacttcgagataccaccagcgaccatgtcgatcttcgggaccgcggccatgctcgtcagcctggctctctacgaccgcgcgttcgtgccgctggcacgccgcgtcacgggcctgcagtccgggatcacctacttccagcgcatgggcatcgggctcgccatctccatcctcggcgtcgcctccgccgctctcgtagagaccaagcgccgcgatgccgcggccgacaatggattcctggacaatccggacgccgtcgtcccgatcagcgtgttctggcttgtgccgcagttcgccatccatggcgtcgccagcgccttctcgtcggtggggcacatggagttcctgtacgaccaggcgcccgagagcatgcgcagtactgccgctgcgctcttctggctcgccagctccatcggccactacctcggcacggtgctggtcacggtggtgcagcgcaccacccgcggtcgtggcgactggctccaggacaacatcaaccgtggaaggatcgacaactactactggctcgtcacctgcctcatggtgctcgaccttggctactacatcgtctgcttccatttctacaccatgaagccactagagatggcagacgaacaagatgatcatgacgaagagtgtgagctctccactgtcccgaaaaacggcatcggtgccggtgtggtgtaacgttgatttgcgggtaattaattaggatggacgttagatgttaatatatgggttagatactactacatggttaataccaccctccgcattacgacacaaaattcggtgcaacggatagggattattgatacctgtaacctgttcacacttaaaattgtccaatattagtcctcaaagtttgggttgtgcccaatgggccggcccgagc

SEQ ID NO: 3534 - DNA, 1453 bp, Zea Mays
ctagagctcagtcacgactgttgttacgagttcatcccctcatccctgtcgagtactccacgccaccgagacgtttcgtcgtcgcctagacattccacgccgccaccgagtactccatcttccctctcagttacgagttcccatctttcgagtactcgccgccgccgctgttttgcccttttccacgccgtcgctgctgcggcagaaaggatgcaccgccagaaatggagtccccccagaactggatgaccaagctcttgattggccctcgccggaaatggagtccccgccaggcgcaaccaaccttatccctctcaacgagatagttgtcgacatcaatggaacatttgtgccttcactgagtgctcccgcgccaaccaacacaggcttctccctcaccattgatgaggtagacaacacctggttggaggcaccaccagcagctgaagcacccccttctctcgttactccccaggaacacggtcacttggtgataaaacgcagtttagattgtctgtctcatctcacgaaaaatgatttcgagggtatttcaccggatctccgatgagaggaagaaggacctcaacatgtaccaagtgagaaagtgatgtacctcaaacttggattagctgctaaggatgaacgcgaaaacaaagtagagaggatgcttgcaattatacaggtcatgcaaatattcgaaatgagttggaagatgatggttcagccgccttagattgtgttgattttctgccccacgagactagagtgttttatgactctaaccatccagtgatggaggttggcagcctatacgcatcgatgactgaattcaggcttgcaatgtggcaatatgccatagaaaaagaatttgagttaggcattgaggccagtactccgaagaaatacagagggtattgtcgaggtggcgactgtccatggagcatacatgcaagaattgagagggatggttcaccaaccataatcgtatgtttttatttgttcaccaaccatggagcatacatgcaagaattgagagcttgtatgaaaaaactaactccgaagaaaaagaagtaagggatgtttgtaatctgtccccgcctactactatggatcaggtgtaatgtgtttctgtgtaatgtgtaaatggaactcagtctatggaattcaaaatgtgtctgtgtaattggaacttgttttcagttcagtttgaatttcacaatgtgtctgtgtgtaattcggaatgtgtctgtgtgtaattttcagtttagttagggcacttgttttcagtctgaatttctgatgcaacttgttttcagtcagtctgaattcaataagttcagttcagttagttcagtaagttcagtctagtctgaacattctggcattccacacatttgctgacacattttctgtagccaagatgcaattttttcggaatggatttaacatgaac

SEQ ID NO: 3535 - DNA, 2396 bp, Zea Mays
cctcggcgtccgggcatcgccatcgtagacacggcaaaggagacgccggaaggcccggacggaacaagcgagatatttaaggacgcctttttggcgcgaccccacgacatggcggcatatctatctactacacacgcctttaaaacctttcgccctcctccgcgctcccggctcctcccagcaccagcaagcagccttatctatcccctcagctctgcagctcagtgtccaccaccgccgcctccttccagctgggtggaagaaacatgtcgcgaatggcgcccccgtctccgcctcagtccctgaagcccccgacgctgcccttctccccgcccaaaaagccaccgccgatgccggtgtacaaggacctgcacttcaaccgcgacctctccgccaccaagaagctccaggccggagtggacctggtggcacggttgttgggggtcaccctggggcccaaggggaggaacgtggtgcttggcaacaagtatggccctcccaagattgtcaatgacggggagaccgtccttaaggagatcgaattggaagatccattagaaaatcttggagtgaagctggtccgacaggctggagcaaggaccaatgatattgcaggagatggttgtaccacatccataatccttgcccaaggcctcattgctgaagggatgaaggttcttgcagctggaatcaacccagttcaggtcgcacgtggcattgagaagactgctgctgctttggtgtctgagctcagactgatgtcgcgggtgattgaagaccatgaaattgcacatgtggctgcagttagtgcgggaaatgattatgctgttggaaatatgatttatgatgcttttcaaagagtaggtagacaaggaatggtgagaattgaaaatggaagaggcaccgagaacagtctggaggttctggaaggaatgcaatttgaacgcggttacctatctccttactttgttaccgatcgtggtaacatgacggtggagttcactgactgtcagatactattggttgacaagaaaattacggatgctagtgagattataaggatactggacagtgctgtcaaagaaaactatccgttgttaataatcgccgaggatgtggaagaacaggcaatggctgatttgataaaaaacaagctgaaagggacaattaaggttgcagccgttaaggccttctcttttggggaacaaaagactcaatgcttggatgacattgcaatcatgacaggaggtacactagtgagggatgacatggggcatatactggaaaaggcaggaaaagaggttcttggttccgcttctaaggtggtaatcacgaaagattcaacactaattgttactgacggaagcaatcgtcgagcagttgaggaaagggttgctatgataaaaggccaaattgagaattctaaggaaagttacaacaagaagatattgggtgagaggatagcaaggttatgtggtgcaattgcagtgatccaggttggtgctcaaacaatcattgagatgaaagataagaagctgaggattgaagatgcacttaacacaacaagggcagctattgaggaaggtgttgtagttggtggtggatgtagcctactaagactgtcagagaagattgacgcaatcaaggaatcatcgttggataatatagagcaggaggttggtgctgacatcttcaaacaagccttgagttaccctacctcactaatagcaaaaaatgcaggggtgaatggcgactttgtcattaaaaaggtgttactgaatgatgatgcaaattatggttacaatgctgccaagaactgctatgaggacttgatggctgctggaatactggacgcaacaaaggttgtgaggtgttgcattgagcatgctgctgtagttgctaagtcctttctcacctctgatgtggtgattgttgaggcaaaagaaggcaaacctattcgaataagacccccaatgcctcctaggcacttaattcccccaatgcctgcttcaatttcaggtattcgagtgtagcaggcgtcctttccaccaagaatcagcctcaacacaacaagactacgggcccgctctatgcacgctatcgcatcatcggagcagcagcaagggtggatgatatgtgttatatagggaatacaaaggtgaacaattcaattttgatgttcaaatgctccttaccgtcataaatatacttctgtttttttaggaacatatactttaatagcttcgcttagtttagaattttttttttgaagagtagaagaattactcattattatattaagaaaaaaagagttttagtcctgaaggaccagtatggagaataaaagagccaccttacagcggctaaaaacaagagggcagaaagagatccataag

SEQ ID NO: 3536 - DNA, 2576 bp, Zea Mays
cctcggcgtccgggcatcgccatcgtagacacggcaaaggagacgccggaaggcccggacggaacaagcgagatatttaaggacgcctttttggcgcgaccccacgacatggcggcatatctatctactacacacgcctttaaaacctttcgccctcctccgcgctcccggctcctcccagcaccagcaagcagccttatctatcccctcagctctgcagctcagtgtccaccaccgccgcctccttccagctgggtggaagaaacatgtcgcgaatggcgcccccgtctccgcctcagtccctgaagcccccgacgctgcccttctccccgcccaaaaagccaccgccgatgccggtgtacaaggacctgcacttcaaccgcgacctctccgccaccaagaagctccaggccggagtggacctggtggcacggttgttgggggtcaccctggggcccaaggggaggaacgtggtgcttggcaacaagtatggccctcccaagattgtcaatgacggggagaccgtccttaaggagatcgaattggaagatccattagaaaatcttggagtgaagctggtccgacaggctggagcaaggaccaatgatattgcaggagatggttgtaccacatccataatccttgcccaaggcctcattgctgaagggatgaaggttcttgcagctggaatcaacccagttcaggtcgcacgtggcattgagaagactgctgctgctttggtgtctgagctcagactgatgtcgcgggtgattgaagaccatgaaattgcacatgtggctgcagttagtgcgggaaatgattatgctgttggaaatatgatttatgatgcttttcaaagagtaggtagacaaggaatggtgagaattgaaaatggaagaggcaccgagaacagtctggaggttctggaaggaatgcaatttgaacgcggttacctatctccttactttgttaccgatcgtggtaacatgacggtggagttcactgactgtcagatactattggttgacaagaaaattacggatgctagtgagattataaggatactggacagtgctgtcaaagaaaactatccgttgttaataatcgccgaggatgtggaagaacaggcaatggctgatttgataaaaaacaagctgaaagggacaattaaggttgcagccgttaaggccttctcttttggggaacaaaagactcaatgcttggatgacattgcaatcatgacaggaggtacactagtgagggatgacatggggcatatactggaaaaggcaggaaaagaggttcttggttccgcttctaaggtggtaatcacgaaagattcaacactaattgttactgacggaagcaatcgtcgagcagttgaggaaagggttgctatgataaaaggccaaattgaggtagaattattccagtcataccttgaatttgtatgttatatctaccatgtgtgcattactactggatcctgcaaagtattttacttttgaactcccagaattctaaggaaagttacaacaagaagatattgggtgagaggatagcaaggttatgtggtgcaattgcagtgatccaggttggtgctcaaacaatcattgagatgaaagataagaagctgaggattgaagatgcacttaacacaacaagggcagctattgaggaaggtgttgtagttggtggtggatgtagcctactaagactgtcagagaagattgacgcaatcaaggaatcatcgttggataatatagagcaggaggttggtgctgacatcttcaaacaagccttgagttaccctacctcactaatagcaaaaaatgcaggggtgaatggcgactttgtcattaaaaaggtgttactgaatgatgatgcaaattatggttacaatgctgccaagaactgctatgaggacttgatggctgctggaatactggacgcaacaaaggttgtgaggtgttgcattgagcatgctgctgtagttgctaagtcctttctcacctctgatgtggtgattgttgaggcaaaagaaggcaaacctattcgaataagacccccaatgcctcctaggcacttaattcccccaatgcctgcttcaagtattcgagtgtagcaggcgtcctttccaccaagaatcagcctcaacacaacaagactacgggcccggtacccccaagtttctaagataataaagcaaagaaaacatagtgaaattttgacgtcaaacgtggctttgtatgattgctccaagaagctctatgcacgctatcgcatcatcggagcagcagcaagggtggatgatatgtgttatatagggaatacaaaggtgaacaattcaattttgatgttcaaatgctccttaccgtcataaatatacttctgtttttttaggaacatatactttaatagcttcgcttagtttagaattttttttttgaagagtagaagaattactcattattatattaagaaaaaaagagttttagtcctgaaggaccagtatggagaataaaagagccaccttacagcggctaaaaacaagagggcagaaagagatccataag

SEQ ID NO: 3537 - DNA, 2672 bp, Zea Mays
cgcagaggcacggcgccgacatcccccgaggcccgagggcccagccatgaaggccctgggcgcgcacgtcgtagacctgctccgcggcccgcacctcctccgcgccgccgtcctagctttcgccgttgcggtcgccttcctcgtcggctaccactggcccaacgcctacccgcgccttgtcttcttctcgtccgcctcctcctcgttggcgtccaggtcctcccgctctcctgccgtcgcgctctcccccaactccaacatctccttcgaaccgtctctgatccctacccccaccaccccgcctgcttctcctgctcccaatgcctgccccccgccctcgctaccaccaccgactccggcgccgccgcctcccctcctgccccctccaccaccagcgcgcctcggcatcgtcggcgaggacggcgctatgcaggacgacttcgacatcgggagcgtcggcgccaacgacaccgatctggccagcgacgagaccgcgccgcaggagcctagcaacggaggcgccagcggcggaccacccagggttcggattgggaggttcctggtctgtcccgagagcatgagggagtacataccctgcctcgacaacgaggaggagatcaagcggttgccctcgacggagcgcggggagcggtttgagcggcactgccctgcccaggacaagggtctcagctgcctcgtgccggtgcccaagggctacaaggctcccataccctggcctcagagcagagacgaggtctggtttagcaatgtgcctcacacaagattggttgatgacaaaggaggacagaattggatcaccaaggtcaaagataaattcagatttcctggaggcggaactcaattcattcatggagcaaatcgatacctagaccagatttcccagatggtaccaaatgttgcatttggatctcatactagagttgtcctggatgttggttgtggagtagcaagttttggtgcctatttactttcacgtgatgtcctgacattgtcaatagctccaaaagatgttcatgaaaatcagatacagtttgctcttgagcgtggtgttcctgcaatggtagcagcatttgcaacacgccggttattatatccaagccaagcgtttgatatgattcattgctcacgctgccgaataaattggactcgtgatgcacaacctgtttataagcatgaacaggcccaacaagaggcatggaaagagatggaggacctcactacccgactttgttgggagcttgtgaagaaagagggatatattgctatgtggaggaaacccttaaataactcttgctacatgaaccgtggtcctgcagtcaaaccttcactttgtgatgctgatgataacccagatgttgtctggtatgttagtctcaaagcttgtattagtcggcttccagagaatggcgaagcaccacctcctgttcaatggcctgcacgcttaatggagccaccaaagaggcttcagggtgttgaaatggatgcctacccatcaaagaatgagattatcaaagcagaaacgaaattttgggaggacataattgatggttatatccatgtctttaagtggaggaagttcaaactccgaaatgtaatggacatgagggctggatttggagggtttgcagctgcattaattagtcggaaacttgattggtgggtgatgaatgttgttcctgttaatgagccaaatgcactgcccgtaattttggatcgggggcttcttggagtagctcatgactggtgtgaaccctttgatacataccctaggacgtatgatctactgcatgcatctggtcttttctcaaaggagcagaaaaggtgtaatatctctagcatcttgctggagatggaccggatactcaggccaggtggtaaagcatatattcgtgaccggagagaagttatacaggaaatcaaagaaataacaagcgctatggggtggcgtggtactatacgtgacactgccgaaggcgcatacgccagtaggaaggttttgatgtgtgacaagcctatggtgcgttaggcgatcaggggaaggttcgatgacacctttgtggctagtttggaaattcaaattctcagggatttaaagagatttaggatttgttcggtttgaattggattgatggggattttaggggatttaatccccttctatacaaatttgtataggaggggatttaatcctccccaatcccaaatcccctcctaaccgaataagacctgagagggaaatgaactcaatctccctcaatccacccctaaccgaataggcctgagaggaaaatgaactaatttctccttcaattctctccaatccccggagaggggatttgagtttccaaactagccattgaagtttcgaattgccaagcaggagtaaattttcaggaacttttggaactgtcaagagctgctgtcgagacttttgactaacatttgttctgtagatagggtaggtcaaggtctcatttgtaactatttatgtgatcattcgtacaatgatgatcagtgtaattcctgacagtcatttttttgttgtagtcgttattgaaatcttacaaaagtgtaggagataatttatcggaagaatggccattttttactctaggtgacactgacacaaggagtaattggttttgtttcgc

SEQ ID NO: 3538 - DNA, 2700 bp, Zea Mays
gcacggcgccgacatcccccgaggcccgagggcccagccatgaaggccctgggcgcgcacgtcgtagacctgctccgcggcccgcacctcctccgcgccgccgtcctagctttcgccgttgcggtcgccttcctcgtcggctaccactggcccaacgcctacccgcgccttgtcttcttctcgtccgcctcctcctcgttggcgtccaggtcctcccgctctcctgccgtcgcgctctcccccaactccaacatctccttcgaaccgtctctgatccctacccccaccaccccgcctgcttctcctgctcccaatgcctgccccccgccctcgctaccaccaccgactccggcgccgccgcctcccctcctgccccctccaccaccagcgcgcctcggcatcgtcggcgaggacggcgctatgcaggacgacttcgacatcgggagcgtcggcgccaacgacaccgatctggccagcgacgagaccgcgccgcaggagcctagcaacggaggcgccagcggcggaccacccagggttcggattgggaggttcctggtctgtcccgagagcatgagggagtacataccctgcctcgacaacgaggaggagatcaagcggttgccctcgacggagcgcggggagcggtttgagcggcactgccctgcccaggacaagggtctcagctgcctcgtgccggtgcccaagggctacaaggctcccataccctggcctcagagcagagacgaggtctggtttagcaatgtgcctcacacaagattggttgatgacaaaggaggacagaattggatcaccaaggtcaaagataaattcagatttcctggaggcggaactcaattcattcatggagcaaatcgatacctagaccagatttcccagatggtaccaaatgttgcatttggatctcatactagagttgtcctggatgttggttgtggagtagcaagttttggtgcctatttactttcacgtgatgtcctgacattgtcaatagctccaaaagatgttcatgaaaatcagatacagtttgctcttgagcgtggtgttcctgcaatggtagcagcatttgcaacacgccggttattatatccaagccaagcgtttgatatgattcattgctcacgctgccgaataaattggactcgtgatgattacttagagctggaggctactttgcttgggcagcacaacctgtttataagcatgaacaggcccaacaagaggcatggaaagagatggaggacctcactacccgactttgttgggagcttgtgaagaaagagggatatattgctatgtggaggaaacccttaaataactcttgctacatgaaccgtggtcctgcagtcaaaccttcactttgtgatgctgatgataacccagatgttgtctggtatgttagtctcaaagcttgtattagtcggcttccagagaatggcgaagcaccacctcctgttcaatggcctgcacgcttaatggagccaccaaagaggcttcagggtgttgaaatggatgcctacccatcaaagaatgagattatcaaagcagaaacgaaattttgggaggacataattgatggttatatccatgtctttaagtggaggaagttcaaactccgaaatgtaatggacatgagggctggatttggagggtttgcagctgcattaattagtcggaaacttgattggtgggtgatgaatgttgttcctgttaatgagccaaatgcactgcccgtaattttggatcgggggcttcttggagtagctcatgactggtgtgaaccctttgatacataccctaggacgtatgatctactgcatgcatctggtcttttctcaaaggagcagaaaaggtgtaatatctctagcatcttgctggagatggaccggatactcaggccaggtggtaaagcatatattcgtgaccggagagaagttatacaggaaatcaaagaaataacaagcgctatggggtggcgtggtactatacgtgacactgccgaaggcgcatacgccagtaggaaggttttgatgtgtgacaagcctatggtgcgttaggcgatcaggggaaggttcgatgacacctttgtggctagtttggaaattcaaattctcagggatttaaagagatttaggatttgttcggtttgaattggattgatggggattttaggggatttaatccccttctatacaaatttgtataggaggggatttaatcctccccaatcccaaatcccctcctaaccgaataagacctgagagggaaatgaactcaatctccctcaatccacccctaaccgaataggcctgagaggaaaatgaactaatttctccttcaattctctccaatccccggagaggggatttgagtttccaaactagccattgaagtttcgaattgccaagcaggagtaaattttcaggaacttttggaactgtcaagagctgctgtcgagacttttgactaacatttgttctgtagatagggtaggtcaaggtctcatttgtaactatttatgtgatcattcgtacaatgatgatcagtgtaattcctgacagtcatttttttgttgtagtcgttattgaaatcttacaaaagtgtaggagataatttatcggaagaatggccattttttactctaggtgacactgacacaaggagtaattggttttgtttcgc

SEQ ID NO: 3539 - DNA, 2708 bp, Zea Mays
cgcagaggcacggcgccgacatcccccgaggcccgagggcccagccatgaaggccctgggcgcgcacgtcgtagacctgctccgcggcccgcacctcctccgcgccgccgtcctagctttcgccgttgcggtcgccttcctcgtcggctaccactggcccaacgcctacccgcgccttgtcttcttctcgtccgcctcctcctcgttggcgtccaggtcctcccgctctcctgccgtcgcgctctcccccaactccaacatctccttcgaaccgtctctgatccctacccccaccaccccgcctgcttctcctgctcccaatgcctgccccccgccctcgctaccaccaccgactccggcgccgccgcctcccctcctgccccctccaccaccagcgcgcctcggcatcgtcggcgaggacggcgctatgcaggacgacttcgacatcgggagcgtcggcgccaacgacaccgatctggccagcgacgagaccgcgccgcaggagcctagcaacggaggcgccagcggcggaccacccagggttcggattgggaggttcctggtctgtcccgagagcatgagggagtacataccctgcctcgacaacgaggaggagatcaagcggttgccctcgacggagcgcggggagcggtttgagcggcactgccctgcccaggacaagggtctcagctgcctcgtgccggtgcccaagggctacaaggctcccataccctggcctcagagcagagacgaggtctggtttagcaatgtgcctcacacaagattggttgatgacaaaggaggacagaattggatcaccaaggtcaaagataaattcagatttcctggaggcggaactcaattcattcatggagcaaatcgatacctagaccagatttcccagatggtaccaaatgttgcatttggatctcatactagagttgtcctggatgttggttgtggagtagcaagttttggtgcctatttactttcacgtgatgtcctgacattgtcaatagctccaaaagatgttcatgaaaatcagatacagtttgctcttgagcgtggtgttcctgcaatggtagcagcatttgcaacacgccggttattatatccaagccaagcgtttgatatgattcattgctcacgctgccgaataaattggactcgtgatgatggtatcctgctcctggaggttaatagattacttagagctggaggctactttgcttgggcagcacaacctgtttataagcatgaacaggcccaacaagaggcatggaaagagatggaggacctcactacccgactttgttgggagcttgtgaagaaagagggatatattgctatgtggaggaaacccttaaataactcttgctacatgaaccgtggtcctgcagtcaaaccttcactttgtgatgctgatgataacccagatgttgtctggtatgttagtctcaaagcttgtattagtcggcttccagagaatggcgaagcaccacctcctgttcaatggcctgcacgcttaatggagccaccaaagaggcttcagggtgttgaaatggatgcctacccatcaaagaatgagattatcaaagcagaaacgaaattttgggaggacataattgatggttatatccatgtctttaagtggaggaagttcaaactccgaaatgtaatggacatgagggctggatttggagggtttgcagctgcattaattagtcggaaacttgattggtgggtgatgaatgttgttcctgttaatgagccaaatgcactgcccgtaattttggatcgggggcttcttggagtagctcatgactggacgtatgatctactgcatgcatctggtcttttctcaaaggagcagaaaaggtgtaatatctctagcatcttgctggagatggaccggatactcaggccaggtggtaaagcatatattcgtgaccggagagaagttatacaggaaatcaaagaaataacaagcgctatggggtggcgtggtactatacgtgacactgccgaaggcgcatacgccagtaggaaggttttgatgtgtgacaagcctatggtgcgttaggcgatcaggggaaggttcgatgacacctttgtggctagtttggaaattcaaattctcagggatttaaagagatttaggatttgttcggtttgaattggattgatggggattttaggggatttaatccccttctatacaaatttgtataggaggggatttaatcctccccaatcccaaatcccctcctaaccgaataagacctgagagggaaatgaactcaatctccctcaatccacccctaaccgaataggcctgagaggaaaatgaactaatttctccttcaattctctccaatccccggagaggggatttgagtttccaaactagccattgaagtttcgaattgccaagcaggagtaaattttcaggaacttttggaactgtcaagagctgctgtcgagacttttgactaacatttgttctgtagatagggtaggtcaaggtctcatttgtaactatttatgtgatcattcgtacaatgatgatcagtgtaattcctgacagtcatttttttgttgtagtcgttattgaaatcttacaaaagtgtaggagataatttatcggaagaatggccattttttactctaggtgacactgacacaaggagtaattggttttgtttcgc

SEQ ID NO: 3540 - DNA, 2310 bp, Zea Mays
tcagttgctaccgtctctagttccttcctctgctcggttgcttggcgttgggtcactgttggcaaggtgttgggtcgacgattggagctggcgtctacgtccttgttggcacagttgcgcgggagcattccgggccggcattgacgctttcatttctgatagccggaatagcagctgcgctttcagccttctgctatgcggagctggctagccgttgcccttcggcaggaagcgcctatcattattcgtacatctgcgttggcgaaggagttgcatggttgattggctgggctttgatacttgaatacacgattggtggatcagccgttgcccgtggcatttctcctaatctagccttattttttggaggacaggatagtctgccatggattttagcacgacatgagatcccatggcttgatgtcgttgtagatccttgtgcttctttcctcgttttcgtcgtcactggccttctctgtgtggggataaaagagagttcatttgtgcaaggagttgtgacggtcttaaattgctttgtgatgttatttgttatcatagccggtagctacatcggcttccaaacaggatgggttggctacaaggttgctggcggatttttcccttatggagcgaatggaatgcttgccgggtcagcaactgtcttcttcgcctacataggatttgattcagttgccagcacggctgaggaggtgaaaaatccacaacgagatctgccactgggaatcggaacagcattgtcgatttgctgttccttgtacatgttggtttcagttgttattgttggtctggtaccatactttgctatggacccagacacccctatttcatctgcttttgccaaacatgggatgcactgggcaatgtatcttgtaacaactggtgctgttcttgctctctgctcaaccttgatgggatctatattgccacagccaagaatattgatggccatggcacgagatggcctgctaccatcattcttctctgatgtccataagacgacacaagttccagtcaaaagcacagtagtgactggcatctgtgcagctgctcttgctttcttcatggatgtctctcaactggctggaatggttagtgtaggcacgctactcgcgttcactatagttgctgtgtccatcttgattcttagatacgttcctccagatgaggtacccctcccatcttccctgcaagcatcattccgcttgagccaagaaaatgacgaggaaaagctgaggggtacccttggagatgatgatcatgagcaaggctcagctgaaataagtgatgttgtagtagaaccaatcactgaccccctgatcgagaagcagctatacgcaagcaatttgagtgaggcaaaacggcgtaagaccgcggcatgcagcatcacatctgtttgcataggggttctgatcctcacgacgtcagcctcggcaacattcttgccctcccggtgagatgctccgtttgtgttttgggtggcatgctcctcctagctggtctgggcatgctctgctggattgaccaagatgatgggaggcactcctttggccactccggaggattcatctgtccgtttgttcccttgctgccggtaatgtgtatcctcataaatacatacttgttaataaatcttggtggcggcacgtggatgcgagtgggggtgtggctagtgatgggggtgttcgtctacattttctatggccgcacccacagctcgttgacggatgtcgtgtatgtccctgtggccgaggcgaatgagatatacgggtcatcctcttcgttagggtttgtggcgtaaagagagatggaaggagatgtttgttgaagcctatcttgagccagtcatggtacttctcacaaaaacctcaaagatcctgactggagcaggtacctgcttgagctattgtgttgcaggcatgggtttgaagaattcaatttgtacgtcatatttttaaaatgtgtaaattgtaacgcacggctaagcttgtgtgtctctgttggaggaatgtaaatattagtatattgcatagaactatatataggtggtgccaatatacaggtgtttaaaaaaaagggggggggtcattctaggaatctgtatgttttactacgaacttgttctaaattcctaggaattcaaacaggcatgtctgaggcgtattatgtggttaaggcctcaaaggtccaaacacattttatttcatgttgaaatgaagattacacgagcagaaatgctcacggaaaaaacaatagtacatcaataattcagattcactgcaccaggtttcc

SEQ ID NO: 3541 - DNA, 2154 bp, Zea Mays
gctcatgcttcagaagatatggtcccttttgctggggatcactcacttctatcatttcggaaagtacatagtggatattctatccctggatttgggtcagtgaacaatcaccctcgacaaccatctaggttgtcatcagaagccgcaggccttccgaatcaacagcatgacattgctcaacaaagttttctcactgacaacttggttccacagaatttaacaattccttctgtcgaatatccaaataaccacaaccagcaatcactcaaaaatgcagcagagaagggaatgcaagccagtgacctacttctagcaaaagcctggttccacagcactcaaccaatgactagaagtcgttcgtcagagttaaggtggcagcacaagatactgttacctcagtggtgagcatgctcaaggacacacttgagcgcaagaagcttggtagccatgctaacaaagacacctcagcaggcaattcttttggattctatgacactcagcagtttcaacaaaacattcttggaggaacagatttctttcccatagtgacaactgcccaagttcaggattccctgatgcttcccaaggttgacaggcccatggaaccaaacaatggtaacttcgttgctcctgcaaaccaggtttggttcagtgcagcttctcgagagccttcacacagtggatcgtctactgctatgactactcattcagctggatttgaaatgtgtgatgagctacctcctgcagcgcaagcgatgagtgtttgtgagagcaccagaaaaaatgctgcaaatggaacaaccgactgcaaatcaaaaggcaaagagtatagagagagggtacaaaaggataatttgaaagatgggaggaagaaagcagccctaactcgaataggatccatttcatctgaacaagcagctgataatggagatcctacaaagaagcgcagggttgagcgctcacgcaagaaagattcagaacagaccaagcagatcgaggagcttcagaagcaaaacgaggatttggccgaagagaaggagcggctggtggaagagatcgaaaggattgtctctgaccccaacacatgaccgcccaatcatttctgacatttttttatatactaatagaattagacttgaaatggtcctagatacaaatacacatacacaatccagcagggggcagcaagaattaagtgctggcctaaatgtaccattctttccttgttttcacaagtgtaacgtatacgaatatcaacaagcaaagggatcagggattacagtttatttcctgcagcatgttggcctcatgggtatcaatcagaacatgcgtgtgatatgaatgtggagtatgtgtgttatgtgtatctagttgcaaccaataaaaacagaacatgacatgcgggtaatcgttatttcagtagtagatttgaacaaaactcagcagtcttaattagattgaaaatcgcaaagcgaagacacctacggtttttccctaaagaccatcttaaaaaaaggaaaagaagagactggaaaaaaaaacaatctccttggtccttgctgactccatcggtcactccaatgcgatgcgagcccatcaaccttttcgctcaccagcagccgctgctgcggccgcaatggccactcgttccagttctttggcgtcggccagccacggccgccgcctcaacgccgccgtatcttcaacgtcaccggcggcatccgacgaggtgccatcgaaggtgccgtcgaacggcgcctcgcagaaggccatcgtggccacgagcctatccaccggccgcttcttcgtcttcgcggctgcggccagcctcgccggggcctcggggacgttcgttgcgcaggcgcggcctccgacagcggcacctggcgacagagcccaggcgccgtcgaacggcgcctcgcagaaggccatcatggccgcgaccctctccatcggccacttggcggccagcaacgccaacctcgacggcgcagccttgggaacgttggatgaggatgggctgttcccggcggcaagcgacgacgcagccgaggtgcggtcgaacggtgcctcgctgaaggccaccatggcaatgaggctctccatctccatcgccgctacctcgagtctgttcgattggttttggtcggggat

SEQ ID NO: 3542 - DNA, 2823 bp, Zea Mays
gtaccgtgtaaagctaaactccgtcgcgaacaagaacaaaccaaattgaactcagcacgcgcacaagtccgcggccgcccgcacaccgccagccagccagccacccgcccacctctagcccctaggctcccctcccgcaaaaccctagcgctctctctctctctctgtctgccggcgcgatggaggatgctgccgagagccgcaagctcttcgtcggcgggatcccggccggggcgcaggaggcagacctgcgggcccacttcgcgcgcttcggcgaggtgcgctccgtcgtcgtcatgcgcgacagggagacgggccacggccggggcttcggcttcgtcgagtttgaggacaaggcagccgccgccgccgccgccgcgctgggcgacgcggacaggcccaggcacttcctctgcgggcgcgcggtggacgttaagagggccagggcaagagctccacgaaaccagcgcgagcagcactcccagcctcatcaggtcgaacaaggcttagaccaggggaaccaggacaatcagtaccccatggggaacggcaccgcggacagtggtgacaacgtgaactacggttcaaaaaaggtcttcgttggcggactgcaggatgacaccactgaggaggagttccgggcctactttgagacgtttggcactgtaacggatgtcgcggtgatatatgacagcgcaacgaaccggtcgagggggttcggcttcgtcacctttgattcggaggaagcagtagggaaggtgatgcggcagagctttcacgacttgaacgggaccaaggtagaagccaagattgctatccccaaggacgagcagtattaccgcaacagagggcgtggcgcacgctcctctggtgggagggtccctgctggctatgaaggctccatgtaccaaccgccatacaatgctggatatggctcctacaatggctacatgccacaacctgttcacgtgcagccctactttcctgccccctattttcctgtggcgggttatccctatgggagtggatacccaagccaagtcgtcatggcaaacgctcctgatatgatgtcaagatgggttcctccagcttatggaaattatcctcaaatgtatccatgatatgcagcaagctgacaacacttctagcgttacaacgatgttggaacatatgaagctaggttcacaatgactttcaggtgcgtgtattctgataccctactggttaaattttatcactcgttattggtaggaattactgcagtgtacttatttttttaaactatggttgttatatgttcgttgaaattgatagaatattcaagtcttcccatgaaattagcgcatagtctgccaatttttcaatagcatttttcgtcatttgcattttcatgtttgcattagctaattgaaaatggagtggttatcatgattctgctatcatcatctaagattctaagaatccaagtgcttcaaatataataccatggtgaattctagcaatgtaacttggcaccctaaacggttactatatagtatatactgcatttaacgctacctattcaattaggtaatgaaacaaatgttgacatccacagttcagtgtttgctttcaatatttgagacattgatttgcagttcaatacagcagtgaatttggtttatcagttggcaaaatgataattcctttactttatggacacgtgttagagatggaaagttgtatgtaggactctaggagggtgcattctagctgccctgaagcaaaaacaattgttcagtttatgtataatacctttttgttatccatgtcctgtacatcttcctttactgcataaaaattaaatggaatagtttgtttccccatttgttgcatacagtgagatattcatggatcttacttctggagttctggttatctacaaaattgattagattaaagtagtgatgttatattcttagtacagagggaaagggaatcatagtttggcatgaaagtcggttcttactataacagcatactgaagtaactgaaccaaaataacttattttgtatatattggatggatgcaccttgcaccgaacatgtgactgtggagtaaacttatagattaataggcgattctgtggtgatttatcttgcaaaattgtatcctgtcatgaggcgactgaactggctatgagaagctgaagcttgaacttgagctaggaccctttttctgtttgggatccggttttgctggtgcatagttaagcttgaggttgctccagataaggcaaaactgctggtgcatagtagtactccctccatctgactaatacttctacaatggtgacactggagtacaacaattgtttgggaactcgcaactgtgaagacgacttggacttagattctttggttgacaagtatatcattagaattcttccagcttacctacgattcctattcctcccgcctgtaaactagtaaaagcatgctgcaagttgttactggctcccctcccctcttgtaccaatgttaaattcttacgtcgtttaatgcatcagaatcatactgttaaaatatacttgtttgctgcatgctttgacagattgttaccagaatgatggaatcatccatctatctcaaaatctggtgcattgagcttgtgcgtatatatgtcatgttggttgctgctggcgaccatactggaccagaccgatgcgatccatgtgtgcactgattaagatacacgcgcatgcactgaagttccaggtgtgtaaaagagaggcgtttcatgatgtgcaaaaggccagagggtgagggggacgaaaggtgacg

SEQ ID NO: 3543 - DNA, 621 bp, Zea Mays
ccgtgacatcgccgggatcccgcccggacctcacccggcgatatgtcgacggcggctcccgcgccgggctccacggccacggtgcgggtatccaacatcccggcctcggccatcgccgcagagctgctcgccttctttgactccgccgtcaccatcgctggcgcgaccttcgcctgcgagatagtcgccgctcaccgcggctggctcagccgcggccacggtttcgtccagtttgattcctccgccgccgccacccacgccatcgacctcgcctcctctggccgcctgccccccttcctcggctcctgcctatccgtctcccccgcccgcgctgacctcctgccccgcgcgcccgacctctccctccgcgctgccagcgcgagcctcattctaggcaaccgcgtcgccgagcgcgagctggaggtggcctactcctgcgacggcgtgcgggccgaggtcatcccgaggatgcggcgtgtggacctctacctgaagcacgattcccagagctacaagcttgaggttctctttgaggacatcaatgagtgctttgggtgccacctcgatgggacgggcgccatcttgctgcagctgcaatattctttgggcacctttttaatg

SEQ ID NO: 3544 - DNA, 1069 bp, Zea Mays
atgcctagcattgcaagcaaccaagcaggggagggtgtgtttggttcactgccccagatgccacagcctaaggttaggcatgccccatttttgtcggtaagtgtttggttcatgcctaatattaggcagccacgaaaagtgtggcgtgttacacaacccttgccgtatttttttacgccgcacctggggcgctcgttttggccgccgcacgccgcacgccccactcctcctctcacctcacttgctcgtcgccgcacctggatctggctctcgtctcctccaagcacggattaggagtgcacctattttgattctgcgaactgagtaactgattctaaaggatagggcaagaaggctcctttctaagcctatcaagtttttcaatgaaatgcaagagttgtttattaacagcagtgctgatggctctctagccatggaagctacaacttgtatgaatgaaactcatcctggagatgacagtgacttcaatgatgatgtgtgcagtgacttctccaactatcctcagcctgtgcatgatctagcgcccacaaggagagggagtaccagcgaagaggaacgtggaaccaaagagtcgcacaacaaaggaatgtatctagcacacaaagatcaaaagggtatgcgtggtttcttatctgctgcatcagacataacatttgagtcatgggtactaaagcatctgagtgatttggacctatgaatcgactagcaggatgatccatgtaggagatgaatggtgtgatagttggggtttttgcatttcttctaggttgatggatgtcaattgatggagatatttggtggttgtgactagtgttacattgctctttttgttgatttttaactttgagggtaccaatgagcatagtgcatagcaccagtaccttttacaattatggaatctctgcaaagcaaggaaggcattggactgtaataaattttgctccaatttcgcattgcaaatgttctagtagtgtcagatttttctctaatgcttctagtgaaaaatgagaccttttggagacagtttctaaattttgtgtgctgctag

SEQ ID NO: 3545 - DNA, 1373 bp, Zea Mays
ccctttctacttttcactttgctccccagtggttcgcctccatcctccttccctgcagcgctcgcctcgttcttcacctggatccggcgtcggcgtggggacgggccccgccgcgtggcgctggacgcgacagatcttgagctgcgcgtggcgggctccagtccgtggctgtggcatgctggaccggcggctaggcgggcgcgtcctgctccaatccggctaggcgggcgcgtcagccgcgagctaatgagcagatggaattataaagctcccaagaacagcaaatccggattaggagtgcacctattttgattctgcgaactgagtaactgattctaaagatgggtgtgaaggagatgtatcttcaatattacaatagttacaaccagtacctacgaagaagaagggatagggcaagaaggctcctttctaagcctatcaagtttttcaatgaaatgcaagagttgtttattaacagcagtgctgatggctctctagccatggaagctacaacttgtatgaatgaaactcatcctggagatgacagtgacttcaatgatgatgtgtgcagtgacttctccaactatcctcagcctgtgcatgatctaggtgatgattctgacactttacaatctcccaatcatcatccatctcaaagtgttgatcatagctcgtcaagttctggactgaagcgcccacaaggagagggagtaccagcgaagaggaacgtggaaccaaagagtcgcacaacaaaggtagtagatgaactcagtgctactttggtagaacttcaaaatgatcttaagaagccaccacctccagtgcctatgccttttgttaaccctgatgcaatattgtggcaaaggcttgagaatatgacaattactactgatcaaaagttaatggtaggaatgtatctagcacacaaagatcaaaagggtatgcgtggtttcttatctgctgcatcagacataacatttgagtcatgggtactaaagcatctgagtgatttggacctatgaatcgactagcaggatgatccatgtaggagatgaatggtgtgatagttggggtttttgcatttcttctaggttgatggatgtcaattgatggagatatttggtggttgtgactagtgttacattgctctttttgttgatttttaactttgagggtaccaatgagcatagtgcatagcaccagtaccttttacaattatggaatctctgcaaagcaaggaaggcattggactgtaataaattttgctccaatttcgcattgcaaatgttctagtagtgtcagatttttctctaatgcttctagtgaaaaatgagaccttttggagacagtttctaaattttgtgtgctgctag

SEQ ID NO: 3546 - DNA, 974 bp, Zea Mays
cctctgttccaccacgctgctggctgctgaggatggaggcggggagggagagctccaaggccaagcgcgcgcgcgccgccatggtaggctagctactaccgccacttccaccgcgaatctctccctccctcctccggtccgcggttacttttggtgttgttgttttttttgctttctgatgagtttggaggtggtgagccagttctgaagtgtttggagttcgtcgattgttcgctggcatgcacgcctcgaaatttcggctcgggagtttgttgatcgcttgctgggttggtcgagcaacgaggacgacacgacgagccagggtaacgcaggaggtggcgcggcggcgtccgccgcggagacggagggggacgagatggccgtggtggcggcagaggcggaggcggaggcggacgagcaggtggggtcggcggagacggaggagcacatccagcgcatcctcctcgccatcgacaactacacccgccaggtgtctgacatgctggatgccgggcgcgcgctgttcaaggacctcgccgccgacttcgaggaccgcctctgctcgatccacaaggagagggtggagcggtgggaggaggagatccgggagctgcgcgcccgcgacgtcgccaacgagcaggcccgcgccctcctccacaacgcccagctgcacctcctccacaccgtccgcgactaaccgatcgcccaatccatccagacctcagtagcaacaacttacctgcacatcactgttgcctgtctagaatgatagtgctgtactatgcatgtgtgcacatctgaatgctgttcaaatgtttcttgtttcggcagcaactgcatgcatcaaaacttgttctacgtgaattctagatgtctgttcaaagtgctaaaatatgcaagaccacacaccattttacttaggctaggggcacagcatcttgaggaagtgatttctgttcaggcgccacctcctg

SEQ ID NO: 3547 - DNA, 1837 bp, Zea Mays
aatcacgaaaactgggttggagccgatggatcgtttctatcctcgttttcctccctctcctccagatccggtgctcctctccgccgcctccctcccgcagctcccatatttttccgtcgctcgcgcgcccgacgcctccctcccgcgctcccggagcttatgcgcgccaaatctcccgccagcatctccttctcccgcgcacgcctctggctttcgttccagaccaggctccggccagatgagaacgctccaccagtagctaggcttcattttcctttttaatggctcatttccatcccctgatctagcgctaaaatttagtccccaattcatctctaaggaaaatcgagtttcagatggatttgttagggaagggtggtgcgcaacaaaagaaatcaaagaagtcttctccaacctccagaaaatcaactgttgttccggccatggcatctgcaggcagtgcaggcgttgcagctccaagcacgggtggtcgaagtagttctcatccattttctgtggtttgggatgggatggcacttggaggctcattcgcgtctgaatcatctcccaccagctctgaatggctatatccaccaggcgggtttgtaaattctctaaggatgccatttccttatgctacctatccgaatggcagccaacttccagaaaactcccattttgttggttgtacaagcaacaaagggactccatcaccaactaatgataaagggactcctattgcagaagtacatgattcaattgacattgacgccgatgacaccctagagcctgctagaactgacaaacgattgaattggtcacatgaagaagatgttagattgttcttggctacaaaattcactagacccggtcgatggaaatgataagaagtcagattattactggacagatgttactaatacgtacaacagcaccacgccaagtaaccgtaggagaaaccgtaaccaattgaaaattcgttgggaccgtgttaagaaacctttaagtgagtttcatggctgttgggtaaggaccactagagtgttccaaagtgggcagagtgatgaccaaaggacagataatgcattgcagctatatgcatctgaacataatggcaagcctttcttgctgcaacatatatggagagtagtacgacatgaaaggaagtgggctgcatatgtggacaaacttattaatgcaaaggacaaccgtgcaacaccaagtcctgttgtgaatgtagaagattcacctacaaagcgtcctactgggaagaaaaaggccaaagaagagcgctttggaaaacgaaaggcaccagaagctatttctgcaattggagagaaactagaaaaattcattgaagcaagcagcaaggttgagaagatggcacaagtgcaacaatgtttggctgacaagaagttagaagtagccaagattaatcacaaagcagcccaagaacaaacaaagtgtaaaatgatagacctttataaagatttattgtgtggttccacggctggtcttagtgaagaagctctagctgagagatcaaaagctttagagtgtatgagattgtctttatttgctccagataattaaggagcttgatcggaaggtttttatatgcacatggagaggctggatctgtgcatggagaccgaacctgggtgtgctaatgttcatgtcgatcaaaagttgttgtccatctcagatctttgctatctatatattaagagaagtttgctataattatatattactatgtattatggactacattatatttatcaacatggatactgttttactatggattaatatattttaatctatgtgttgctat

SEQ ID NO: 3548 - DNA, 2008 bp, Zea Mays
ctaggttcgttttgagtgtgagccgtccagctcaagattttttttagccctacttttcacaaagctgctgcactcgtttagattctctgaccctgctcccgagaactcatcgacgccgtccatgctgtcctcctctccggcgccgtcacaagagggcgccgccgttccctcctcctgggcggaagctgcgtcctcggcggcgctccggcactaccgctcactggccaagaaagggaagccgcaggggcgcgagtccacggtcctcgccgccatcctcctctctgccccgcaggactcgcacagcctcactgtgctctccatgggcaccggcaccaagtgcctcggtgcctcgatgctcagcgcacgtggggacctcgttcacgacgcgcacgctgaggtcatcgctcgccgcgcgctgctccgcctcgtctactccgagatcggccgtggcgccccgcctgattggctggttgcttccggggatgctgggagatggaggctgagggatgggcactgccttcatctttacatcacacaactcccatgtggagtcatgccagtaccaccatcgcagtctgatttgccaagaaaacagctgaacagtatgaatgtcgaaattggctttgttcaaaggaaaccagggcgtggtgatacaacatcgtccatgagctgctttgacaaaatcacccgctggagcgttgtaggaattcaaggtgcattgctgtcacatatactggaacccttgtatttgtccaccattactattggacaattacctgatggtactcctgaacggttctctattaaaaataatatcaagaaggccctggatgctcgtctgtcctctctacccaccgaattgccgcctcctttcaaaatgcagaagccaaaggtttttgaggcgcctgtcccaccaacagagtttcaacagattcctggagacgtacgcctcttgacatgcgggtactcgatttgttggaataaatccggtttgcatgaagttgtcttaggcacaactggtaggaaacaaggaacctcatcaaaggcagcacacttaccctccaccgagtcactggtctgcaagagaagactactagaagcatttttgtcccttgagcatcctttggtgaggcaactaaaatgcgaggagctatcttaccgggcacttaaggatacggctcatgaataccatcacgcgcttgagctcctcaggaaggccccattttttggctgctggcgagctaagcctacatttgttgattcgtttgcagtttcacggtgatgtctcgtgaactggtgaatgccatctccctgtttctttttgtctgttgaaaaaacatactatctccgtcccaaaatatagttctttctagcctatttttttccgatccatattaataaacgtataaatagtgtagaatgaattatattttaggaccgagggagtaggtctgatccagctttgttctgtgtgaaattgtatatgttggtggtccatgaatgaatcaaactgaacttatgcgcgcgtgctgctgtcacttgattccaagcactccctcccggcctccccgcgccagagagttcaagttctgaataatggtaggatttcaagttcttttactcaagaatcgagatgtgaaatttatcgcgcgcgtgactgcgtccaggtcgtttttgaggttcatcggcgtcaagccgtcagccgctgccggtccatttgttctcgacggatggatcctggaatcccgcccgactcccgagactggaggacaagagactccggagaccggatcacaagcaagcaacatgttcgtttggtttggctttaatttgtaacgaattttattgtttttacaggattttgtatctatagtttacagctgactttaatctgaagcaaacagcataatacatagaggtcgaatggccaggcgaaagagaaagagagataaagttagacactaaaaaaatgaaataaaattattgatataatagaaagataattgtt

SEQ ID NO: 3549 - DNA, 2084 bp, Zea Mays
ctaggttcgttttgagtgtgagccgtccagctcaagattttttttagccctacttttcacaaagctgctgcactcgtttagattctctgaccctgctcccgagaactcatcgacgccgtccatgctgtcctcctctccggcgccgtcacaagagggcgccgccgttccctcctcctgggcggaagctgcgtcctcggcggcgctccggcactaccgctcactggccaagaaagggaagccgcaggggcgcgagtccacggtcctcgccgccatcctcctctctgccccgcaggactcgcacagcctcactgtgctctccatgggcaccggcaccaagtgcctcggtgcctcgatgctcagcgcacgtggggacctcgttcacgacgcgcacgctgaggtcatcgctcgccgcgcgctgctccgcctcgtctactccgagatcggccgtggcgccccgcctgattggctggttgcttccggggatgctgggagatggaggctgagggatgggcactgccttcatctttacatcacacaactcccatgtggagtcatgccagtaccaccatcgcagtctgatttgccaagaaaacagctgaacagtatgaatgtcgaaattggctttgttcaaaggaaaccagggcgtggtgatacaacatcgtccatgagctgctttgacaaaatcacccgctggagcgttgtaggaattcaaggtgcattgctgtcacatatactggaacccttgtatttgtccaccattactattggacaattacctgatggtactcctgaacggttctctattaaaaataatatcaagaaggccctggatgctcgtctgtcctctctacccaccgaattgccgcctcctttcaaaatgcagaagccaaaggtttttgaggcgcctgtcccaccaacagagtttcaacagattcctggagacgtacgcctcttgacatgcgggtagtatatggtactcgatttgttggaataaatccggtttgcatgaagttgtcttaggcacaactggtaggaaacaaggaacctcatcaaaggcagcacacttaccctccaccgagtcactggtctgcaagagaagactactagaagcatttttgtcccttgagcatcctttggtgaggcaactaaaatgcgaggagctatcttaccgggcacttaaggatacggctcatgaataccatcacgcgcttgagctcctcaggaaggccccattttttggctgctggcgagctaagcctacatttgttgattcgtttgcagtttcacggtgatgtctcgtgaactggtgaatgccatctccctgtttctttttgtctgttgaaaaaacatactatctccgtcccaaaatatagttctttctagcctatttttttccgatccatattaataaacgtataaatagtgtagaatgaattatattttaggaccgagggagtaggtctgatccagctttgttctgtgtgaaattgtatatgttggtggtccatgaatgaatcaaactgaacttatgcgcgcgtgctgctgtcacttgattccaagcactccctcccggcctccccgcgccagagagttcaagttctgaataatggtaggatttcaagttcttttactcaagaatcgagatgtgaaatttatcgcgcgcgtgactgcgtgagcaccgaacaactaatgcctttctgctcgctcgcttcaatttcctggacgagcctcaccgaggtccaggtcgtttttgaggttcatcggcgtcaagccgtcagccgctgccggtccatttgttctcgacggatggatcctggaatcccgcccgactcccgagactggaggacaagagactccggagaccggatcacaagcaagcaacatgttcgtttggtttggctttaatttgtaacgaattttattgtttttacaggattttgtatctatagtttacagctgactttaatctgaagcaaacagcataatacatagaggtcgaatggccaggcgaaagagaaagagagataaagttagacactaaaaaaatgaaataaaattattgatataatagaaagataattgtt

SEQ ID NO: 3550 - DNA, 2209 bp, Zea Mays
gcgccgcgtccgcgctgctggcacgccgcgtgtgcttggctcccgccccacgcccagtgcctccctccctctctgcccccctgccgcggcgcgtgcctggctggctggttgccctccgcttgggccttggagagcccgggcttcgatttctagctggttccgccactgccgagaagccgcgcgttgtcaggcacgggaaagaggtagtccgcgggaggttctctccggaggagaggtatggtgcccgcgagggctcgccatatcgatagatccgcctctgaccagcagcaagggcccgctccagcgggggcggcgacgctgctagtgcggcacctcccagaggctatcacgcaagagatgctatcccgcctcttctcccactacggagccacatccgtccgcccctgttccggtggaaagttgagaaattgcgcatttgtagattttagggacgaggcggcagctaatcacgcacattcgctcttgaacaggttgaggtttctgggaaaagtgttgactgtcgagcgagctaactgtccaaatgcaaatgagtctcacctgaagcatcaggaccaattagggcatggggcgtcccaggtaccaagtattagttcccaaactcagaaggaccacacatcgattgccgaaccaattgcccccaagcttagtgtggactacccatttcctccacaccttgagtatgcatatccaccaccagatggaaacatattaacaaatattgtcaatgccctgatcgccgtccctcgattctacaaccaggtcctgcatttaatgaacaagatgaaccttcctgctccatttcggatggcattgcctactccaccactaccatcgcaagttcctgttatccctcatcctcagccaccaccgggatctactacaactggggagcttcattcagcagatttgtctagtgatgagtctgagttagaatcatctgatgaagatattgataaacggaaaatcaagcgtgcaaagcatgaagcaattgttggtcctgcagttgacaaaaacgttgctcatgaagcagtgggggtgaaatctgttgcattggtttctaatgagcttcaagtgataaaaaagaaaaacccagtacttcagataaaaattacccctaagcctatacagaaggaaccacctgtcccaagtatgactgaaaatgaaccggattcaactcatgaacaacttcaagagaaacattttgtcacacctcaggaaatgtcgagagagaaattaccaccagaggagattttatcccttcctatgttcaagaattacactccaggaaatccagccagtgttctgtacattaagaacttggcaaaggatgtcactcatgacgacttctactatgtctttggctctgttttcgaaagcatggacagtgcaaggttgggtttaagtgtaaagttaatgcaggaaggacggatgcgtggtcaagcctttgtcacatttcccacggttgaacttgctcagcgtgccctgaatctagcgcatggctatgtgttcaaaggaaaaccaatgatcatacaattcggaagaaatcctgctgctaacaaagcttcctaaagcaggatacaattttctttccagattttgatagatttcagaagttggtaggaactggaaagtgacaaaccagaggttgtgggtatctgttggctgttgttactgcaacctgtttggcatacacactaggctgattggttcctcccatggtgtaatgtttgtcgaaaaataacattgtacattccagtttgtggattattaaaagaattactcgataaaagcggacattggaggttataagctgcaaatcgagcaatgactgctagcagcctgccgtcactgagaatcagaatctagcgcatggctatgtgttcaaaggaaaaccaatgatcatacaattcggaagaaatcctgctgctaacaaagcttcctaaagcaggatacaattttctttccagattttgatagatttcagaagttggtaggaactggaaagtgacaaaccagaggttgtgggtatctgttggctgttgttactgcaacctgtttggcatacacactaggctgattggttcctcccatggtgtaatgtttgtcgaaaaataacattgtacattccagtttgtggattattaaaagaattactcgataaaagcggacattggaggttataagctgc

SEQ ID NO: 3551 - DNA, 1734 bp, Zea Mays
cagcccgcggcagcagcagcagctcctcctgctcctgctcgtcgctgtagtcgcctcgcatttaccactcactcactcgctcgctctgcccttcaccccctcgccttcttcctccttccatctcgatctcgtactctccttcgctcgcatcgcatcgcatcgcaccgacggacgcagagcaaggtcgcccgccgccccaccacccgcgcgcggctcttggcgccgcatgccgctctcgccctccggcgccgccggcggcttgctccgccgctgcccgcgcgctgccgtcctccccgccgccgccgccgccgcgacaacggctcgactcgaggcgatgcagatcggaggtaaattctgatcaatctgagggtgtgctgctacatgagagggagaaggccaagaacaacagtgcacaagaaattgtgcctctggtccagactctgttgccttgtaccccagctgggtacttagtaaaaccctcttcaagcaaactggcagctcccgccaatacaatttctgaatccgctaacttcaccacgcctggaaatcagaacaagcaccctgtgctcagaaacgtcggcgcgccgaaggcatggaagaggagcatcacccacgtgtacgtgagccacgtgatccagatgcacgtgaacaaggagaaggccgccgcgtcgtcgtcgttacaaagccaagcgaggcctgaggagaggctcctcgcccgctgccccaggcctccgaacggctcgtccaccacctcgcacaaggccgccgccgctcgggacgagaggttgtacacggtgcacttcgacgtgcgcgtcccggctcaccagccgcccgctggcatctgcgatgcgggcgccggccggcagaagattgtcagcggtagttcctggcaaaaccttccggccacatcggcggccgccgcggcagcggcgcagcatgtccggtacctacaccctcagatggctcggccaccggcgacgccgcgtgacgcgacgccgtactcgttcccgcacttcccttacagcagggggagtctgccacccgccgcggcgcttcagcagatgccacagtatgtgtgcggcccggcgtatggtctgcgccctgcgagctcgtcggcgatgatgatgaagcagctacaacaacccatgccgacgcagcagcagcaccagcagatgtggcagtaccatgtctcgcagtaccagccgaggccggacgctacgctttctccggcggcagcgtggcacggcatttcgtcgtcgctgcgaccgatgggcatgcttgctcccccggagatgccgtcgccgccacggccgccgcagatggagctcttctgcgcgccgtaccaaggtggcaggcagccgcagcagctgaggttgatgtagcctggcctcccttctgctgctgatcagctgattgatactactattcagacgcactaatttatagtggataatatacaacatcttagcagtaaaaaagtgggatgttgcaaaaaagaaaaagaaagtgagatgcataaggttgtgttttatttatacactcaggaaatagggttatgcatggtaccagaggggactaaactgcaggccactggtatttagagtgagagcccttttggcaatgcctacggctctaactctggctcatcttcaatctctatcaaacggttataaaaaaatagcttcttatcgaaagccctctaaaagagagagagcacaaaaaatatggctccta

SEQ ID NO: 3552 - DNA, 2706 bp, Zea Mays
ctgtctatcctatcttttttccctgccgcgctgcctatttactttgcttcgagcgtactgctgggctctggacgcttgtctccttgtcccagactcccagtcttttatagctgttgttcactttgccctaaggttggttagcatgtgcgtgtctatccgtccatgactgcctcatcctcctcctctcgccgcattccttctcctcgagtccgtgtagagtgagcgaagacgacaaagagagaaacgagagggttgtgacttgtgagatctttttgagctagtagctaggactagcaaggggtggacaggcctttctggatggcggatatggagaggagggaggagaaggagaagaagccggtggttgggcgtcagcaagcaaggagacacgcgatagggagtggctccaccccctcctcgcctcctcctccaacggctgccgctggatatagcgggaaggagatgagaggtgaggagcacagggcagcgctgagacagaagagactcaagaaggccaagtgcttcaagtggagaccaagcaagggcgacatggatagcaaagtggaggcggggggagcggggtctggtcaggtctgcgatgacgcagtgctctgctcgctgtctacggccagcttcagtggcctggttagctggcagagagtgaggacccttgggaaggtggctgaggggtgtgatgctgccgatcctccggttccaagaaaattaagatcagccataaacaagcgagctggtcgatttgcttctgcgccatcacgccatgtcaaaaagaggcgtcatctttcggctatcagtgctcaaatttcttctgtaggccaggaaacaagatccaatgggagctcgttatttacagaacaagaggaagcaattgctgatgttctgctgtccctatcccaagtaccctctcacagcgaggtcacagccgacaaggctgtagcagatagttcaaacacgaatgacgcttcaacttctttttcaaaaggacctactaaggaggatgaccaaacagccgagctgccaagcgctgctaacgagctggctagccaatgcgcctgcataaataaagcggtggagcaaagcaacatcgttccaaatgcagatccagtggctgctgctgcaaatcaatccagcaacagtatcccacttctgtcagcgaatgagcaaatgcaggacctttctatggaaactgctgtgaatttgccaagcccatctaaagacacctccattaacagcaccatgaactgcagtttgatgatagcaaatgtcaccctgcacagaagccagaggctcctctttggctggtaaattctgatcaatctgagggtgtgctgctacatgagagggagaaggccaagaacaacagtgcacaagaaattgtgcctctggtccagactctgttgccttgtaccccagctgggtacttagtaaaaccctcttcaagcaaactggcagctcccgccaatacaatttctgaatccgctaacttcaccacgcctggaaatcagaacaagcaccctgtgctcagaaacgtcggcgcgccgaaggcatggaagaggagcatcacccacgtgtacgtgagccacgtgatccagatgcacgtgaacaaggagaaggccgccgcgtcgtcgtcgttacaaagccaagcgaggcctgaggagaggctcctcgcccgctgccccaggcctccgaacggctcgtccaccacctcgcacaaggccgccgccgctcgggacgagaggttgtacacggtgcacttcgacgtgcgcgtcccggctcaccagccgcccgctggcatctgcgatgcgggcgccggccggcagaagattgtcagcggtagttcctggcaaaaccttccggccacatcggcggccgccgcggcagcggcgcagcatgtccggtacctacaccctcagatggctcggccaccggcgacgccgcgtgacgcgacgccgtactcgttcccgcacttcccttacagcagggggagtctgccacccgccgcggcgcttcagcagatgccacagtatgtgtgcggcccggcgtatggtctgcgccctgcgagctcgtcggcgatgatgatgaagcagctacaacaacccatgccgacgcagcagcagcaccagcagatgtggcagtaccatgtctcgcagtaccagccgaggccggacgctacgctttctccggcggcagcgtggcacggcatttcgtcgtcgctgcgaccgatgggcatgcttgctcccccggagatgccgtcgccgccacggccgccgcagatggagctcttctgcgcgccgtaccaaggtggcaggcagccgcagcagctgaggttgatgtagcctggcctcccttctgctgctgatcagctgattgatactactattcagacgcactaatttatagtggataatatacaacatcttagcagtaaaaaagtgggatgttgcaaaaaagaaaaagaaagtgagatgcataaggttgtgttttatttatacactcaggaaatagggttatgcatggtaccagaggggactaaactgcaggccactggtatttagagtgagagcccttttggcaatgcctacggctctaactctggctcatcttcaatctctatcaaacggttataaaaaaatagcttcttatcgaaagccctctaaaagagagagagcacaaaaaatatggctccta

SEQ ID NO: 3553 - DNA, 2782 bp, Zea Mays
ggaccaagcagtagccgcagcagcatttttcttttcttcctcctgtctatcctatcttttttccctgccgcgctgcctatttactttgcttcgagcgtactgctgggctctggacgcttgtctccttgtcccagactcccagtcttttatagctgttgttcactttgccctaaggttggttagcatgtgcgtgtctatccgtccatgactgcctcatcctcctcctctcgccgcattccttctcctcgagtccgtgtagagtgagcgaagacgacaaagagagaaacgagagggttgtgacttgtgagatctttttgagctagtagctaggactagcaaggggtggacaggcctttctggatggcggatatggagaggagggaggagaaggagaagaagccggtggttgggcgtcagcaagcaaggagacacgcgatagggagtggctccaccccctcctcgcctcctcctccaacggctgccgctggatatagcgggaaggagatgagaggtgaggagcacagggcagcgctgagacagaagagactcaagaaggccaagtgcttcaagtggagaccaagcaagggcgacatggatagcaaagtggaggcggggggagcggggtctggtcaggtctgcgatgacgcagtgctctgctcgctgtctacggccagcttcagtggcctggttagctggcagagagtgaggacccttgggaaggtggctgaggggtgtgatgctgccgatcctccggttccaagaaaattaagatcagccataaacaagcgagctggtcgatttgcttctgcgccatcacgccatgtcaaaaagaggcgtcatctttcggctatcagtgctcaaatttcttctgtaggccaggaaacaagatccaatgggagctcgttatttacagaacaagaggaagcaattgctgatgttctgctgtccctatcccaagtaccctctcacagcgaggtcacagccgacaaggctgtagcagatagttcaaacacgaatgacgcttcaacttctttttcaaaagtctgttgtgtgatctcctatgcaggacctactaaggaggatgaccaaacagccgagctgccaagcgctgctaacgagctggctagccaatgcgcctgcataaataaagcggtggagcaaagcaacatcgttccaaatgcagatccagtggctgctgctgcaaatcaatccagcaacagtatcccacttctgtcagcgaatgagcaaatgcaggacctttctatggaaactgctgtgaatttgccaagcccatctaaagacacctccattaacagcgctcaaaagcaccatgaactgcagtttgatgatagcaaatgtcaccctgcacagaagccagaggctcctctttggctggtaaattctgatcaatctgagggtgtgctgctacatgagagggagaaggccaagaacaacagtgcacaagaaattgtgcctctggtccagactctgttgccttgtaccccagctgggtacttagtaaaaccctcttcaagcaaactggcagctcccgccaatacaatttctgaatccgctaacttcaccacgcctggaaatcagaacaagcaccctgtgctcagaaacgtcggcgcgccgaaggcatggaagaggagcatcacccacgtgtacgtgagccacgtgatccagatgcacgtgaacaaggagaaggccgccgcgtcgtcgtcgttacaaagccaagcgaggcctgaggagaggctcctcgcccgctgccccaggcctccgaacggctcgtccaccacctcgcacaaggccgccgccgctcgggacgagaggttgtacacggtgcacttcgacgtgcgcgtcccggctcaccagccgcccgctggcatctgcgatgcgggcgccggccggcagaagattgtcagcggtagttcctggcaaaaccttccggccacatcggcggccgccgcggcagcggcgcagcatgtccggtacctacaccctcagatggctcggccaccggcgacgccgcgtgacgcgacgccgtactcgttcccgcacttcccttacagcagggggagtctgccacccgccgcggcgcttcagcagatgccacagtatgtgtgcggcccggcgtatggtctgcgccctgcgagctcgtcggcgatgatgatgaagcagctacaacaacccatgccgacgcagcagcagcaccagcagatgtggcagtaccatgtctcgcagtaccagccgaggccggacgctacgctttctccggcggcagcgtggcacggcatttcgtcgtcgctgcgaccgatgggcatgcttgctcccccggagatgccgtcgccgccacggccgccgcagatggagctcttctgcgcgccgtaccaaggtggcaggcagccgcagcagctgaggttgatgtagcctggcctcccttctgctgctgatcagctgattgatactactattcagacgcactaatttatagtggataatatacaacatcttagcagtaaaaaagtgggatgttgcaaaaaagaaaaagaaagtgagatgcataaggttgtgttttatttatacactcaggaaatagggttatgcatggtaccagaggggactaaactgcaggccactggtatttagagtgagagcccttttggcaatgcctacggctctaactctggctcatcttcaatctctatcaaacggttataaaaaaatagcttcttatcgaaagccctctaaaagagagagagcacaaaaaatatggctccta

SEQ ID NO: 3554 - DNA, 2589 bp, Zea Mays
ctgctgcagcctgcaggcagccgcccgcgcggaggaggaggaggaggaggaggaaagcaacaagcgatctctcacacaagacgccggagtccaggcagatagatacacaccgcgccgcctgccgccatgtcgcctctctgctgtgactcggactggtcgtcggtcacctgagagcaagctaaacgacgacggacggacggagctagctgctggctgctgccagtcacgcctcctgctcatcgaccaagtgcgccaaataaaggatcggaggctgctagcttgttactaataagctgcggcggccggtccgcgtttttctttgcttccgatccgatggcggccgcctcgtccgcgcccttctttgggctcggcgacacgcagatgcagccacagcagggatccagctcctctctgcagcaaaactccacagctgctcctggcgccgcggcggtgccgccgccaaagaagaagaggaaccagccaggcaacccaaatcctgacgcggaggtgatcgcgctgtctccgcggacgctgctggcgacgaaccgcttcgtgtgcgaggtgtgcaacaaggggttccagcgggagcagaacctgcagctgcaccggcgcggccacaacctgccgtggaagctgaagcagaagaaccccagggaggcccgccgccgggtgtacctgtgcccggagccgacgtgcgtgcaccacgacccgtcccgggcgctgggcgacctcacggggatcaagaagcactactgccgcaagcacggcgagaagaagtggaagtgcgacaagtgcagcaagcgctacgccgtgcagtccgactggaaggcgcactccaagacctgcggcacccgcgagtaccgatgcgactgcggcaccctcttctccaggagggacagcttcatcacccaccgcgccttctgcgacgcgctggctcgtgagagcgcgcagatgccgcccctgggcgccggcctctacgtcggtcccggcagcatgagcctggggctctcccagatccatggctttgcagatcaagcccagtcctcttcagcagcagcagccccgcagtttgaccacatcatgccatcgtcttcgggctccagctccatgttccgttctcaggcgtcggcctcctcgccatcttacttcctcggcggcagcgcccctcctgccgccgcccaggatttctccgaggacggctcccaaggcagccagggccctctgctccacggcaaggcgcacttccacggcctgatgatgcagctccccgagcagcagcaccagccgggcagcagcaacgccgccgtcggcgccaacggtagcaacatcctgaaccttgggttcttctcagccggcaacagcggtggcacgtccggcagcctgcaggacgcgcgcattgccatccaagaccagttcaacctcagcggcagcggcagtggaagcgcagagcacggcaacaacgtgatggtggcgtccatcggaagccacctcggcagaggcttcccttccctgtacagctcgtctccgtcggccgggatggcccagaactcggcgacggcgctcctgatgaaggcggcccagatgggctcgacgacgtcgagcaccacccacaacaaccacaacggccctactacgactagcacgctgctccgtgctacgggcttcagcggcgccaccggcagcgggcagctggggactactggcggcagggccgccgcgggagaagaaggggcggcgtcccacgaggcacacttccatgagctcatcatgaactctctggccggcggcggcttctccggcaccgcagggttcggcggcggcgtggacgacggcaagctgagcaccagagacttcctcggcgtcggcaggggcgccgcgacgatggcgccgcccgggctccacatgggcgccctggacccggcccagcagatgaaatgaggtatgacagtacgatcgagtatgatgggtcggtcagggaatgatatgatgaagagcagcaacgtacgataagcacatgacaagagatgcgagaagggaagtcaataataaaacagacgatcatgcacgtgaataagggtactagctttcgcgcgcatgcatgcatgggaaggtaagctagctagtgacgagggatcagaaggatggagtagtagtaaaagaaactgttttgttttaagttaatttccgtgttcatatgcatatgctggctgcatgcaacttgttggtttttcgccatttcccgtacgatttcgtggtgttaattcaagtggtttactactctatatatatatgagtatttaaatttggctggagatggcggcgcgcggtctcccccgatgtgaatgaaacgaagctcatgcatcatatgtggagctaggccgcgcgggccagagaccagaatctaagcaggatgctttggacgtttactgcttgttgcctcgtgctcttctggatatgccttttttttctcgctgcatgcatgcatgttgcatgatgatgcggctgtttatatttcatgttggttccttctctgggtcgcgctgctttcaaagctgaaagggggtcggcgggggtccgcgcagagaatgc

SEQ ID NO: 3555 - DNA, 1699 bp, Zea Mays
cggctatagcctatatacatacatgctttgctttgcatgctacctcacgtatctacagaatgaagcacagcacagcacagcacagggaacgaacgatcgagctcaaggtctccacgtgttgcccggggaggcgtttgtaaggagagctcatgtgtggctatgtggtgcaaacaaagctgacagcaaggtgttctcaagagcaattctcgctaggacagtagcatgcattccagtcgacgatggtgtcctggaaattggaactacagaaaaggtagaagaagacattttcttaattcaacatgttaggaacatcttcgtggatcaacatggcgcccacataatgcctaccaccctctcagggtattcaacttccaccccaaccacacagcttaatcatcagccattccagacaaaaacaggaatcagtctcaatctaggagacgagcataatagtgaaatggaagatgatgacgacggcaggattgatttagagaacaatactgaaaatgattcaacaaggcggcatttgccacaggacgccagtgtaggcaatgagctggaaacgctcaatgcagagagcagtgggccgatgctgattgctaatctgacagcgcaggatgaatattgtccgttgcatcgttttcacagtgaagacctaagcagtaaatacctacagtcatcaggggcagaagatcaagcagcagtagcggaaaacgcacactacatcaaaacggtccttacaatcctacggttcaacgcgtgccggcaaacgcaagcaggcctcctcaaacatcgccaaaacctacctggcactctccaagaactcgccattctcaaaatggaactggaagcgcaaaggaataagcagcatgttgatccctgagggcacccagcagaggatgctcaagagcgtcctgctcggtgctcctagcagcagcagtcaccggacgtcgtcctcagcacctgagacgaggggtgacgatggcgaaggcacgagccggtctcggagaggtccggtgccgtcccagacagagctgagcgccagccatgtcctcaaggagcggcggcggagggagaagctcaacgaagggttcgccatgctccggtccttggtgccgttcgtcacaaagatggacagggcgtcgatcctgggcgacacgatcgagtacgtgaagcagctacggaggcgtatccaggagctggagtcacgagctcggctggttggcagcaaccagaagacgacgatggcgcagccgccgccgcctgcagcctcaacggaggagagaggtcgtcgtcaaaccagcggcggttacctcgctcgcgcaggtacatgcagcagagcagcggaggcgagcggcaacagcaacctcggggaggagcctccggcggcggcggcgagcgacaccgacacggaggtgcaggtgtccatcatcgggagcgacgcgctgctggagctccggtgcccgcacagggaagggctcctgctccgggtcatgcaggcgttgcaccaggagctccggctggagatcacctacgtccaggcctcctcagctggcgacgtgctacttgcaaagctgcgtgcaaaggtgaaggaggtgcatggcaggagaagcagcaccactgaagtgaagagagcaattcacctcatcgtttcatcagactggaactggatatgcgagaagaatccatgtgtagcata

SEQ ID NO: 3556 - DNA, 3024 bp, Zea Mays
actgaatttgcttatttccggctcttgttgaaaccgccacccgattcctccgctcgccaaatcctcgccgtgccctcgtagcaattccttgcgtcggcgcatcatcgcggcctcctctccctctctctctctatctctctcaatctctccgttggcaaatcgttgaatcgacgtgcttggccccggccgctctgagcccgccgccagcctcctcgtctgaagaagaacgacagccgtcgggctccggtggtcccgccgaagaacggcaggtagccagccgcgctcatcacgccggcgactcgattggcattgtattggcctttccgtttgttgagttctcgaagcaaaacgacctgatgagattcctcaaggggagcaaggtggaggtattgcaggaggcagatgtgccgtttggttcttggaggcctggtgagatcgtctccggcaatggacacgcctactttgtgagatatgatgaaagtcccgttgactccagcgtggctgttgaaagggtgccaagaaggttgatgaggcctcgccctcctgcggatgatcctgtacgctggagtttgggtagtatcattgaggcctttgacagctactcgtggaaggttgccgaggtggtgagagtgcttggaaagaatcaatatctagtcaggctccttgggtcctcgctggagttgagtgcacatgcatcggttcttcgaatgaggaagctttggctagatgacatatggattgtgactcagaagtattctgcaagatgcttggatggtggtgcattccgaggtcaatcaaaagataaaaatttagaccataacttcagaatggacagtcgtcaacttgagaaccagaatgcctttgagggtgatacatctagaggcatcaagagaaaatcgtctgctatatcaacacatcctcaatgcagtgaaatcactaagagattgcggacaccaaatagagatggaaggtactcaaagctggttgatagaagtttttcccctttggctgaaaaggtagatgatgttgattccccatgcattattctacgcgggaaatgcatccatgctggtcataaatggcatactggaacaactgaagaatttagtgatacagagagtatatcatcttctgttggcagttctagtcctaacagtacccctcatagatcacaacattataatttggtctaccaaagtggagatagctgtagtagaactgatgatgatgaagcttctacatctgaaagagaaacatcagaacatgataacaatgggtcgagggaagaaacccatgtgctggaattacatgcttatcgcgcaacaatgttagccttgcatgcttgtgggtcaattagctgggagcaagaggctttgttgactaacctaaggttaacactgaacatctcaattgatgaacatctagctgaattgaggagtttggttacccgtgctgttacttccagatagcttttgttgttactttcctggtggcatttcatatctttcaaattattatggcatgcacccgtttgactgtccagaagagcacttgagggaacatctgtatcagcaccggagtgtttcctctttccagcaccggagtgtttccaccatcgtcattagaggtaggaccctcccacaacctagaagcaagaccctcgcacgcccgatctgaggatgacttcgagggatatgacgattgacttctcgagtcagacgatgaacttacatttgatgcgcaacctgaaggcccggctaactggaactgggtggctgagctacaataggaggttcaaactgagctgcctgctgaactaagtatgattcaagacgaaaaccactctaagtatgacctctcggatgaggacgtctccgtggaagggacggacgcgtccgatgatgatattttggcagataatcaggacccggctgatgaggatattgaagatatcgagccgaaagaagatgagaaagattcagaggagctcattgttatcgatgatgagccatgggcgccagatccatttattcctgttgttcctaatccgaagactcgagcaccggagattcctgtaccagaagcccctgcgccagtagctcttgcttcagagggtcccccacaaggaaatacaatgcctgagctcgtcccgcaaccggattgggtaaggacaaaatctcacaatcatcaactcaggtgtggctgaagacaatattcgtatggagactactcaaatataccgctgccctgaacactgactgagcatgacgctgccttgattgaactcgaggaattaaagaagcagaatgcccaactgtgactcatctggagaatgaaggacaacctcaggctgccgtgaaacttagattttcctgacttgcagccgacttctatgtagacacaaaattgttgggattacatagtttggccttgcatcaaggaaaagttgcaggttatctgtacagtaatttgccagtcgtcttatgcatatgatgcatacctttttactgttctagtgttttgtaatccagatattgtagccggtgttcttggtgaaatatgcgccaggagagactgagacttattttgccaccttactttgtgcaaagccagctgcccttcaactttgctggacaggcaatcacatattttcagaagtgaagcggtaggccccggtagttctgatgagcaagcaagtgaaaagtttgtatgtggtgtatgacgatgtaccttggatctctttacttccaattgaacctgcacatgttcctggcttcgtgtcatcacaatgaccttgtattgtttcagtgttcacctacagttcatgtaccttaggttccttttctgtttttgccttacacgtaattggttgcagcagagcaccaaggatcggggatgtacaaatcaatatcagtttgcaactttgcatggaaggcatgcccttgcaaggcctcttggacagactccttcctcagtgctgaccgcatttgcagttgcagtgcgttagaggtggctgctgatgct

SEQ ID NO: 3557 - DNA, 1735 bp, Zea Mays
ggccaattccctgtatgccactggaaaatatactcattccttgtatgccactggccccacatgtcatagacaccaaaaaatatacctatatgccactcagtggcacacaagggatgagtataaaatctgatggcataccaggaattttctctagtttttagttaataacaacctaaattaatttttggacgtttttagggagatgctctcaaggccacaggatgacaggaccgagtctgccgactagctattagggttttgtttgcaaaccccaattcgattcccaaccacatcagccgccgccgtcccgtcaccaccaccaaccttggtagcagccgccgtccggtcatcaccaccaccttggtagccgccgccgaagcgcgccgcgggcgcgggcgctcgcgatggctaaccgcacggaccccctcgcgaagagcatccatgggacgaacccacaaaacctggtggagaagatcgtgcgctccaagatctatcagagcacctactggaaggagcaatgcttcggcctcaccgcagagacgctagtcgacaaggccatggagctcgaccacaccggcggaacctacggcggcaaccgcaagcccacccctttcctctgcctcgcgctcaagatgctgcagatccaaccagacaaggacatcgtagtcgagttcatcaagaacgaggattacaagtatgttcgtgttctcggggccttctacctgcgtctcactggcacaattgctgacgtctaccagtatcttgagccgctctacaacgactaccgcaagatcaggcacaagctcagcgatggacagttcacacttacccatgttgatgagttcattgatgagttgctgaccaaggattactcctgtgatacagccatgcctcgcatccagaaaagatgggttcttgaagcgtctggaactctggaaccgagaagaagtgcacttgaggacgattttgaggaagaagaggaagacaaggaggaacagcctatggaaattgatgaaccgaatggataatcatcgtggaaggagccttgccagggaacgggatagggactgggaccatgacaggaaacatgaaaggcataacagggacaaagattatgatagagatcgggattatgatagggactatgggagagggcgggaaagacaccgagatagagatcgtgaaagagacagaaaccgggatagggatagagaccgtcaccgcctgcgagatgatgattacaatcgcaacagggatagggacagggagagggatggtagggaaagggagcgccgagacagagaccgtggcaggcacaggagccgctcaaggagcagagatcgacgggacagagaccgtgaagatggagagtaccgcaggaggcgtggtcgtggcagtgtaagtcctcgaggacgtggtgaagacggtggcccaagagaggaacctaagaggaagaaggaaaagaaagagaagggtgaaggaaatgctccggacccgaatgaccctgagatcatagaaatgaacaagctacgggcctcactggggttgaaaccactaaagtagtttacacgagtaatgttcaacttgacctgcatccaaccttttttgtgctggactttttcagcttgatgtaactaaacttttgtattgatgtggttatatattcatcagggcttccatttctgtctgcatttcaatgcatttgttttgtaatattgtggcactattgtggtag

SEQ ID NO: 3558 - DNA, 743 bp, Zea Mays
ccagctgcctctcctaagctatccgccgtcgccgtcgccgtcgccgtcgctctcctctctcctccgagccgctgctccctctcccctgcgcgccgccactgtgggcatctacaccgctgccgctctcctctctcctctgtgccgcagctcttctctctccctctcccctgcgcgccgccactgcgggcaccctgcacgccgccactgcgggcaccctgcacgccgccgctgcgtggccctacacgccaccgctacgggtgccctacgcgccgccgtcattgctccagctcttctctcctctgtttcccagccaatgccgccgctctaactccccaaggcatcgccccgacgacggctcaacgacgccccgtcgacgcctcgcggacgccctgcgccgcagcgggcgctttacgctccatggcaaggtaccggcatctgggccaattcgccccactaggagggaaacaaactgctgcacaacttcccggggactggatctccattggccacagcacccagtggctctggtactccgtgtacgcaacctgcttccattaagaattggtcatcatggcgtgggagctcattgaagttccgggcaacttgaatccctctctcaaagactcttcagttgatgtggtggccgccaagattgatcccaagttagccaatactctcattaggcagttaagccaggtgtgccctttggagaatctgaggcatgtaaagcgtgtacgtcgacg

SEQ ID NO: 3559 - DNA, 1700 bp, Zea Mays
ccagctgcctctcctaagctatccgccgtcgccgtcgccgtcgccgtcgctctcctctctcctccgagccgctgctccctctcccctgcgcgccgccactgtaccggcatctgggccaattcgccccactaggagggaaacaaactgctgcacaacttcccggggactggatctccattggccacagcacccagtggctctggtactccgtgtacgcaacctgcttccattaagaattggtcatcatggcgtgggagctcattgaagttccgggcaacttgaatccctctctcaaagactcttcagttgatgtggtggccgccaagattgatcccaagttagccaatactctcattaggcagttaagccaggtgtgccctttggagaatctgaggcatgtaaagcgtgtacgtcgacgtactgaatgtggtggaaaatctgagttatcaataatcctatgtgtttctactgggtctgaaacttgtaacatacagttctctgaagatctacagaagatagtggatacttatcagctgagtcctttcaccgcaaaagttgccaggtgttgtgctacatcaaaagaggagtgggaggaacagtgcaaactttggccaacatcttaccatcctgcacatgaccttggtattgtccgtggatttcaagaggaggaattaccatcaatatttaattgcatgaaggctgctattcagttatcaaaggcaggcaatgctgcaatcattgttgatccatcaagcatgcaaatagttgcaaaggccactgaccatacacacaagcatgatacggctgaagaagggaacacattttctgaagcgaatgcagatgttacctgcccttggaatacatcgactgatgatgacaacaatctgtcacttccaggatcctttcttcctaaactcaacagtttgaacatggaaatcccatgtataaatccttggggatggatgaaaaaaaggacttgtgagcagaagccatcgccatgggatggctgttctgcatggcatcctctgagacatgctcccatggctgccattgaaaatgctgctgagagggacagaacgatgtttccttcttcgatttcaataaccaagccagattcagatggcagtcccgagaactgctgcgacaatgaaccagcaaaaaggctgaagacggatacaaaagataatgagaaaccggcatctgaatcatctggtggcgacctgtttgagaccagcagaccatatctctgcacagggtttgatatctaccttgtttgggaaccatgcacaatgtgtgcgatggcgcttgtgcatcataggttcaagcgcgtgttctacgccttccccaatcctgtggccggagcactcggtggagtctacaggttgcatggggagaggagtctaaaccatcactataatgtgtttagggtttcagtacctgaggcgtacttgaatgggttgaactgttattcgaaggaatgctgatccaacacctttccgtttttatttagaaaaaaagaggatccaagactgttttccttttttttttatttttggcacaagggcttcatattaggcctaaacttgcccatctgtattattaaatgttttggtaacaaatgtgtttatggatgtaaacgttggtgctatttttttattagtttacttaaatttaatgaaatatgatcggtttcaaacatg

SEQ ID NO: 3560 - DNA, 4286 bp, Zea Mays
aatcggtttttccacttctttaactccaaataaaccaacggaaattgaaaaacaaaagccacttcttcgccagtcctccgcctcccctcctctgctcctccagcgaagcgcacgcacggcgcgcaggctgagcaaggcaaccgaagcgagcgaggtcctttgcttctacccgcggcaacgccccaggcgcgcgcgacgcgtcgagctccggaggccgagggcgagcaccagtgcgggagtggaggagaggaggtctccgctggacgactgcacccccacccactcggggtcagggtccaaagccggatctgccttggggctcgcgcccgcggctggtggaacggactgctggctgacgagggctccgataatcgacggcggcggtggaatgccggtggaacacctgtttttcatttttgatgaggccatgatatatgttccatctgttctggatggaatttgactgcattctactgtctctaaaagaagggtaccaggcttaagaaaccagaaaaaatgccaccgtcaccctcaccgaggacatcaaggtctcctgcacaggagacttatcaaaagaggacaaacagtttcagaaatgtgcttcctgcaaaatcaaaggatgatgaactcgctttgttctctgatatgcagaaagttgagacggacaacttcttactggaaccgtcagtggattttgatgattcaatgaaaaaattgagatatttcccggaagtaaaacttggtgtcaacattcctgcccatggagaaagccatgaattgcttaacacagacggcgataaaaatgattatgagtggttattaactcctcctgaaactccactttttcgatctttggatgacgaagaaaaccaatccatcactcaggtttctaggggcagagctcagagcaagcctatacaaatttcaagatcatccatggtagataataatcaaagagctagtagaagcagtgcaagctcaagtaggcttagcccatcgccatgctctatgggaaggacaagatcatctagttcagcttctcgctctagtccaccacttgctgaaacacaaacaccatcacgaagattgtcaacccctccgattgctaagacattaacacctcctcgaaggtctccaagtcctgtctcaagaaggatgagtactggttcaagtggcccaactttgaatggaacaagaggagcttcaccagtgaaatctaatcacaggtcttcttcaccaaagctgcatggatggcaatcaaatgttcctggtttctctttcgatgcgcctttgaaccttcgcacatctctaactgatcgtccagtatgccggtcaaggggtggatcgccttcatcttttagtggactagaaaagggttcaagaggtagaagactgtcaatgtctcccactccacctagaagagccagttcatctcacagcattgaacgggaccgaatgagctcttatagcaaagcttctgcaacatcatctggtgaggatgatctggagtctatgcagtctgtaccaattagctactccagtagcccagttgtgaaaaagagcttggttgtgatgaaaaccagaaccattgcatcatcaaagaatctgtccaaaaaattgacacctagttctgtcccaaagcggtcatttgactctgcactttggttaatggatcatcgcaaagctccacaagataggtttcggccacttctatcaggtgcccctgccaacacatttggtgctgggaatggaaatgatgtgcacaaacctatgttctcacacaattcttctttgacaactagcagcactgcaagctcttaccatggtgccacttttggctcttatatgcatggcagccaagaacaacatgattttgctggtgaatgggaagcagatgatatttctcagggtcatgaggatatatttatgtttgataaattggatgagctaaatgaagacattcattacaagagcatggaatctacggataattcactggtaatagtaaaacatctagtaagtggcagacaggacttggaaggaagcagaagacctaatcagtccttatgccattctactgatatttctcatgttagctttaaggctacttgctctagatgtgggaagtttttcgatgcgatggatgttgatgaagagggtgtctattgtgatgcatgtgctacaaaggatgggaatatcctcaccagtcctattgtacaaactataggagaagaaaaccaacaatatggtaaaactgcaaatttgaaaccttgcatcgcatctgattctcctgtacccacagattgtgaaatctatagcaaagaagtatctcttgatcatcaactagtgaacaatgaatcttacgctgattgcctggaccaggcccctccaattcactcaatggggcacacacctcaggaaatgctactggggcaggaggaaaacattgacgctgagcatagaaataaacatgttggggattcgttaggaaatacaaacgataattcctttcatcgatctagtgtggatgaatgtgaacaaacagaaccaacatctgtagggcaggacctttttatcatagaccaaatgaataaccataatcgtggactatcccaatgtaatgaaaatgtctctgaatctgtgacctgtgacaattctcatcaactgggatcaactacatatcagaaccctaagcttgaaactaccgaggatactgggatatcagtattgttagtccctaagcccaacagtaataaatggccaaatatgctctgttcagaaccctattatgcaagagatggtgtcagtatgatgaagcgtagctttggactgggcagctcttcagctgcttcttccagtgatcttgggtcttcaagacagtcaatcatatgttttgagcgccttaggagtggtaagaagggtgactttgagaagtcccagataagcagtactattagttgtcaaagcattgcttctgtgtcagatatgtcaatttgtagctcttcagcttcactttgccctcagagtgatgcagtaggagattcctgtttcccaattgacactttggaaagcggcacttcaggaactctgatctcttctcaagaaaatgatgatgctttttgtaaggatactttgccaagtgctatggaatgtccgtcttcttcacagtttattgctgatgatgacagtcccggtgacatgaaaatccagagctacttaagtgaggtaggatatacaacagttgagaaccatagtgcttgcagaatgactgacatggattgtaccagtacaaatatgtattctttagatactgaaatgccaagtgataccctagaatcatcaggcccagtggaaagtagcatgcctgaaactgaagaggatgcttacactatcagtcagtgtaataaaggtagtgctccagaacattcaagtgatgagaataactttgataatattcaaatgcagtctgaaatagttcagggttcagcggaggaaaacagattggatgattgttgcatgtctgctatctcggaggaggacgtattgatttctggacaagaagatgacataaggaatcttcccaatgatgaattatgtgcggaggtagaaggaccaaggaaacaaatccagagatgttttacattggaagaagctgctgatacaattctcttctgtagttccattgtccacgaccttgcatacaaggctgcgactattgcgttggaaaacaagaaggaaccaaagtttgtggactctattcgtccaactgttgcaattgttagaggatcttttgctaaggaagagagtttaccaaagctgcctcacagacgaaccccaaaccgtaaggtcaaaaggaaaagattggaaggcgaaacaactacaacggaaactacagagaaagacgttgtcgcgaatgactccccccctgtatgttctgcatcgggtattacaaggaattccgataatatgaagccgccaaagctggagtccaagtgcaactgtataattatgtaactcggtcacatccaagattgaaattcctacatgcttggttaaccccgtcatcagcagcgatggagttcagcacaatggatcttccgctagattattttgcaaaggtgcatttgctgtgttttaggtgacagaatgcactgccagctgctattcttttgtaaagtcttttcttctcttttctgcttgtaatgaggtccttgcggtttgtccaaagttgtgctgatagcctatttacttgcaacgcacgtggctgcttgtgaaagtgatggtcg

SEQ ID NO: 3561 - DNA, 1004 bp, Zea Mays
ccacgcgtttctttaccctaacctttccactgctccagcgaaggcactcagcctccgccatttcttcatctccaatctccatccttccatcttccgctccctcccctgcttgcgctcggcacgcaggcgacctcggcggcgctcgggctcggtctctcagcgacggcgtcagcagattcccctcctgcctctcgccagtcccctcgccactggtcctctgcgaaccggccggtgactctgcgaaactattccagcacaggtacccaagtatggcggcaagacgcaatgttcggtactcgcctcttccttcagaggacggggatgacagcaattttattaaagaagatgttgacctccgatacacttacactccgaaatcgtcacatggagggtgatagttctcaggcatatggtctcttgttcctgggtttcctttcctttcttcctggtttctacgagactcgagttgcttactattcatggcggggagcaccagggtacacttttgcatccataccagattattagcctttcagtttgcgctgctgatgcagtaaggataatgaacaagcaaacaacttcaaactttccttgggaaccaattttagtgataaaagagttaagcatgcatatgtagtggctcaaatgattgttgtgtttataggatgttattgcttcgtcggtcagtaaaagaataattccttgtgatattgtgtaagagcaaaggttgattttgcaatttcttggtatttccttgtcaaatataacagaaattagtgccaccagtatgtgtttgtgtgatggtatctgttgatgaagatagactatgtactccatttggggctttggagtatgtatataatgtggctgcaccagaaccaagtccaagcccttttttaaggggggtggtgtgcatacttctgtcatgcttagattgttgtgtgcaatactggattgaagagaagggccagtaacggatcacgtagtctagaattcaaatgcaa

SEQ ID NO: 3562 - DNA, 1295 bp, Zea Mays
ctcatcatgccgcatcgtcccacgcgtccctccgtccgtggtctcaccggcgaccccctcagtgcagcaccttgcccggccggctgcccctccgccatgccttggccccatcgtcgcccgaaccgccaccgtgccttggccccaggagccgtcgtgcccgtgtgcagctgtgctcctagtccgtcgtcgtgccgctgtgcctggctcgcgcctgcctgtattcgccaaccgctacggcgaggactagtggttgcttgagatcagcgccggtggcctcgtgtgaaggatgtcgatgccaaatggattggctaggcgggcgctaacctaccagactgatacactattgctcttattattaggcactagcatagctaaagatttagtggtcaggaacgatcgtggatgggggatgctgaacctggtagctggccttctagagagcacaactacaattatcagcggctctaggcaaccgtttgtcatggagacagtgaaagctgacgatgctgcaaaactgggtttgatatcaggtaaacatctgctattcgacacttctatacaggaggtctgcttttggaaacatcttcagtgctaatttgagacaagctcctgcaaggcaagctgcactgggcacagggataccaaacactgctgtttgtgctttttatgattgaggaatacttgaagaagcgtacttgtggtctttatcttgtgctgagatgcatgttttttacctaccgaacattagacccctccagctaccttgctgacacatgaacgagaagacgggttagactttgtcgaaaccctcttcgctagtggaggtatcgaccatcactcgtcactgtaccccgatggtgatcgacgatcgtgagcttccatattatgtgttgtgatacttgagacttttattatgactatgtatgagatattgtctcttattagtacaggatgagatgtgtgttattatgactatggatgagacttttgtgatgtaattgacgagactatggatttaaatattgttatgtgattgtgtatgagatgttttatgtgaaaatatgttgtgctatatagtattgatatatttgttatgttgtggaatatggtgtaaaataaaaataaacaacatttgtaatgctggtcaaattaacttcctagaggccaactgggctgtaggaagttagccagctaactttctaggggctatagtcagccataggaagttagtcgtaggaagttagtcagctaacagcgtgaagctactaacttccgagaacctaccaacttccgag

SEQ ID NO: 3563 - DNA, 1543 bp, Zea Mays
ttaacatgtggcaggcgctaataaaatcagaagataaagtggcaggcgcatgcggcatggtatattggtatcgatcctgccaagtgccgtagcccgcagccacccagagcctcttatcggcgttcccttcgttctactccgatcccctctccaagcggcacatctacatccttccagcgcaccaaatgctttggattgcgttgcttagcactaaagactagatgcccttatgcgattatatatgctcaaaagcctgtggtgatagctcaagccacatgaatgtattagatcaggtgaaagggcaagagtttcgatcagtgggcaggccgcaggcgcaaacaaacagttgacagggtagactcaaggcaatagtgaggaagtggccgatctgttgaggccgatggaggcagatagcatggtggccatgggctgcggaggtttctactggcagtcgcctccgcgcttcctccttgaacccctcgacctagccgacatcgtcgacagcagcatgtacgtgccgacgaacgaggctgatgagcccgtatccgggctctgctcatcgaaccggccggcggaggattactccagttcggccgagggcgccaactcctgttccgcggcggtggttccgtcgccgccgccgcctccgggcgtgacgacgacgacgacgaggaacatggacatggagaggacccgccgcaggaagctcaacgagaggctctacgcgctccggagcgtcgtgcccaacatcaccaagatggacaaggcgtccatagtcagggacgccatcgcccacatcgagcatctgcaggagcaggagcgccgactgctcgccgagatatccgttctccagtcttctgacgacggcaccgccgccgccgccgccgtcaagacggaggacgctgccgccactgggggtgctgcgtacgacgtcgacagcgtcccctggaggaagaagccgagggcggtgccactgccgtccgtgtatttcaccgacaacccgacgagctccatctcgtcatctccgccagtccgaatcctggaggtgcaggtctcgcaggcaggggagagggtggcggtggtgagcctctggtgcagcaggggcagggacgccgtgggcaagatttgcctcgcactggagccgctgcgcctccgggtcgtcacggccaccatcaccgcgcgcggcgacactgtcttccacacactgttcgtggagacaggagaaacaggtggcgctcggctaaaggaggcgatactggctgctctcgctcggctcaacgtcctcgctaacgctgaccaagtcgtccatgagttactgggatgattgatgcggtggcatcttggacagcaacacctggtgttgttgtcgttgtcagcactctcgactgtccgattcaataatgatgtacctcaggaatgtttgaatatgatatcattgccatttcttggcctgaagtacaataggagtcacattatatttacatatattacctccattcacaaatatataatactacttattttttctaaaactttaaccact

SEQ ID NO: 3564 - DNA, 1269 bp, Zea Mays
cagtccgtcagtgtggtggtcagagagaaaagatgaaaaaaaagaataattcattggagccgcacgtctccttccggccttccccgacgatgccgctgccgccgggaggaacggatggatcccattggcttgccaccaccactgcccgcttcggttcctattcccgctcgctacggccccagtcgcgctcctcaccggccggcaccaccccgcccgccctcgccttttgcctgccgaggtaatctggagacctgcgatcccctcgcgcgcagacacgacgcgctttcgtttctgtcccgtggtgatttaggcctggcattctagcaatgcagaagaagtgatcttataatcataaaagataacaatggggatatccaaggtgaccggcatctctgcgacagcttttcttgtcacatctgttggtctgtaccagctcggcatgagaattattgtgcttcctttcctagccaccagtattgttgcttctgttgtcactgttgcatcccatgatgccatcaacctaccgtggatcctggggaagaactcagtgggaaggtttcctctttggtcagttatactgtttggtcctttcttgacgcttgctcggacatatgcaatggttaagagatacatgaggaaagagtccgtgtatgacaagattgtggatggcctatatcttggaggatggccctttctcttgaaacatttgccccctggaaacccatctgtcatagactgcacttgtgagcttccaagaatttccttcgttccagcagacgagtatctttgtcttgcaacttgggataccagagctccaacaccataccaaattgaaaaagctgcacgttgggcttgtggaaagagatctgaggggaagccggtttatgtccattgcgcatttggtcatggaagaagtgcttgtgtcgtgtgtgcaattctagtagcgctgggcattgctgagaactggaaagaggctgagaacatcatccgtgaaagaagaaagataaaaatgaacgcccttcacaggaaaaccttggaagagtggtccaaacaacgggattctcagaaaaaggctaagtagttgtaagtgtaacattttccttagagataaacttgtttgtggtgttaaagcttgtttgaaacatcatacaatggcatatctacttaggccaagtgtaatgtctgtgaaattattattattattttctcggtgtttctacctttaaacatatttgatttatatccagatttggtactatttttttgtcc

SEQ ID NO: 3565 - DNA, 1385 bp, Zea Mays
attactcggccacgacttgccgactacgatgccagcgccaagcctccgccgcccagctaaaaatcccccaggcgttcctgagcacccgtttatcatcacatgaccggagtcggccagaatttgccgtagctctcgcccccgctcgccgtgcgcttctcgtcccattcccccgggatcgtagattctcgagctgagctgagctgagctgagctgagcgatggatcgcgagctcagccccaggggcaatgctccagggagagggagcggcggcgcgtcgtcatcgaagcacaagaacggcggcggcggcaagaagccgatcaaggtgctttacatcgccaaccccatgcgcgtccagaccagcgccgagggtttccgcgccctcgtgcaggagctcaccggccaacacgccgatccctccaagtacagccccggcgaccttgactccggcgctgccgcacagggtctgagccccagggccagggtcgcggacgtttcgtcggaaaccatcgtcgcaagccacagccctggcagtaaggccgcgccgcacggaggggactactacgacgtcgaggaagacgaagatgacgtcttcaggtcgcctcacatgctgctggagaacaattatacggtgttctcgccgccgacgctactatatgaccatcacccgcacagcaagaccttggctccgccgccaccgcctagggactgagccctagggctaagggtgcggacgtgtcatcgaaaaccatcatcgcaagccccaggcctagcaataaggtcgtgccacacggtagggactactacgaggaggaagatgacgatagcggcttcaggtcccaactgctgttggaaaacaaccatacaatgttctcgccaccgacgctactctacaactatcattcgcacaacaaggctacttctgaatcggaggctgggttcgcagcggagcatgacaatttctggtccaaatgaagctgaacaagttaatacgactatagctacgaatggtttcagtgaggagcatagcacaagacaacactggtacaagagactataagcatgaatacgaagatggctacgtacggcaatggtggtgaaggctacgacgaaaggattgcggcgatattacggttgatgaatggcatgatgtataattttcttgatggacaaaaggatatatacacctccgatctgttttgtccattgagcagcaatctatgtaatcttatgcctaatgaacaggctaaggatgttttagacacaactactctagttggcacaatgttggattcggaagggaaacattgtaaaacgttggttgcttccttgtgtacatgttgcgcgcagcattatattatatgtctattgtttgtcatggtggcata

SEQ ID NO: 3566 - DNA, 1379 bp, Zea Mays
ctgtcacctaaaatctaggatatattattcccccaaaacaaacactaaccggccggcccaattctcacgcgctcgccgcctaggagcattcacgttggtggcgggcggtggctcggttcctctcctccaccgcacctccaagaatccacctccacgactaagctgacggctcggcggcgccatggcggttcaccggctccaaccttccctctctggcctacagtgctccaccgcccggtcgccagtgctcctccatgggccacggctgacgggtgcacgcaccggcaggagaggtggatttggtggacctagattcgatgtgcagagagcgacttggaggttatttttccagcacttgacattcgagtgaaaaatgtcgcagggacatattctcttgaacataaaggagaaaattatctcttcgcacatcagacaaggcttctactctttcagaagaaagtcattttcaagagaatcttgaacaaaatgaccagatgtttaggcctggttggaaggacatttttcgaatgaatcagagtgagctcgaggctgagattcgaaaaggtctctcgagattctactcttgatccaaggaggaaggcctatctgatccaaaatctcatgaccagccgttggatagctgctcagcagaaatcaccacaaccaagcgtcgaaggacataatggatgtacacgacgacctggatgtgttccttcgtaccgagacccagggaaacaaatatttggctgtgagcattacaaaagaaactgcaagcttgttgctgcatgctgcaataagctattcacttgcatattctgtcacgataaagttagtgaccatacaatggacaggtaactcaagaggtccacttattgactcttatgaccatgtaattggtgttaatacaactacattaacacgtaaaggttggtagatctggaaggtcttgatggtctaatacctgtctatgagtacgaaagaaaaggcgggagaagtcggtctctgcagcatcgcgcgtgaaaaaaaatcagccaattccatgagcattgatgttgtcatgacttcaaggagagaccatgctaagaataatgcattatgacatttgtcaggcttacatatcgattgtttgatatggatagatgtataggtttatgaccaatccagttcaaagcaatttgagtacaaaagaaataaggagcaggaaagctctgtacatcttgcattttgctgtttttttgtcgaagtttcaatgtctgtcgcgtgacaaaatatagttgtaatttatattttggcatgcacgaaacatgtgtatttattcatttttgaacgaaattttacgtcaaatcctctattgcgttatatacgaaattttaacgcgg

SEQ ID NO: 3567 - DNA, 1392 bp, Zea Mays
ctgtcacctaaaatctaggatatattattcccccaaaacaaacactaaccggccggcccaattctcacgcgctcgccgcctaggagcattcacgttggtggcgggcggtggctcggttcctctcctccaccgcacctccaagaatccacctccacgactaagctgacggctcggcggcgccatggcggttcaccggctccaaccttccctctctggcctacagtgctccaccgcccggtcgccagtgctcctccatgggccacggctgacgggtgcacgcaccgatggttggtgcaggcaggagaggtggatttggtggacctagattcgatgtgcagagagcgacttggaggttatttttccagcacttgacattcgagtgaaaaatgtcgcagggacatattctcttgaacataaaggagaaaattatctcttcgcacatcagacaaggcttctactctttcagaagaaagtcattttcaagagaatcttgaacaaaatgaccagatgtttaggcctggttggaaggacatttttcgaatgaatcagagtgagctcgaggctgagattcgaaaaggtctctcgagattctactcttgatccaaggaggaaggcctatctgatccaaaatctcatgaccagccgttggatagctgctcagcagaaatcaccacaaccaagcgtcgaaggacataatggatgtacacgacgacctggatgtgttccttcgtaccgagacccagggaaacaaatatttggctgtgagcattacaaaagaaactgcaagcttgttgctgcatgctgcaataagctattcacttgcatattctgtcacgataaagttagtgaccatacaatggacaggtaactcaagaggtccacttattgactcttatgaccatgtaattggtgttaatacaactacattaacacgtaaaggttggtagatctggaaggtcttgatggtctaatacctgtctatgagtacgaaagaaaaggcgggagaagtcggtctctgcagcatcgcgcgtgaaaaaaaatcagccaattccatgagcattgatgttgtcatgacttcaaggagagaccatgctaagaataatgcattatgacatttgtcaggcttacatatcgattgtttgatatggatagatgtataggtttatgaccaatccagttcaaagcaatttgagtacaaaagaaataaggagcaggaaagctctgtacatcttgcattttgctgtttttttgtcgaagtttcaatgtctgtcgcgtgacaaaatatagttgtaatttatattttggcatgcacgaaacatgtgtatttattcatttttgaacgaaattttacgtcaaatcctctattgcgttatatacgaaattttaacgcgg

SEQ ID NO: 3568 - DNA, 1494 bp, Zea Mays
ctgtcacctaaaatctaggatatattattcccccaaaacaaacactaaccggccggcccaattctcacgcgctcgccgcctaggagcattcacgttggtggcgggcggtggctcggttcctctcctccaccgcacctccaagaatccacctccacgactaagctgacggctcggcggcgccatggcggttcaccggctccaaccttccctctctggcctacagtgctccaccgcccggtcgccagtgctcctccatgggccacggctgacgggtgcacgcaccgatggttggtgcaggcaggagaggtggatttggtggacctagattcgatgtgcagagagcgacttggaggtggctgacatcttcaagcactgcaacatgcagttacaactactgttggccatacagggaaatgctgggcctattataccaattgttcaaagcatggaccttgttatttttccagcacttgacattcgagtgaaaaatgtcgcagggacatattctcttgaacataaaggagaaaattatctcttcgcacatcagacaaggcttctactctttcagaagaaagtcattttcaagagaatcttgaacaaaatgaccagatgtttaggcctggttggaaggacatttttcgaatgaatcagagtgagctcgaggctgagattcgaaaaggtctctcgagattctactcttgatccaaggaggaaggcctatctgatccaaaatctcatgaccagccgttggatagctgctcagcagaaatcaccacaaccaagcgtcgaaggacataatggatgtacacgacgacctggatgtgttccttcgtaccgagacccagggaaacaaatatttggctgtgagcattacaaaagaaactgcaagcttgttgctgcatgctgcaataagctattcacttgcatattctgtcacgataaagttagtgaccatacaatggacaggtaactcaagaggtccacttattgactcttatgaccatgtaattggtgttaatacaactacattaacacgtaaaggttggtagatctggaaggtcttgatggtctaatacctgtctatgagtacgaaagaaaaggcgggagaagtcggtctctgcagcatcgcgcgtgaaaaaaaatcagccaattccatgagcattgatgttgtcatgacttcaaggagagaccatgctaagaataatgcattatgacatttgtcaggcttacatatcgattgtttgatatggatagatgtataggtttatgaccaatccagttcaaagcaatttgagtacaaaagaaataaggagcaggaaagctctgtacatcttgcattttgctgtttttttgtcgaagtttcaatgtctgtcgcgtgacaaaatatagttgtaatttatattttggcatgcacgaaacatgtgtatttattcatttttgaacgaaattttacgtcaaatcctctattgcgttatatacgaaattttaacgcgg

SEQ ID NO: 3569 - DNA, 2274 bp, Zea Mays
ctgtcacctaaaatctaggatatattattcccccaaaacaaacactaaccggccggcccaattctcacgcgctcgccgcctaggagcattcacgttggtggcgggcggtggctcggttcctctcctccaccgcacctccaagaatccacctccacgactaagctgacggctcggcggcgccatggcggttcaccggctccaaccttccctctctggcctacagtgctccaccgcccggtcgccagtgctcctccatgggccacggctgacgggtgcacgcaccggtatgcatcccttgctgctctaattcccgacgctctagctcgtgtaccagatgtgcagactgtcgcctagccctgctccggcgtgaaggacttctgcttctgcccctgcgcatcccgcccttggtcgcgcacctcggcatgttcctcggcccgacggctactgtcttgaggcatacggtggccgcccacctcgtacccagtcaccagatctcaagttccacctcaaaatccagatcaagtgaatgccatgtttcatccttggtccaatcggttcttactggaatttgttggcaggcaacgagcacccaccaccgatggttggtgcaggcaggagaggtggatttggtggacctagattcgatgtgcagagagcgacttggaggtggctgacatcttcaagcactgcaacatgcagttacaactactgttggccatacagggaaatgctgggcctattataccaattgttcaaagcatggaccttgttatttttccagcacttgacattcgagtgaaaaatgtcgcagggacatattctcttgaacataaaggagaaaattatctcttcgcacatcagacaaggcttctactctttcagaagaaagtcattttcaagagaatcttgaacaaaatgaccagatgtttaggcctggttggaaggacatttttcgaatgaatcagagtgagctcgaggctgagattcgaaaaggtctctcgagattctactcttgatccaaggaggaaggcctatctgatccaaaatctcatgaccagccgttggatagctgctcagcagaaatcaccacaaccaagcgtcgaaggacataatggatgtacacgacgacctggatgtgttccttcgtaccgagacccagggaaacaaatatttggctgtgagcattacaaaagaaactgcaagcttgttgctgcatgctgcaataagctattcacttgcatattctgtcacgataaagttagtgaccatacaatggacaggtatcttcaccacaaccattcattttaccgtccacacctttcctgctgagggatgctttcaaggatttcattttaacatcgaaccaatatcaattaagcatggcattttatttggaaatagatgtttgtggtggtgccatggacctgtgcgtcccttgtgaaatgaattgattttttgtcattgaattttctaactgaagctttttcattcgtttgattcacttgagctcccttaagttgtattgtattatttaatcataaatgccatccttcctcttatagttatataatcaaatattagttttaatcctatctgcatggtttacaatgtattgggttgtgtcattgtgtgaagaatgtttggtggttagtctgaccacatgtgttagctgaatatgagtgccgagcagtagcatgcatataagttccactgcattcaatatttacatttttttcttatttccaggtaactcaagaggtccacttattgactcttatgaccatgtaattggtgttaatacaactacattaacacgtaaaggttggtagatctggaaggtcttgatggtctaatacctgtctatgagtacgaaagaaaaggcgggagaagtcggtctctgcagcatcgcgcgtgaaaaaaaatcagccaattccatgagcattgatgttgtcatgacttcaaggagagaccatgctaagaataatgcattatgacatttgtcaggcttacatatcgattgtttgatatggatagatgtataggtttatgaccaatccagttcaaagcaatttgagtacaaaagaaataaggagcaggaaagctctgtacatcttgcattttgctgtttttttgtcgaagtttcaatgtctgtcgcgtgacaaaatatagttgtaatttatattttggcatgcacgaaacatgtgtatttattcatttttgaacgaaattttacgtcaaatcctctattgcgttatatacgaaattttaacgcgg

SEQ ID NO: 3570 - DNA, 2846 bp, Zea Mays
gttgcagctgtttggactgctgcagctgcaatccatagagagaaaaatactgtagaagccgcagccgcagccggattgcagccgcagcaagccgcagcgaacaagctggtaatcaccacctgtcgtcgatttagcactcgtcagaaatcattagccagctagctgtctagacaccgccttccccgcgaccggctgcacccggtcacttcttctccccacgcagtcacctccccgcaaaccccacgaggaaaaagtttctttttttctctgttaaacacgcgcatcgaagcaagccagcagcaacaaaagagacgagccttttcgctcgccgctaccaccacctcgttgtctcgcctccgcctcggcctcagcacgcgcgcgggatctcgcgctcgctcgcgcaccgaggagcgcgcacccacccgcagggttcggggcggggtgatccggtggtgatggcgagccggatcaaggaggacgagaggcacgagaagatcatccgcggcctgctgaagctgcccgccaacaagcgctgcatcaactgcaataatttgggaccacaatatgtctgcacaaatttctggacctttgtttgtaccaattgcagtggatcacatcgggagtttacacatcgagtaaaatctgtttccatggccaaatttaccgcacaagaagttgctgcccttcaagaaggggggaatgagcgtgctagagaagtatttttcaaggaatgggatcctcaacgaaatggataccctgacagcagatacacaggagaaaggagtactgataggccaccaagggcaaaggatgacaaggatgagtatagtgaaaatagaagatctgatggaaattggggtggttcgagaagtccgccaaatggaagttactctgatcgtcagaattatagcggacggagtgatgacagaaattccagatattcctatggggaccgtagtcctggctatgaccaaaatgactataagagaagtcctcgctactttgaggttggtgataatagatctggaaaaataactccaattcaagggtttgaagacaggaggttttcagagcccagaaagcgagatagtgggtctccagacttccagaaagaagctgatggttctagtcctgttgtacggccagtgagggatatattgggtgacaacgctcctcaacttcgggtcggtgaaccttcaaagccagctactgagcctgcaaagccaactgtagtcagaccaattgatcctccaaagccaagtgtagtcagaccaattgatcctccgaagccaaatggaaccagggcaattgatcctccaccactgacaaagacaatatctagtgccagcagcattggttctgcagaagggacatcggaacagacaaaggtggcaagtgcagtgagtttgattgatttcagtgcagatcctgaacctgagtccacagcaccaccacagccggcccctatgacacaacagcctccagttaatgcagtagcaccacagcctgttcttgaacaaaggaaaagtgctccttctgtcagtggtggtgattgggcatcttttgatgcttttggccaacaacaaacacctcaaacaagcagcagtgtaaatccccttgagtctgcacttgcacagctgtcattctctgaagcaccctctgcaccaaatgtgtcagcttatcctgtttctctggatcccactttgaaagcaaatgatggaggatattcatctgtgctagatcagtcacattccttgtttgatgcaccctttggaatctcaggcaaccaggcctcaacagtaatgtctggccaagaaacatcggttcaacaatcttctatagctgcccctacggctggacttccatctcaagctactgcaaatcaacaaggaaccagtggtattcaaggagcagcttcttctactgacagtaaattcagtggcaggaaagaacttccagcggatatctttactgcactatatccaccatcaactccaatgatgcctggttggcagagagccccccattttggaatgggatacgccatgcaatatccacctggagtgttccagggaatgcaagcatatcctcagcctacatatcagcaacctgtatattcgcaacatgcatattcccacccccaacctgtgaaagcttcaaacccttttgatcttgggaatgggccagctccaactcaagctcacatgcccccatctggaccaccaggagtattagcaggcccagctccccaaaccttaattagcaactctagttttggtgttcctccacagcagcctcaccagctctatcaatcagccgcacatccaagccatttcatgatgcagcaagttccgaacagcatgcccatgcccgagcaacaacctaatagcatgcttgtaacgcaacaaggtttgggatacctccagccaaacacccccccaccttcatacggctccgttgggggtagtaatccattcgggtaaaagaagtgtgggaacacctgctctttcatctctagactaagggtctgcagcactcagcgggacagacatgcatcgaagccctcgagagaatgtgttccatacaaccaggtggtgtattctgtcggctgtgatatgttgtacaacttgtttccaagggcgtcatcatcgaatgtaactctgttttagagggcctaagctgctttcagcctcactccttgtatattgtgtctgcttgaattgcatagtatgtatattttgtgatccttcgttgtccctgtcactatcactagacatagagcatttagcgataaaatgactgggcttaccacatttgcgtcgatgggaagcctacttgatgtagac

SEQ ID NO: 3571 - DNA, 1645 bp, Zea Mays
aacaatcaaaaatccagctggccccaaatggctggttcttggctactccacctgtcgccgtttcgtagcgctttgaaaattttcccttctcaagagcacatgggaaacagtacacatgaacgctcaaaagccgcagagaaatttcggaggccagtagtattcgtatcgaaatccgataggtcctctctgtggctgaaacctggaagtaaccctcgaccgttcgaacacaacacagctgtataaaaaaaaagggctcctttgctatctcctccacgctagatcgatgatcaggaacgtacaaagggttcagttcagttttcagtgagtcggcatatgggcaactgcagcagcagcagcggcttcttctctcttccgaaacggggaagcaagctactcaaactcaacaatggcatggtctcggtcgacgatgagggtgggactcacgaagggataaagaccattccggtgcagagagcctgcgagttcaccacgaactccgtgctctgcgtctgcatcgtcacttggaacatgaacagcaagatgtccgcggaagatgtggcgaagctggtgagctccgacaggaagttcgatctgctggtcgtcgggctgcaggaggcgccgaagccagacgtttcaagggtcctgcaggaggcgttggcggggacacacgtgtaaggagccagtagagctgttgggtcagaagagcatgcagtctctccggatgcttcttttcggttcaaggagctcggagaagtacatcagagagatgaaggtggacaaacacgcggttgggggttgcgggggtatcatcgggaggaagaaaggagcggtggccatgtacatcaacttcagcgggatccggatggtcttcgtgtcctgccatcttgcagctcacgagcacaaggtggagaagaggaacgcggagttccagcacatctcgcagtcgctcttcgccaggtacggcgcgccgacgccgtacgcgcagtctgccgacataacggtgtggctgggcgacctcaactacaggctccaagggataagctcgacaccggcgaggaagatgatcgaggagaaccgccagagcaagctaagaggcagagaccagctgctgcaagaggccgagaagggccaggtgttcagcggctactgcgaggggacgctgtcgtttaagcccacgtacaagtacgacgtcgggggcagcgtctacgacaccagctacaaggtacgagtgccttcgtggacggacaggatactgttcaaggttggccagtcttcaggcctggatgcagtgctgagctcgtacgaatcactcgactgtgtccggagctccgaccacaagcctgtgaaggcgcatctctgtctcaaagtacgcagtgatggtgatgctgactgatatccagtactggcggttacttctgccgattaacatgacatgctacgatgaaaatgttctagtttggaatggtgattatactctagtatattttataacatggcgctcgatcttagcttgtgggccaattgtttcagaacgtgccattctttcttattctattttctccccttttgtttctccttgtacaactatggctatctatactacttattaaggctctaagggtagcctgccttttttcgttctgcc

SEQ ID NO: 3572 - DNA, 2091 bp, Zea Mays
gcctaaccattcccggctcccggcagagacggccgctcgcctccagaagagcaacccaagtcgccgagagcgactcccacacgacccacctaccccgccgccgccgccgccgcatccccctcgatcccgtctggcgatcgggggctcccagacacatcacagatacacaccacgctaagccaaatcgagcaacgcctatcatcatattataatttcccctcattcatctcacagtcccaggcctcccctccctcctccccgtcgccaaccaacctccaacccccagccgatcgcgtcggagatgctgggcgtcgcgcggaggcggctcggatccggatgcgtgctcgcccagctggcgcaggccctccgccccgccgccgctcccgccaggacctactccgccgcggccaaggagataactgtacgggaagcattgaataccgcattagatgaagaaatgtcggcagacccttctgttttcttgatgggagaagaggttggcgagtaccaaggtgcatacaagatatccaagggtttgcttgacaagtatggccccgatagggttctcgatactccgatcactgaggcgggcttcactggcattggtgttggtgccgcttaccatggtcttcgacctattgtagagttcatgacatttaacttttcgatgcaggcaattgatcacataattaattcagctgccaagtcgaactacatgtctgctgggcagatatctgttcctattgtctttaggggtccaaatggtgctgctgctggagttggtgcccaacactcacaggtttttgcacaaagtttcctctacatgggtgctctgttgctgctgttattctttagaggacaaattgttatgccacatgatttaattttctgaaagtcttgtggtcggacatacattgacagaggatagatcaattgtaggaataaacagtttgttacatgagttatttatcttcatactattatagtttgtcgaaatgttctgaaaaatggatttaaaatgtaaatgtgtttactgaaagaggtgtcagctttaggtcgcattaaaatcatgcagtgcatatcatctcatggacattatagtcttgtaaatattctcagataggtattttgttgtactacgatggaattactaactgccttagtatgcagtgctatgcagcttggtatgcacatgttcccggattgaaagttctagctccatattctgcagaagatgctcgaggtttgctgaaagcagcaatcagggatccagatcctgttgtgttccttgaaaatgaacttctttatggtgaatcatttcctgtatctgctgaggtacttgattctagcttctgccttccgattggaaaggctaagatagagcgacaagggaaagatgtcactatcactgcattctccaaaatggtgggatatgcccttcaggccgctgatatactggccaaggaaggtatcagtgccgaggtaatcaatcttcgctcaattagaccgctggatagagctactattaatgcatctgtgaggaaaaccaatagattggtaaccgtagaagaaggcttccctcaacatgggattggtgcggaaatatgcatgtctgttgtagaggacagctttgagtatcttgatgcaccagtcgagaggattgctggagctgatgtgcccatgccgtacgctgccaaccttgagaggatggctgttccacaggtcgatgacatcgtccgggcagccaagcgtgcttgctacagggcagcagtaccgatggcagcaaccgcctagtccagcagaaccctgcatgttgcatttctttgtctaattttaatgtccgtgctgcagaaagacgtgtcacataatggtgtgacgagtacccactgccgctgcaactcaactatagcatgagctgagtttttgtagagccaccgagagatttgcagcagagcctctggagatgagaattttacttgtggcgagatgttgtgagtaacttgtattcagaagggggaactctcaagagatcctcaagtcgtgattccagttgcggctttcttgatagtaacgtactccctctgtttttta

SEQ ID NO: 3573 - DNA, 2659 bp, Zea Mays
atcgctccagttcgcgctcatggcccccactgctgtggatcccggtcccagcgaccaccttctagcgccggcgccggctgccatggctggaggaggggatggcggtgatggacagatggaggtggtgttcaatgtgagcagcagcgacaccgactccgatgacctcggcgccggtggtggaaagaggtcgcggcccgtggcggggcaaggtggtggcagggatcgagaggacaagaaggccagaatcttggccgctgccgccacggtcccagccggattcctagagccgctttcgccggtgaggttactccccccgccggcgccgggaaggagcgtgacgaagcagttctggaaggccggagactacgtcggcaagccggatcacctgcttgccgtagtggcggctcagcattctgattctggaatggatcacgttcgtgtgcatcccaaatttctacattccaacgcgacaagccacaagtgggcactaggagctttcgccgagctgcttgacaactctcttgatgaagttgtgcatggagcgacatatgtgaacattgacatgatagaaagtaagaaggatggaactccaatgctgcttgttcaagacaatggtggggggatgaacccagataagatgcgtcattgtatgtccttgggttattctgcgaagagcaaagtcaagaataccattggacaatatggaaatggttttaagacaagtacgatgagacttggagctgatgtcttagtgttttcatgtagtcgtggtattgaaggaacaaggcctacacaaagcgttgggatgctatcatacaccttcctaaggagcaccaacagagatgatatcattgttcctatgattgactatgaaaaagagaatgaatggaaaaggaaggcacggacaacattgactgattggtgtatgagcttagaaacaataatacaatggtctccttattccacagaagcagaacttattcaggagtttggctcaataggggaacaaggaactcgaattatcatatacaatctgtgggaggatgatgaaggagagctggagcttgattttgatgctgacgcaaatgatattcagattagaggtgttaacagagatcagaacaagatcaagaaggcaaatcagtttccaaactccaaacacttctttacttatagacattctctaaggagttatgcatcaattttatatcttatgctcccggataacttccaaatgattttacggggaaaaaagattgaccaccataacattatcaatgatctcatgctaaagaagcaacttacttataatccaacagtgggcgatggacttccaaaggatatgcatgtggcagctaaggtgacaattggttttgttaaggatgcgagacaacatattgatattcaagggtttaatgtttaccacaagaatcgcctaataaagcctttttggagagtatggacttctgctggagttgctggccgtggtatcataggtgtactggaagtaaattttgtagaaccagctcatgacaagcaggactttgaacgcacaaattgccttgcaagactcgaagcacgattaaaccgaatgcagaagaaatattggtctgataatcgccatcgaattggctatggaaccaatgatgctagcacagattctgtaaaaaggaaaacaggttcctggaagtcagggtatctgcaaacgatcagaagtgatggcagatcatgttctaatacaacaaataatattatgaatgcaagcatgtcatccccagaaacttccaagcttagtggtcccaatagagagttctcttcaacaacagtgtgccagcacagagctgaaaagtctgcaaataccataagatctgaaagatcagttttgcatggcttgtcaaatacagatggtggaaagactgagactgccaacgccccatccaaatcaacttcccctatcctaaggactagtttgccaccaactcccaatgaaggaaaacgaagtgagaggattgctgccaaataccaatcgaagaatcttgatggtgcaggaatcattatcaagggaactgcaaatcgagcgggataagaacaagtctctgaccgagaggtttgaggatgtggagaggcaactcgagttggcaattaaagagcaagaagcaacggtagaactctttgcagaagaaaggaagtgccacgaccaagaggtggaaaacctgaagcggaagctcacggaggcctcttccaccattcaggatctgatggagcagctcaatgctgcccggaactgctgcaagagatgaagcagcagacgaagcaacttcaccccccagtaatacgttagtacgtgtatgtcaccagcatgctcttagcataaataatgcccagatggttgtggagctgttagcagtagcagaccagaatgctctatgtatgtttcacgtcctgttgttagatgtgtggtagcaagtgtaagatgattgaatgagactaacgtgatgaattccctaggccctcatggttcctgatttagtgtaataataattagagaggatattgagagtgaattgcaactggctttgtttgggagcaatgatactgaaggggattagagggcctaaaatctgaatagcaagaggattttagccttttcaatctcttt

SEQ ID NO: 3574 - DNA, 2647 bp, Zea Mays
gcacggttgcgaaattctcctccccaacccatttcgttcgccgccagcgacgccggcacacaacaagtgagaccccggtttccttccgccgtagttttcccttcatcgtcctcctcctccgttccactagcaacaccggagcggagcggagatccactctccggacttagaccggtttccttctccgtgtggcgagttcaatacctgactcgggtgccccttccccatgtcgcacgtcgagcccgccgccgccggagtggaccaagtcggcgaggggacggtcgtgccgcacgacaacggtgtcagcggcaccgggggtgacgtggccaccacggaagcgcaagtggctgttgccgtttccacctccggcgacgagaggcggggggattacggcgatgatgcagagaacgaggaggaggaggaggccgcaacggtgcagggcagcaaggagggcactgacgagctgctccggaaggtggtgtgcagcgaagaggccgcctacaagctctactgcgattacggccaccgcatggggttcagcatccggaaagggaagcagtcctacttcaccggcaccaagcggatacgcaccaaggactacttctgctccaaggaggggctcaaggaaggggagaagctcactgatgcaaatttcaacgacccccacaccaggaccaattgcagggccatggtgcggttcagggtgaatgatcagggggagtggaaggttatccgactggtatctgatcataaccacaacctggcaaggcctgaggaacgacatcttttgcggtctgcaaggtcgcttatagcagggcggtcaagttctgtggagaatcagaagcaagatttgctcctcggctacggtgctgcgacaaagacactgactataggaactggggatgtgcagagccttgtgagccatctgaaaagcagggcaaatgaagatggtatgttttactgggatgttcaattggaccgaggtggtcggatgactaatttcttttggcgtgatgggaggagcaggactgactatgactgtttctgtgatgtggtcgtgtttgattcaacttaccgcttgagcaaacataacctgatatgtgcaccgtttgttggcgtcaatcatcattggcagaccactatgtatggttgcgcacttttagctgacgagtctacgtcagcttttgtgtggctgttcaagtctttcttggagtccatggggaaccgacatccacaatctattttcacaaatctagatcaagttgtgacaaaagcggttgaggaggtcttcccaaatgcacgccatcgcattgctcattggcacatccaaaagaatgcccactctcgtctgggtgctcttaatgtctcaaaaacattcaataagatgttcaccaagtgcatacagggatgtgactccgaagcagagtttgaggaaacatgggctcaaatgctctgtgaatttaagttgcaagataacaagtggcttaaaaaattgtataagctcaaacagaagtggtgtagtgctcttaacaactgcacctttgatggtgggatcgagtatgaaccacaatgtgacagtatgagcaacatgtttaataatgtttctgataagttgacttctctttgtgcaattgctgttgctgtggataaacagactgaagattggagggaaaaagaattagatgaggatgcacggtgtttccaaaggccacctgcttgcatcataaaatacagtgatattttgaatcatgcagcaaaggtttatacacatagaatctacaaactgtttgagacagattttcttgatgggtgtggagccacaaaattcaaagagcttccgtgtcaagataacaatacatatcaatttgagatgactatgcaagggcgaggatcaagagtttgcacagttcatttcaatatgtctatgatgcaattaagttgcagctgcagtaagtttgagacaatgggtttactttgcccacatgctttgaaagctcttagtataaaaaatatatgcaaaattccagaaagctacatactgaagcggtggaccaaggatgcgaagaaatgggtttttaatccaaaacaatatgaatcatcatatcaggaatgtatgaatgatgaagctgcatactgcaactatgttatgagatatgcttatgatcttgtcacgaagagccaagggcaggatgcattaaggaaagcactgtgggagactcttgaaagtggtgagaaagaattggagagatacctagaaaacgttacccaacatgcaccttatgccacttgaaaggatcactaattaacctcctagacttatctgctaaggatgaacaagatacttccttgttctttcaagatgcattcagaacttctctcaaattgtacatttatagagatgaaacggatgcttgtcaaagatacaggcttgatatgatgaaatgcactagcattttctactaagtatttacttcgagtgatgtgtcttggtcaattgaccggtttagatcctacgaggatttgccactttgtgatagaagctcaagatgaatcgacgctgccatgcctgctttcatcttggcgggttacatcgttgagctcgccttctgcccatatagcatacgcctcctcaccatgtacagcatca

SEQ ID NO: 3575 - DNA, 1416 bp, Zea Mays
ccgccggcccagcgagagcgagccagcgaggtgcccaggaccaggacggctggggaccctgtcatccaatcagtccgtcacacgaacacgacacgattcacacatttcaatcactcgcttcccatgaattcgctcgctttccctagctgcccgtcagcattgacgcccgcctccaccaccgcccccgcgtcctctccctttccctcgccgcgtataaagattcgctgcccgcgacaagaagatgcagctcattaccacctccgcctccgcgatcgaagctcctcacaaaccgttatcgtcgccatggcagccgccgcgcctgcaagctccgtgaaggaagtgctgccatctcccctgacctccgcctccgagccccctcccctcttcgatggcaccaccaggctgtacgttgcctatcattgcccgtacgcgcagcgcgcttggattgccaggaactacaagggtttgcaggacaagattaagatagtcgccatcgatcttgctgacaggccaacatggtacaaggagaaggtttatccagaaaacaaggtgccttctctggagcacaacaaccaggtgaaaggtgagagtttggatctggtcaagtacattgacagcaactttgaaggcccatcgttgctcccagaggatccttcaaaaaagcagttcgctgaggagctgcttgcatatactgatgcatttaacaaagcattatacttttgtatagtctccaaggaagatgtgtctgaggaagctgtcgctgctttggataaaatagaagacgccctcgggaaattcaacgagggtccattctcccttggtcagttcagtctgatattctattccaacataaagaactatgatattacaaagggcagacccaaccttcagaagttcattgaggaagtggacaagattgatgcatacacacagactaaacaggacccacagtttttacttgagcagacaaagaagcggcttgggattgcttaaagcttgcggccgaggatgactctcgacagaaataccagcatagtagatcgacacttgtttagtcatttgtgtgcttgaataatgaatactacatatatggttttcaataagacatggtcctctatactgggttgtacttctgaaaacaaactagttgtcctgatattatagctttcgtggtgtgtttacgtcactgtatatgaaagggtggggagagagaatgatatgccatgtattctgtcaaatgtttttttataatgtcaagagctctgacttttaattaagaagaaaaaggattatatataagggccaaccaaacacatgatgctgccaaacaatatattcgaatggctaacccacctatgcaatacggcaaagcattatcatgaatcatggttgctactaaaaaaaggaaaaaaaaaa

SEQ ID NO: 3576 - DNA, 1760 bp, Zea Mays
ctgccactgccacctcataagccctaccactaccgggctaccatagagagaaggcgcgcgaagcgcgagcagaatccgcgcagaaaagcaactacctccggtcctccgctggcccgcaacgcatcactctcgccctcgcgagatccccaatctcgccgcaggtgtctcgccggagtgacccccattgcggcgcgggttatcgattccgcggccagcagttcttccccttctgctgtgggtcccgcgactcgattcgagctgttctgccgcggaggcggccgccccagccgcggccaaggcgcgcgcattgcgagggatattttatagatgacgaaggcagcaactctttatgggagcaagacacagagcgatgccctacggccagggccattgcgcccagcaaatattatcagaaataaattccccacatacaagaatggttcaaatggtatagtgatcaagctggctgatggtccagaaatgccacctctcaaggagatcgttgcaaaggaaactgcagatctacttgatcgtcgtcagcgtctctctgttcgtgaacttgcgatgaagtttgagaagggtctcaacactgccacgctgttgtcgaatgaggttaaatggagacaagtagctttgctggagcgggatatccttttgaaaaatctaaagtgtgtattagaatcattgagaggccgggtgacaggcaaaactaaggatgaaatcgaggagtctatatctatggtggagatccttgcggttcagctctccaaaagagaagccgagttgcttcaacaaaaagaagaggtcacaaaattagcaaaatcattaaagcaggcttctgaagatgcaaagagaattgttgaagaagaaagagctaatgctcatacagaaatagaaactgctaagagttctgtccaaagagttcagcaagcagttcaggagcatgagaagatgtcccaaaataccgggaagcaagacatggaagaactaaagaaagaagttagagaagcccggaggatcaaaatgttgcatcagcccagcaaggcaatggatctggaaaatgaaatacgaattttacgtaacacattcgctgagaagtccaaggattgtgttaatcttttgaaagagttggaaatgcataaaaggttaaaagaaaatggtaccatcccttctttcgatctggagggtctccaatgcttaggatcaatgctacgtatagttggtttgagtggcactcacatggatttgtcaaatatttcaatccagtggttccggatacatccaaaagaaagcaacaaagagatcatttcaggcgccacaagaccagtatatgctctggagccacatgatgttgggcgctatttgcaagctgaaatcgatgtcggcggtgaaattgcagttgcaaagacagctgggccagtagaccctgatgctggattggttgattatgtggagacactcgtaaggaaacctgaaactgaattcaatgttgttgtgcttcaattgaatggcattgacctgccaaaagagtcagttcatgttctcaatgtcggaaggctgcggatgagacttactaaagggaattcagtagttgccaaggaattctattcctcatcaatgcagatcatccttgctgggccaggcgacaaaactccctggtgatggcacctgtgctgctctgccaatccccaccactcttaacaatccgcgattcgcacagcttgcttgcaccagttcctctgattttccttcctcgtcag

SEQ ID NO: 3577 - DNA, 2395 bp, Zea Mays
aagcaactatttttttccgtgttcttctctcctcttccgctccccaccgaaagcataaacagcacaccggcaacgggaaaggaagggataccgacgcgagcacgcgccgagcaacgtctcgaaaaggccatgcaggacggcggcgaggtgctgttcctggacggcgtcggggaggtcgccgtcaccatcggccgcaacggcctctctgcacggcccctccacccggaactgatctcttcatgttggtcgtccattacactgcagcctaaattagacagcaaaatcaacttttcagatgtttatgccatagagatgcttgataagggtcgtatctgtgggccttggaatacaaagactgctattcaaggcaagaaaaatattgagatgcaccggtttgtcgtacatgggattaccagaagaaggaaacacccttctccgtgggtaccttgtgaatatatttttggtcacaaagacttgaagatctgcaaagattggtttcagcatctcatttcgtgcataaacaatgaaagtggtagaccaaagaacttaatggtatttgttcatccattgtgtggaaaaggtagaggggtcagtaactgggaaacagtgtatccgttatttgctagagcaaagataaaaacaaaggtgatagtgacagagagagcagggcatgcatatgacacactatcatcattatcagatatagaactgaaggcatttgatggtgttgttgcagtggaggaatagaattagtggaataggcaattgtattgctgagcctcgtgatctcccttagagataaggcaagtcagggtggcgacggtctatttaatgaaattctgaatgggatacttagttctaggcacaaggtttcatatcccccaactcctgaggggtttggatatgttggaagcagtgataactgtgaagaacagacaagaaattgggttaactttagtaaacccacaccagattctgggaatgccgtgtttctagggaatccaagtaaatgtgatgaccaagaacctcttctttcaacttcacatcctaccgagctagagataccatcaaattctactaaagaaccatgtattggagatcaggataacccagtttccttcccaaatgactggtttaggcttggcataattccttctggctcaactgatgctattgttctcagcacaactggggagagagatcctgtcacctctgctctgcttattattcttggcagaaaggtgtcacttgatatagctcaagtcgttagatggaaaactagcccaacagctgaggttttgcctactgtacgctatgctgcttcatttgcagttatggcttttatggagaagttatcagggagagcgaaaagtaccggtggatgggtcctgcacgttatgacttttctggaacaatggtctttctgaagcacaggtgagtaatggttgtactattgtagcatgctgttgacaacttaacaatctctggacattttcaggtcatatggggcaaaggttgcttttctcgatactccatacactcattcgcttacagcatcagcacaggatgatataactggagcacaaccactacaatctcgttggaagaaacctcgcaaaataatctgcagaacaaattgctttgtatgcaaagaggcttcaacatctggacaaaatccagaagatgttgcagacaactccagaacaatatgcgagaaccagaagtgggtctggtccgaaggacatttcctcagcgtcggtgcagctgtcatttcatgtcgtaacgaaagagcccctgatggcctggtagctgacgcacacctttcggatggttttcttcatctcttgctcataagagactgccctcttcccctttacttgtggcatctaacacaatttaccaagaagggttcagatcccctgtccttcaagttcgttgagcatcacaagacacaagcgtttacctttatctcatcacatgacgaaagtgtttggaacttggatggagagatgtttcaggcatgtgaggtatctgtccaagcgtgccgggggcttgtcaacttctttgcttcggggccagagctgtagtaatgatactcgtaagttcctctttgcatgaacgaaggatgccaggagttcatattttttatttagagagtcccttatttcgacatgttgacatgttgacatgttgtgatgttgtacactcttatttgtattttagtggagacctagaacactttgttgatagatatactgttaatatttgttgatagctatgtggcatggaaactacaacccatttgtgctatagaatagaggaacaaaaggttttgattgaattaatgaagtaaaagtttactttctgttttgcgagaaaaaataatgaattgaag

SEQ ID NO: 3578 - DNA, 2092 bp, Zea Mays
taatcctatgcagtattgctatttttgcagttgtgtaatttcagtcctcagatctttggcaactggagacattgctactgcaaaaggatacctatgtcaactacagccaggccttgagctacacaagccaagcactaagccagaaccttgctggtctaaggaaaagaagtccaatccgaaaaattagcagcacattgaactactatctggaggacaactggaaacgtgtttgggtgcttgcagtatggattggaataatggctggattgtttatttggaagttcattcagtaccgtaaccgttatgtctttgatgtgatgggctactgtgtcacaactgcgaaaggtgctgcagagactctcaaactgaacatggcacttattctcttgcctgtatgccgcaacactatcacctggctgcggaatacgaaagctgcacgggcattgccgtttgatgacaacattaacttccacaagggaaccaccttgtatgtgattttccacggctcattagttcatcagaggtgaagtatgctccactgcgcaaatactttggggaaaataaaccaacatatctggatctggtaaaaggagtggagggcataacagggataatcatggttgtgtgcatgcttatcgcttttactctagcaacaaggtggttccgccgtagcctggtgaagcttccaaggccatttgacaaactaactggcttcaatgcattctggtactctcatcatttgttcatcattgtgtacatatcacttgttattcatggagagtgtctataccttatccacgactggtacaaaaggacgacatggatgtaccttgctgttcctgttggtctgtatgtaggggagaggactctgaggtttttcagatcgggcagttattctgtccggttattgaaggtggctatatatcctggtaatgttttgacattgcagatgtctaaacctcccacattccgttacaagagtgggcagtatatgtttgttcaatgccctgcagtttcaccttttgaatggcatcctttctcaattacttcagcacctggggatgactatctaagcattcatgttcgacaacttggtgactggacacgggagctcaaacgggtattctcagcagcttgtgagccacctgtgggtgggaaaagtggccttcttcgagcagacgaaacaaccaagaaagcgttaccaaaacttttgattgacggaccatatggttctcctgcacaagactacagcaagtatgacgttttactacttgtcggattaggtatcggtgccacaccttttattagcatactgaaagacctgctcaataacatcatcaaaatggaggaagaggaagaagcttcaagcgatctttacccaccaattggtcgcagcaaggcacatgttgatcttgacacccttatgaggattacctcaaaaccaaagagggtactgaagacaacaaatgcttacttttattgggtgacacgtgaacaagggtcttttgattggtttaaaggggtcatgaatgaaattgctgaactagatcagaggaatatcattgagatgcacaattatctcacaagtgtttacgaggaaggggatgctcggtcagcactcattacgatgctacaagctctcaaccatgccaagaatggtgttgatatagtttctggaactaaagtgcggacacattttgcaaggccaaattttaaaaaggtcttatctaagctccagttctggcacaggaactaagcaagctctgttatgaattcaatggcaagtctacaacaaaattcgaattccacaaggagcatttctgacatacaacaaggttaatgcagaatattggaacaagggggagaagatgtgatattgggataggctggcctccttcgtgtcaaaacccgagccacgtgaatgtgccagagattaactagaaagacggttccctacccttgcacgatgatgtcacgcaggtctcatcaaactcttgaattttgatacttgaaaattcaaggcatacattttgtagctagcaattttgcaaagtcattgttttgtaaggcaattttgcgaagccaattatcc

SEQ ID NO: 3579 - DNA, 3820 bp, Zea Mays
gctcggcaccggctagcttggactccgctccgcttgtccgcggcacgagcacgagggtgcctttctttctttctttctttctttctccacgcacacacgcgcgcgcagttggggagagagaaagaggggtgactacgagctaccgcgttttaggtcgcgccggcttggactgttgcgtgagctatatctttttctcgctcgctcgctcccaaatcgtcaaaggaagtttggtggtggtggtggcttcattgcttcaagcagcggccggggggtgaggaggacagacagacaagggggaaggagtgatgcgaggaggaggaggaccgggcgtcggcacgccggggcgcccgcgatggggctccggcgccacgacgccgcggtcgctgagcacgggctcctctccgcgcggctcggaccggagctccgacgacggggaggagctggtcgaggtcacgctggacctgctggaggacgataacattgtgctgcggagcgtcgagccggcggcggccgcggctgctccggctccgccccgccgccacccggaccctaccccgtcctcgtccgcggccccgtcgcgctcgcgctcgcccgcgatgcgccggacctcctcgcaccgcctgctgcagttctcgcaggagctcaaggccaccgccagccgcgccaagcagttctcgcaggacctcaccaagcgcttcacgcgcacccagagccgcgccaatctcgcgggggagccaccggctgccgcgccctcgggcatcgacgccgccctcgaggcccgcgcccagcgccgccgccgcgcgcagctcgaccgtaccaagtccggcgcgcagcgcgcgatccgcggcctccgcttcatcagcggcggcaacaaggccagcaacgcctggatcgaggtccaggccaacttcgaccgcctcgcgcgcgacggctatctctcccgcgccgacttccccaaatgcatagggatgacggagtcacaggagttcgcgatggagctcttcgacacgctgagccgccgccggcagatgcaggtggacaggatcaacaaggatgagttgcgcgagatctggcagcagatcaccgataacagcttcgactcgcgcctccagatcttctttgacatggtggataagaatgcagatggccatatcacggaggccgaggtgaaagagatcattatgctgagtgcttctgctaataaattgtcgaggcttaaggagcaagctgaggagtatgcagccttgatcatggaggaacttgatcctgaagggcttggctacattgagctttggcaactggagacattgctactgcaaaaggatacctatgtcaactacagccaggccttgagctacacaagccaagcactaagccagaaccttgctggtctaaggaaaagaagtccaatccgaaaaattagcagcacattgaactactatctggaggacaactggaaacgtgtttgggtgcttgcagtatggattggaataatggctggattgtttatttggaagttcattcagtaccgtaaccgttatgtctttgatgtgatgggctactgtgtcacaactgcgaaaggtgctgcagagactctcaaactgaacatggcacttattctcttgcctgtatgccgcaacactatcacctggctgcggaatacgaaagctgcacgggcattgccgtttgatgacaacattaacttccacaagggaaccaccttgtatgtgattttccacggctcattagttcatcagaggtgaagtatgctccactgcgcaaatactttggggaaaataaaccaacatatctggatctggtaaaaggagtggagggcataacagggataatcatggttgtgtgcatgcttatcgcttttactctagcaacaaggtggttccgccgtagcctggtgaagcttccaaggccatttgacaaactaactggcttcaatgcattctggtactctcatcatttgttcatcattgtgtacatatcacttgttattcatggagagtgtctataccttatccacgactggtacaaaaggacgacatggatgtaccttgctgttcctgttggtctgtatgtaggggagaggactctgaggtttttcagatcgggcagttattctgtccggttattgaaggtggctatatatcctggtaatgttttgacattgcagatgtctaaacctcccacattccgttacaagagtgggcagtatatgtttgttcaatgccctgcagtttcaccttttgaatggcatcctttctcaattacttcagcacctggggatgactatctaagcattcatgttcgacaacttggtgactggacacgggagctcaaacgggtattctcagcagcttgtgagccacctgtgggtgggaaaagtggccttcttcgagcagacgaaacaaccaagaaagcgttaccaaaacttttgattgacggaccatatggttctcctgcacaagactacagcaagtatgacgttttactacttgtcggattaggtatcggtgccacaccttttattagcatactgaaagacctgctcaataacatcatcaaaatggaggaagaggaagaagcttcaagcgatctttacccaccaattggtcgcagcaaggcacatgttgatcttgacacccttatgaggattacctcaaaaccaaagagggtactgaagacaacaaatgcttacttttattgggtgacacgtgaacaagggtcttttgattggtttaaaggggtcatgaatgaaattgctgaactagatcagaggaatatcattgagatgcacaattatctcacaagtgtttacgaggaaggggatgctcggtcagcactcattacgatgctacaagctctcaaccatgccaagaatggtgttgatatagtttctggaactaaagtgcggacacattttgcaaggccaaattttaaaaaggtcttatctaagctccagttctggcacaggaactaagcaagctctgttatgaattcaatggcaagtctacaacaaaattcgaattccacaaggagcatttctgacatacaacaaggttaatgcagaatattggaacaagggggagaagatgtgatgtatgtaagtcacttgtgctttaacatgttgctttcttggcgatgagtttgaaagagcaagggattctgcacaaggtgttgtatcaccacagcttactccgcatttgtgatactactgtcccccagttacaactgcattatctattgcttgagatactaaaatacaataagatcgcatagaaaggaaaatgggggtcagcagcacatcacacaaggtttccatcgaaggttcaagagcacataccccaggtggagtagcaagggaatctctcccatggagtccacaaccataaattgtgattatataagtagcgtgatgtaggacacatacaatgaaggccaggatgtcacaaggctacctaactgtatatttgcatgcagctgagtggctgactgaggccacaagtttgatctaactttgtacttgtacacagggttgaaaaacaggaagaaggtacattttgtttttgtaagtagcgtaggttggtagtgactgggctcagattgggggccctcaagtttcattaaagcttgttccgttgcctcgttgagtggtaggttgcatttttttttaggacagatctggctgattcatgtatatctttactgaaggccatgttttttttaaaaaatttatgatgctgtctacatgttgatatggaaaggattaaatgtggaaaatgatatgtatacctgtgctaatttggcg

SEQ ID NO: 3580 - DNA, 1958 bp, Zea Mays
ggtgtaattttttattattctaatttttattataatttctatcatgcgtgtatatgttctaataaatagaaaagtgtgaacatgtggcagagtctaagtaatgccttgtacgctatgtcgtggacctatgattgaattagagaaataaagtccaaccctagaaaactctcgcatcgtcactccaaatcagccgctagggctgcattcatccacctcgtgcttatcgcctactccaacgccgactcctgctcgtcggtcgtcgcctcgtccagctctctccgcccctccagcctagcctagcccctcctgctcactgcgtcgtctccagaatccggcctacgaccgttggcggctggtgcccccaccggcaatcggtggtcatggtctgtccctgctcactccattcagatccgctatgcgcgaggcgcaactggatctatcgtattcctggttgctctctccctctccgcgggcgatgcgcctctctaggttctaccggcgtccgtccaaccggtgttcagcgtgccttcgcaggcccccttctctgccttcgatgagtgcatttgatcagtattgggaggctgcacttgatgtgactatatgttggaagaaatcctttcttgtcattgctcgaggttgttaaagaagagcagatgtgctattttggttggtctaaaatcaggggtggaccaacagggggtccaggggggccacggcacaccctaggccagcccagcaaggaccccacccctttgtcgcccagccgctagcacgtagctaccacgactagtgcccaggtcaccaccgccatgcctagcgccaagccaccactcacccgcacccaacaccaagtcgccgcaatcctagtgcccattgtacatgtgaacatataaagctaccatgatcatggaggtagcaggtgcagagacacccatcaaggtttcttcgtctctagtcatttgttacgcaaattcaaatacaggtacattattctgaaactcagttcatgaaatggaatgagttcagtttcaatatagcagaatagcatgctagcagcaaacatgcacgtgcccagacttcattcagtaacatgtggtggtgacatggcacaacaagaacttgaagaagtagacatgttgctgctgcctgcagggtgacgtctatggtgttgtgctgcgggcaaggcccacacaatgtgatcgggctgcacgccaatgttcaacatgtgccccaaccagaatgtgtatgctactactaatataacattcgtcattggttggttcaccccaagaggtttgctgcatgttcatggagctggtggataataaattttagttgttctttttgtggtttattagatgacatcaattagtgttcaattgagccttagagtaggatgaatacaactgtcttaagtttctttgttccagcagattgtttgggggcaaggttacctatgaacttcaagaattggtcttatgatattgttagtttgtacaacttagtgttaggttgctcgacttcttcatgaatgaggtgttagacattggtcgatcatgcagggttgaaggtgcttcatataactaaatctaccatgactttctaggtaagatgttacatccatatgacctttgtgatatgtcataatgtgaggtgttcaactgtgtctaactactaattattgcctttttctatttgttgtataggaaaagatggaatggaactcaatttttggtggccgtacaagtgtggaaacttgaattcatatatacttacaatcaacattagcgcaaacagttgaccaagtttttcaattagtattttagtttgaatttagtgtgcaataatgtatgagttatttaacaatgcttattcatgacatattgaatgatacttatatttattatatcaattatgatgttattaaatatatgtgtgcatgtatatttctctttaaa

SEQ ID NO: 3581 - DNA, 2442 bp, Zea Mays
gcacgagagcggccaccaccatggcgacgcccaccgcgctctccacctcactcccctacctcccgccccgccgcgtcatctcattcccatccgccgccgccgtctccctccccgtcacctcccgccccgcccggctgcgggattcccgcctcgcggccgcggcaacctcggcctccgaggtcctcgagtccaccaacggcgccgtccccactgcggccaaggacggcgcgtggcgcgggtatgggagggagtacttccccctggctgccgtcgttgggcaggatgctatcaaaactgctctgctgcttggggcgattgatcgtgagatcggaggcattgccatctcagggaagcgtgggacggcaaagacagtgatggctcgtggtttgcatgctatgcttccacccattgaagtggtggttggttccattgcaaatgctgaccctaactcccctgacgaatgggaggatggtttagctgatcaaatacagtatgactctgatggtaatgtcaaatccgagattgtcaaaacaccttttgtgcagattccacttggtgtgacggaggataggctcattggatcagttgatgttgaagcatctgtgagatcagggactactgtatttcaacctggtcttcttgctgaagcacatagaggtgttctttatgttgatgaaataaatctattggatgatggcataagcaatctacttctgaatgtcttgacggagggagttaacattgtggaaagagagggcattagctttcgccatccctgcaaaccacttctaattgctacttacaatccagaggaagggtctgtacgtgaacacttgcttgatcgtattgcaattaatttaagtgctgatcttccaatgagttttgatgaccgcgttgaagcagtggatattgcaacacggtttcaggagtctagcaaagaagttttcaaaatggtggaagaaaaaactgaaactgcaaaaactcagataatttttgcaagagagtatctgaaggatgttactattagcacagagcagctcaaatatcttgtcatggaagctatacgaggtggctgtcaggggcatcgtgctgagttgtatgctgctcgagttgcaaaatgtctagctgctatggaaggacgtgaaaaagtatttgtggatgacctcaagaaagctcaagcacagagacgacgtggaaaagctgggcgagcaaagaatgtcatcttctcagaagataggggccgttacataaagcctatgcttcctaagggtccagtaaggaggttagctgttgatgccacgcttagagcagctgcaccataccaaaaactgcgcagagagaaagaacgtgacaaaacaagaaaggtttttgttgaaaagactgacatgagagccaaaagaatggctcgaaaagcaggtgctctagtcatatttgttgtggacgctagtggtagcatggctctgaatcgtatgcagaatgctaaaggtgcggcgttgaagttgcttgcagaaagctacaccagcagagatcaggtttcaattattccttttcgtggagattatgctgaggttttgcttccaccatcaagatctatagcaatggcccggaaacgtcttgagaagctaccatgtggtggtggttctcctttagctcatggcctaagtacagctgtcagagtgggtctgaatgctgaaaagagtggcgatgttgggcgtatcatgattgttgcaatcaccgatggaagagctaatgtatcactgaagagatccactgacccagaagctgctgctgcttcagatgcaccaagaccttcttctcaagaactgaaggacgagatacttgaggtggctggcaaaatatacaaggcaggaatgtcccttcttgtcatcgacactgagaacaagtttgtatccacgggatttgccaaggaaattgcaagggttgcccaggggaaatattattacctccctaatgcttcggatgctgtaatttctgctgccaccaagaccgccctgacagacttgaagagctcatgattttgcagcagcggcacccgttttctgtaccttttgataggggtggtgaaccttcattcatgcagtagtttttgtgtaggcctctacaatgacagggggaaacaaacccgagcatggcatcgtgtaaagtgttaaggtccaatggcctcctgtccacgtttggcgatgtaaatcctccgtaacatagcttgaaccattgagtgtcacgtagtgccatggctagcagttaaaagtaccatgcgtcatgaatgacggggtggacagtggtggttaaaaatggcagacccatcgtgtggctcgaataaggaggtagtcgcggtacgtgctagaaactgaaaggaaaaagtatataaccctctagcctttaggttttgacaatagaataaatgaataataatccctccaa

SEQ ID NO: 3582 - DNA, 2686 bp, Zea Mays
gcacgagagcggccaccaccatggcgacgcccaccgcgctctccacctcactcccctacctcccgccccgccgcgtcatctcattcccatccgccgccgccgtctccctccccgtcacctcccgccccgcccggctgcgggattcccgcctcgcggccgcggcaacctcggcctccgaggtcctcgagtccaccaacggcgccgtccccactgcggccaaggacggcgcgtggcgcgggtatgggagggagtacttccccctggctgccgtcgttgggcaggatgctatcaaaactgctctgctgcttggggcgattgatcgtgagatcggaggcattgccatctcagggaagcgtgggacggcaaagacagtgatggctcgtggtttgcatgctatgcttccacccattgaagtggtggttggttccattgcaaatgctgaccctaactcccctgacgaatgggaggatggtttagctgatcaaatacagtatgactctgatggtaatgtcaaatccgagattgtcaaaacaccttttgtgcagattccacttggtgtgacggaggataggctcattggatcagttgatgttgaagcatctgtgagatcagggactactgtatttcaacctggtcttcttgctgaagcacatagaggtgttctttatgttgatgaaataaatctattggatgatggcataagcaatctacttctgaatgtcttgacggagggagttaacattgtggaaagagagggcattagctttcgccatccctgcaaaccacttctaattgctacttacaatccagaggaagggtctgtacgtgaacacttgcttgatcgtattgcaattaatttaagtgctgatcttccaatgagttttgatgaccgcgttgaagcagtggatattgcaacacggtttcaggagtctagcaaagaagttttcaaaatggtggaagaaaaaactgaaactgcaaaaactcagataatttttgcaagagagtatctgaaggatgttactattagcacagagcagctcaaatatcttgtcatggaagctatacgaggtggctgtcaggggcatcgtgctgagttgtatgctgctcgagttgcaaaatgtctagctgctatggaaggacgtgaaaaagtatttgtggatgacctcaagaaagctgtagagctagtcattctacctcgctccatcctatctgataatccacaggatcagcagcaagagcaaccacccccacccccgccaccaccacctccagaaaatcaagattcttcagaagaccaagatgaggaagacgaagaccaagaggatgatgaagaagaaaatgaacaacaagaccaacagatacctgaggagttcatatttgatgctgaaggtggtttagtagatgacaaacttcttttctttgcccagcaagcacagagacgacgtggaaaagctgggcgagcaaagaatgtcatcttctcagaagataggggccgttacataaagcctatgcttcctaagggtccagtaaggaggttagctgttgatgccacgcttagagcagctgcaccataccaaaaactgcgcagagagaaagaacgtgacaaaacaagaaaggtttttgttgaaaagactgacatgagagccaaaagaatggctcgaaaagcaggtcatatttgttgtggacgctagtggtagcatggctctgaatcgtatgcagaatgctaaaggtgcggcgttgaagttgcttgcagaaagctacaccagcagagatcaggtttcaattattccttttcgtggagattatgctgaggttttgcttccaccatcaagatctatagcaatggcccggaaacgtcttgagaagctaccatgtggtggtggttctcctttagctcatggcctaagtacagctgtcagagtgggtctgaatgctgaaaagagtggcgatgttgggcgtatcatgattgttgcaatcaccgatggaagagctaatgtatcactgaagagatccactgacccagaagctgctgctgcttcagatgcaccaagaccttcttctcaagaactgaaggacgagatacttgaggtggctggcaaaatatacaaggcaggaatgtcccttcttgtcatcgacactgagaacaagtttgtatccacgggatttgccaaggaaattgcaagggttgcccaggggaaatattattacctccctaatgcttcggatgctgtaatttctgctgccaccaagaccgccctgacagacttgaagagctcatgattttgcagcagcggcacccgttttctgtaccttttgataggggtggtgaaccttcattcatgcagtagtttttgtgtaggcctctacaatgacagggggaaacaaacccgagcatggcatcgtgtaaagtgttaaggtccaatggcctcctgtccacgtttggcgatgtaaatcctccgtaacatagcttgaaccattgagtgtcacgtagtgccatggctagcagttaaaagtaccatgcgtcatgaatgacggggtggacagtggtggttaaaaatggcagacccatcgtgtggctcgaataaggaggtagtcgcggtacgtgctagaaactgaaaggaaaaagtatataaccctctagcctttaggttttgacaatagaataaatgaataataatccctccaa

SEQ ID NO: 3583 - DNA, 3235 bp, Zea Mays
ctgcgacacagagctggacagaacagagaggagtctttcgtagcggagtgtggagactggagagtggagacggaagccaagcctccaagggggccgtcgcagaactcgcgccaccgcccgccatggcttcgtcatctaaggcctccgactcctcctcccaacgatccaagcggtcggatcaagggacgggcagggaagccgctcccgcctctgttgtcccgatccacgggaacctgacgcagttgatacgccaaatcaaatcgaggcgcctcttgtacatcaaggagaaattggaggcgaacaggaagacgctgcagaggcactcctgcgcgctgttcgacgtggcagcggcggcggaggtggcgtcgaggggcagcgatggcggcaacgctttgtcgcagcgagcggcggagggacagttcaggctcgctgggtcagacctggcacacgggataggggagagggacgtggtgtacatgcaggaggagaacctggcgtccgggacgctcgtgctctccagctcgggcgctgccgcgcagcggacagtcgtgcggttcgtgaagctgccgttggttgagaggatccctccgtacaccacttggatcttcctggacaacgcagaaatcaaagaatggctgatgatcagtcagttgttggtaggagaagaatttactatgatccaatcggaaacgaggctctgatctgcagtgacagcgatgaagaaattccagaaccagaggaagagaaacactttttcacagagggagaagatcaattgatatggagagctactcaagagcatgggttaaaccgagaggttgttaatgtcctctgccagtttattgattcaactccatcagaaattgaggaaagatctgaagtcctatttgagaaaaatgagaaaaactctggatcttcagataagatagagaggcaactttctcttgacaaaactatggatgccgttctggattcttttgataatctcttctgccgcagatgcttggtttttgattgtcgcctccatggttgctcacagaatttggtattcccaagtgagaagcaaccctacagctttgagcctgatgaaaacaagaagccatgtggtcgtcagtgctaccttcgatggagagaaggatttcaagagattcatgatgttggtcttagtggctgtgcaacatataatatggaatcaggaactgtctcacacaaagttgatgttagtattatgtctgaatcagaagattcaaaccgtgagaaaggcaacattaggtccatgacactagttggaaccagtggatcaaaaataatttcttctgttagtgctgaagaaagcactactccgccttcagcagatacctctgaaacagagaatgcatcctctgatatgcctcccagtagtttaaggaaatacaagatttcaaaacgtggacctaggtacagggagcgttctcctggcaaaaggcagaaggtttttacttatgacatttcttttgcaagcaatatactgaataaactttcgattccggagattcgcgacacaagactagagtctagagaacctggaggtgataaactacaaattcttgacgagtccactaagaaaacttcaagcaaagatatctgtggagaaagcccaattactactactgaaaatgtgggaagagagagtaaaaaagtatcttcaacaaagaatttcttggagcacactctttcatgttggagtgccttagagcgagatctatacttgaagggcatagagatatttggaaagaacagctgtctcattgccagaaacttactatctggtatgaagacctgcatggaagtggccaactacatgtataacaatggtgcagcaatggcgaagagacctctcttgaataaatccatctcaggcgactttgcagaaactgaacaagactacatggagcaagacatggttgccagaacaagaatctatcgtcggaggggccgcaatcgaaagctgaaatatacttggaagtctgcagggcatccaactgttagaaaaagaattggtgatgggaagcaatggtacacacaatataacccatgcgtgtgccagcaaatgtgtggtaaagattgcccctgtgtggaaaatggaacttgctgcgaaaagtactgtgggtgttcgaagagctgcaaaaacaagtttagaggctgtcattgtgcaaaaagtcaatgcagaagcagacagtgcccctgttttgcagccagtcgtgaatgtgatccagatgtttgtaggaattgttgggtgagctgtggagatggttcactaggtgagccacctgccagaggtgatggttatcagtgtggaaatatgaagctccttttgaaacaacaacaaaggattttgttaggaagatctgatgttgcaggttggggtgcattcatcaagaatcctgtaaataaaaatgattatcttggagaatatactggtgaattgatctctcacaaggaagcagacaaacgtggcaaaatttatgaccgggcaaactcatcatttctgtttgatttaaatgaccagtatgtgttggatgcttatcgcaagggggacaaattaaagtttgcaaatcactcatctaaccccaactgctatgcaaaggtgatgctggtggctggcgaccatcgggttggtatctatgcgaaggagcatattgaggctagtgaggaactcttctatgattatcgttatgggcctgaccaggctccagcttgggctaggagacccgaagggtcaaagaaggacgaagcatccgtctctcaccatcgagcacacaaagttgctcgatagctgaagagcagctccggatgatacaatatgcagtaaattatatatttaatacatgatttagtcctagttcattatacgaggacttcgttggtagataagcatattgtatattcattagtgaataaactcccatacatcaagttggggaataagtgcatataaatattttttaccttaggtcggaaggtgacaaactgacaaccttgttaggttgagtaaagttagtgcttacaggttttcaaactggtgtggccattgctagagtatcaaatagctgagatggctacaactatagccttgtttgtatttttttttggcaagagggatggaatttatttgccaaatgtacacattgttgcaggaagtatttaatgatttaggaggtgttcttcagtcaccctcctaaattttagaaattaa

SEQ ID NO: 3584 - DNA, 2996 bp, Zea Mays
cgcgcggcgaatcacggcgttcaccttccatccggactccgctccgcccgcgggttccccgccaaatctaatttctcgacccaaccctaacttccgcgacgtcgtggcgcctgccgaccgcctcgcggagacgggagacccaacgcggcctcttcgtgccggcgcggcccgacaagagcatcgtcgaggggcagatcatgcagcggcacgactttgtgaaccagcggtgcgccacgctccagcgctacctccgccgcctcgccgtcgtcggccatagccccgttctccacgcctccctcaccgccaccgggcccaacggcatacccacttccgacggtgggtctcctaggtggagccctccgatgagtgctgccacgtgcatggctgctgccgctccaatgacgcctacggagagtgggagtctgggcgagacttttttcgggtgttcaacgacctgaagcagacagtggcaaatgggttggtggcggtagcggtaagaccgcctccagtggaggaggagattgacacaaagtaccttgtgcacaaggccaagcttgaggacctggagaaacatctggtgacagcatctcagcaggtctcttgaaaatgtcattcgtcaaactggctaagtttgaaaaggagcaagctgcatgtagctcagaaaagacaagctgctggcatcagtaattttgccagtgctgttgttagagttaacagatcacaggcaaaactaaatgctgaaattctaaaacatctggtaagtggagtgacttgagcgaatgaatatttgcttggtcatatacttttaggattattggtttaccccttttattttgatatgttctgtgcttttgcaaggcattatccatgagtacatggactcatggagacaatggcttctgttcataatgcttttactgatcgttccaatgctttgctgcatgtgcaaaatttgtcagcagatctatatttcttgcatactcgggcaggaaaacttgaatctgtatcatcgagaggaatggatcaggagagatcaaggtatcaaaaatagaagaattgaaagaaacagtgagagccatggaagatgcaaaaacacatgtacttgaagaattgggactaatcacggtagttcattcaaacttatgaaacaaagaaagtgtacatcatgtgttacaattaaaaactgcaatattgttattactcaaaacagacccacaagcataattctctatttggaaggaccaataatatggatacaaaaaacatgtctagattattcagtttgcagtacgttcgggatataatgtttagattttgtaacatgacgcctaacactagctaatagtccatctgtcccaaaatagaattcgttttagactaaacatacattaatgcaataacctatgaatatagtttgtttgtatgtttatattcattatcatttattcgaatatggatgagaaaaaagaggactaaaaagaactatattttgagacggagggagtattatatatttggataatccgctgaagcagtcaggttaaagctatttgttatagttgtttgtgctacagaattctcatcagccaacacttcttttgaccatgtccagttaacattattccaagttaagctcgcagaagctggatgagcaggatagcagctgacatgttgctaagcaaccaagagtccagattgtctgtttctgactattgtgatgtttgagctgtggtgaaagtatcaagaattttataatagatgcattgtcaatgaattttctgtttatgtattgaccttaacattttcaaacacaacctgctgcaactcaaatgctaggttatgctatcctgttgacaagatttaagctgtgccctcggttttgctggtgtcctcatttttacccttagtcgtgttttttgctcggttttgtctttctgttctatagcactggaaggacaaaactgagaaaaaacacgactaaggataaaaataaggacaccagcaaaaccgagggcaccatcttaaaaaacacgactaatgcaggaaaacaacatgaatgaaattaaaagatttaacaaggaaagacgccaggatttgttggagatgctgaaaggctttgtatccgatcaggccacatactcggaccattttgctagcatatggacaaaggtagcagaagaaacaaaaggatatgcaaaaagcagcagttgaagtacgatgttcatatacaggtgaatttgagctgttattgtgcagcgtgaaaatagctacaccattgagaatcatgcgaccggcgtatagactgacaggaccacactctccattaccgaagggacacatttctatggacttttctgggaattggtatctccaggtactcctatctgatattctgacgaagacggcggggcggtcggtggccgtacggtggcggttggatgcgcctccgagtccgagcccgcacgaagcttcgtggcagcttccagttcctcctcactgtcatgggatgggcgcatggcagcaccctctccatttgtccagtacagctatttggagctgccgcgtgcacgtggagacggcgcaccgctcgcggtgggtcgatctgtcagtgttgctcacgcgcatcgcctgcccgacgtcgcgtgtactatactatttatgatatgtagtaggcaggcatgtagcatggcaggcaagtgacgaccgacccagtcatggcctcgcgccgcgtttaaggtttgcacgcggcgattgcttatctggattccccggccgccaactgcgctgcacgttgatagcagatcagcagcctctatcgaaacctaggatttatagtcaagacgatccatcgatctggattgtgagcactcctcaaaaaaaaattatagaacggtacatatatgattatagatcgaacgcgctttttgatacattgatcaacatgattttgtatctctgtcgtcctttagcttccatatttacactatatatctcgg

SEQ ID NO: 3585 - DNA, 4417 bp, Zea Mays
ccattcacggttttgccttcgcttttgctttacgcgtacgcgcggcgaatcacggcgttcaccttccatccggactccgctccgcccgcgggttccccgccaaatctaatttctcgacccaaccctaacttccgcgacgtcgtggcgcctgccgaccgcctcgcggagacgggagacccaacgcggcctcttcgtgccggcgcggcccgacaagagcatcgtcgaggggcagatcatgcagcggcacgactttgtgaaccagcggtgcgccacgctccagcgctacctccgccgcctcgccgtcgtcggccatagccccgttctccacgcctccctcaccgccaccgggcccaacggcatacccacttccgacggtgggtctcctaggtggagccctccgatgagtgctgccacgtgcatggctgctgccgctccaatgacgcctacggagagtgggagtctgggcgagacttttttcgggtgttcaacgacctgaagcagacagtggcaaatgggttggtggcggtagcggtaagaccgcctccagtggaggaggagattgacacaaagtaccttgtgcacaaggccaagcttgaggacctggagaaacatctggtgacagcatctcagcaggtctcttgaaaatgtcattcgtcaaactggctaagtttgaaaaggagcaagctgcatgtagctcagaaaagacaagctgctggcatcagtaattttgccagtgctgttgttagagttaacagatcacaggcaaaactaaatgctgaaattctaaaacatctggtaagtggagtgacttgagcgaatgaatatttgcttggtcatatacttttaggattattggtttaccccttttattttgatatgttctgtgcttttgcaaggcattatccatgagtacatggactcatggagacaatggcttctgttcataatgcttttactgatcgttccaatgctttgctgcatgtgcaaaatttgtcagcagatctatatttcttgcatactcgggcaggaaaacttgaatctgtatcatcgagaggaatggatcaggagagatcaaggtatcaaaaatagaagaattgaaagaaacagtgagagccatggaagatgcaaaaacacatgtacttgaagaattgggactaatcacggtagttcattcaaacttatgaaacaaagaaagtgtacatcatgtgttacaattaaaaactgcaatattgttattactcaaaacagacccacaagcataattctctatttggaaggaccaataatatggatacaaaaaacatgtctagattattcagtttgcagtacgttcgggatataatgtttagattttgtaacatgacgcctaacactagctaatagtccatctgtcccaaaatagaattcgttttagactaaacatacattaatgcaataacctatgaatatagtttgtttgtatgtttatattcattatcatttattcgaatatggatgagaaaaaagaggactaaaaagaactatattttgagacggagggagtattatatatttggataatccgctgaagcagtcaggttaaagctatttgttatagttgtttgtgctacagaattctcatcagccaacacttcttttgaccatgtccagttaacattattccaagttaagctcgcagaagctggatgagcaggatagcagctgacatgttgctaagcaaccaagagtccagattgtctgtttctgactattgtgatgtttgagctgtggtgaaagtatcaagaattttataatagatgcattgtcaatgaattttctgtttatgtattgaccttaacattttcaaacacaacctgctgcaactcaaatgctaggttatgctatcctgttgacaagatttaagctgtgccctcggttttgctggtgtcctcatttttacccttagtcgtgttttttgctcggttttgtctttctgttctatagcactggaaggacaaaactgagaaaaaacacgactaaggataaaaataaggacaccagcaaaaccgagggcaccatcttaaaaaacacgactaatgcaggaaaacaacatgaatgaaattaaaagatttaacaaggaaagacgccaggatttgttggagatgctgaaaggctttgtatccgatcaggccacatactcggaccattttgctagcatatggacaaaggtagcagaagaaacaaaaggatatgcaaaaagcagcagttgaagtacgatgttcatatacaggtgaatttgagctgttattgtgcagcgtgaaaatagctacaccattgagaatcatgcgaccggcgtatagactgacaggaccacactctccattaccgaagggacacatttctatggacttttctgggaattggtatctccagcaatggatcgaatcttgcacgagctacaggcgtacaaagtactaaaaagaaagagctggcttctcccgaggctttgagcgcatctgaaatttcactgctagaatgtggcacgaaagaagtacagaatgtggacgacagcagtaaccaatcaaatgacttgacatagtcatcgcgcagtggcctaaatttgttgtgtccatacgaaacgcagagcagcttccttccatggcacgccatacactaatacaaccgtataggcatataaaatgagatgacttcttagagccagattgaagcttcgccaacgctttttacaccataaagctgaagagcgcccagcattgaagattttctgagttgttatgatcacagccatttttacaccatcatgggggtgaataccgtttgtgcattcagagaggagacggtcgaagaattctttgaaacctgcacagcattttacacgtgaagtttgatccaaagcattactggagattgtcatacggtcgggaaggatcaggattgtcgctggtgatacacaccttgtgcgcacttgaatccagagtgcattcaagagacggtctgatgtttcctgtggtactggtgctaccaaacgggctaactgtttgcacctttgcctttccaacgctggtgcagactagaggaatgtgggaagaatccatcgcagagatatttgttttgtgttagaatcatcaggtcgctatatctatgctcaaaagcctgaaaacaagaaggacaagctcctaacgaacgggcatctatcacctcgtgcacaggttctacctgttccttcaaatacagcgcagggatccatcaggctgtcacgctcgtgcaaccaaggcaccgccatacgggcttctgtggccctgtgccgctgcctcacgaatccagttcccgactctcatcaaccatcccacatgaacctaaagatgctacctcacactttggaccactgaaaaagacatccaaaagcccaacagtaaaaacagatgtgatgtgacagaaccagagatccgggcaccgtgcgctaccgaagtgccagacgtatcaaatgatcaaatggaggctatccgcagcagatgtctataactatatattacattatctatataataaaatttgaaatagaggatgagatagtgaacgtgataagatagctgctggaaacaactttatcgctccagcggaaaatgggaacaactatgcataaggccattctcagtagaagttttattagggctagtttggtgacaaagtaatcgaggagaattgtagagaattgtggggggagagggatgaattgatttgtcccttaatcctctcaatccccttttatcaaaccagcccttaaaatttttatggcattaattaatatgtcgcatgcgtaggatttttatggcatgggactacatttaatataaaataggtgaaattagtttcatcactatgaaactatgccaacatgtttccaagacattggaaagcgtacgaaaccactactaagagtgatttattttatctatttctattgattatttagatgcaacatttatgtcacgtgttagcctataaaattgtcataaaactcttcattgaaagaacatatttcattcttcatttcatcttactcttgttgatatggtaacattagaaatggtgaaaccaaactatcgctgagaatggcctattgtatcttattttttttgctacccaaagtaatgaaaatattgctttctgtatgccttgtttgggacgacttcacttcaaaaattgcaacttctgtttttcaacttcaccataaaacagcttcaatatattgttaaggtggatttcaagagtttttagcttgcacatggactccagcttctataatataattaatttgtgtgagtttcaataattacctttgatgattagtggactatgatgagttggggagagagacatggataagtagatcgtgtaaccaatggggtggtgggta

SEQ ID NO: 3586 - DNA, 1048 bp, Zea Mays
tcaagtaaaactcctccagccccaccgccacctcccctcatgacaggaaagaaagcgcctgtgcccccacctccaccacctcaagcaccaaaacctcctggagttgtgcctccaccaccaccaccaagctcaaagatctcaaatgcaccagcaccacctccattattgggaaggggacgtggcaacacaactggaccaactaaaggccgtggcattggtttggcacaacaaagtaatcctcccaagaaggcttcactgaagcctctacattgggtgaaagtcacgagagcaatgcaagggagtctctgggctgatgcccagaaacaagggaatcaggctaggtctcctgatatcgatttatccgaactggagagcttgttctccactgcagttgtaaccagcacaagtgaaaagggggcaacaagacgtggttcagctattaacaagccagaaattgttcacctggttgacatgcgacgagcaaacaattgtgagataatgcttacgaaaattaaaatgcctctacctgatatgattaatgcaattttggctctggacacttccgttcttgataatgaccaagtggagaatctcattaagttttgccctacaaaggaagagatcgagatgttgaagggttataatggcaacaaagaaatgcttgggaaatgtgaacagttcttcctggagctgatgaaagttccacgtgtagaggccaagctaagagtttttgctttcagaattactttctcaacacaggtagatgaactaagaactaacctaaccaccataaacgatgcaacgaaggaggtcaaagaatctctgaagttacggcagataatgaagaccattctcacattggggaatgcattaaatcaagggacagcacgaggatctgctgttggcttcagattagacagcctccttaagctgtcggatactcgatctagaaacaataaaatgacgctgatgcattatttatgcaagtttcatggcaagcccactttgctctttgcataacgagagcacacccagtgctggaggctcc

SEQ ID NO: 3587 - DNA, 1484 bp, Zea Mays
cgctgctcgctccccctgcttcctctttctccccctcctcgactcctcgtcaagctcccctgaatcgcggcagcagcaccggggcagcaaggcgaggattttcctgctccgaatctacccggctcggcccgatgggctcgctgatgtcctgcctctccgacccaatcccgtcggggaacaggtccccgccgccgcagccgaagcggcgctcgtccacctcttcccgcggccgtggcggcggcgggagggactccgctaaggcctccgtgtccatagacgaggaggcgcttactgcagcagcggcgctcgtgctggggcagaggggcgcgtccggtggcctgggcgcgttcgagcggtccgcgtcggtgcggtacgcggccaagcggcagagccagggcccgccgctgccccgaagttgcagcacgcggccgaggtcgctcgctgaccccgagctccagccacagcaactcctagccaaggatttgaatactaaggatttggaaaccaacgtcattgttcttgttcatggtggtggattcggcgcttggtgttggctcagggattcaccattacgacacaaacaagattagcagtctttcagagtatgctgaaccacttacgtcttaccttaaaggcttaggcgatgctgaaaaggtaattttggtcgctcatgatcttggcggtgcctgtgtatcctacgcaatggagatgttcccatccagagttgccaaggcggttttcctttgtgcagcgatgctggcaaacgggaacagtgccctcgacatgttccaaaagcagatggacacgaacggtactctccaaaaggcgcaggaatttgtctactccaacggcaaggaccggcctcccaccgccatcaacatcgacagggcatcgcttagggacctgttgttcaaccagagcccttccaaggacgtgtcgctggcctcggtgtccatgaggcccatccccttcgcccctgtgctggagaagcttgtgctcacggccgagaactacggctcggtgcggcggttctacgtggagaccacggaggacaacacgattcctctgcccctccagcagagcatgtgtggtgccaacccaccggagaaggtgctgcggctgaagggggcagaccacgcgcccttcttctccaagccgcaggcgctgcacaagacgctggtcgagatcgccaccatgccgcatgtccgggcttcgtgagaacgtgtttgttcagcttcaggtttttgccggccggtgagcttacatggctgttgtacatgctgaggatgatggtatggcttgtggcggtgtggcagcgacagcgagtaggggatctagaatttcggcgtcgccttgacgaaggcatacccctccattatacactcacatctggcatcactttttttagaaaaaaaaaacaaaatcttattccagcctctatggctctagagttttagaatcaaccatttcattatatggttcag

SEQ ID NO: 3588 - DNA, 2311 bp, Zea Mays
cgcgctcacgttttgctcgctgccttcgcgttcgcattcgctctcgccgtcaccaaacctcaccgccggcattccctagtcccaccttctcctcgacaaagtcctcctcctaaaccctatctctgtctcaatcctatcatttgacccctttccccgccgccatggacgaggaccggagcgccgatcccgctcgcagcggccgcctcctctcgccgacgagcggtcagccccaaacccagacacagtcacagcccccgctccccatggacctcgcctcccagtaccaacgcctctttgcaccgtcggttttcctcccaccgatggcgcccccgccgccccgcctggcgtccagctcctgcttctcggccttcagcaactatcagagcctaccgacgctcgcgcccgcggtgggcgccggatcgcatctcgctcgctcggtccctaagccgccgctcttctcagtggactctctagctccgcttccgtactccaccagtccagcggcgagggcagcggcaggggcaggggcggcggtcccgcgttccccgccgtcgccaggcagctccgagctgcaaggcccgtccgcgtccggcctgccgccgcgtggggcggggcaccggaggtcccgtagcgatttcctcgtcgggttctcgggggcgaaccagctgcacctgccgatgactcctgcggctggggcgtacaggccgagggacgcctccgcactggaggagctattccgctcatacagggatccgaatctcggctcctccggggataacaataatgaaaggaacgatcacttaagtagacaactgaccggccaacgcgcttggagccccggtgataacagcgacaacgaggctgagagctgggcggtcagtggcagcgcagacaccagcgctagccatcctcgccattgccgcagcctgtcggtggacagcatcatggccaatctcaattttggaggcctggaccaggtttctctgagagtgccacctctgtctccagtggcagacgccagtgtcagcctctcgcgcactggaaccggagcatcgggcggtgcggctgcggctgcttcttctgaacttaccaacggagagttcagcgaggctgagatgaagaagatcatggccaatgatcgcctagctgagatcgctctttctgatcctaagagggtcaagaggattctagctaatcggatctcggcagcaaagtctaaggagcgcaaggtgaagtacatgggtgagcttgagcgtaaagttcgtgtgctgcagacggaaactaatacattatcttcgaaagcagcattgtcgcagagggaatgcgaggcacttcgaactctgaacaatgagatgaagatcaggctgcaagcaatggagcagcaagcacagctgaaagatgctctgaatgaagcactgacagctgaagtgcagcgcctgaaacaaatggctggcgaggccagtgatcttcatgtgccgaacggttcgcatcatcatatgaaccgccagattctcgaacagcagctgcagcaggtacagaagcagccatcagaggcccagcaggctcagcagcagcagcagcagccacaggaaccagagcagttcaaagctcagcaaaagcagtggaaccattaagacgattgatttcacagagcacatgcttgaagagcacccaagagagctccaggagcctggtgatgtatgagcagacagcagagcacagacatggcggagcagccaagcagatagatacctaggagtccgctgtcctgcccacgcaactagcacaagcgccagcgagggaacgcaagctaagctagctactccatgctcagcaggcagcaagaggaagcaatctcacgcagctccagctcccgctcctgcctctggcacggccggcgtcttggacaggtcctggagcagcgcgaggttctcgcggcggagcgcgctggccctctcccgcagcctctcgttctccgcgatgatgcaccggttctccagtgtacttgtgtgattgcaggaaactgtcgctgatgctgctgaaacttgagcagaggaagcttgggaaactcgagcagggcgggttagctgggtacctcttcctcctgatagcaactgaggcacgaggcggcgtcggcggcggcgtcttctgcagctgctgccgcttgaggttgacgacaacaagagacgggcgcttcttgctgctgctccaggaccaggagccggagcacatgttgccgtggtggatggcgtatacacggcctgctcctagctgctagattctttggagctcagcgcggtgacttcgggat

SEQ ID NO: 3589 - DNA, 2193 bp, Zea Mays
cagaaatccaaatttctccccacgtccccaccacagccatcgtccatttcaaaaccgcgcaggatagtcgcgtctcttctcatccttcccgtctctcccccgctccgctccaccccgctcaaaaaccctaggcggcgcccgaatcccggatcccgcgtccggctcccccagcgcctccgcccgtgctcggcgtccatcgttgccggcctccccgatggacccagcggggccgcgcgtggccacggatcccgccggatcgggtgccgcaccgccgcgcgaggaattggacaggagaggaggggcgtgcagcggcgccgcagcggcggaggggagcgcgtcgcggctcgcgggcgctggactgggagatccgagggctggaattctggaatcttcaggtcaagcagaagcatatttgcacacatgtaccatggatgtttctcagttgactgctgaagtgcagaatcaatggagaagctgcatggcagtgagtccttgccatgctgtaaagagaacatcggaacagttcgccaacctaagcctgatccagaacatgttgacaataggatgagtgttgcacgtcttgggttggaccttaacacagtagatagttctgatgcagcagagcttaaccctttcttcccttacaagaagctgggacagtcgaaagtcagtgatccatcggaatgtggcagcactactgctgctacagcagaaagtgagtcacacaggaaatggagagaaatgaagcggaatggctttctttcttcgtctcatggaaatgcagtggtgcctaggccacgtggtcggcccccgaaaaggaaaaaagatgatgaattcaaaaggagcacttccacacagcatggccaggctaacaagtctgttaaggttgctgctcctagtggcctattatctgggctaaaccctggaatcattaaccatgtgagaaatagcaagcaagtttactccataataaaggctatggtacactctgagaggcttgagaatgagaagcagcctgcatttactagtcaaacaggtggaagagggagagaagccagtgagggaattcaggatgagaaatatggtgctggtttcaagaagtgccatatgttgatgaaagacaataatgcggtgtttcaccaagcactgcctaccacatcacagttccttgcacaggacggcgataggctcaaactgcaactctcatcagcagtcactatgtcttcagacagggcctgcagtacatcagctgatgatccagcaactaatcatgattacatgactgtactgtcagtaaaagtggttggaattactgcatcaggacatcaggggacgccttgctgctttaaagcgcagcaggaagagagtcagaaatgctcttcatacagaattgccttacctaatctcgacagaattttcatctaaccaagagaatgaatcatccattgcaaatacgtgtgatgctggatgtactgaaaaagcagtttcagaagcgcatgtggcacgatggaggtctctgtttgtccagatggaccgagcacttcaggaggaagggaaacagctggagaaccggttgaagcaagtgcaagaaatgcaatcgaattgtgataaaggcctcaaacacatgagctgtgaagctcctctgctaggacctattcctgagctatggaagctgaagaacccagatatttctgagagtgagtgggcggtgcaagctgccgccgcatcaatctactcgacctgcaacatggccatgagaacggagaacgtgccttgcttctgacctcacacttgtagttgtagtttagtttcttgcttttgctgatttttacctcaaaagttaggcctcttttattaccttcagtctttgtgaattgtgaccccttgtccatacactagcggcgagtcatgtaacgaggaagaaacttgatgtatgttgtcaccgtcctacgatttcacgggcccgtgaaagaacacattctttttatacacgaacatggtagtagtagtagcgatgagatctcggaacaggtgcgaagggcacgattggttgcctgcatagattagcaacgcatagattagcaaccaggcttatatagcatactaggtggatgcccgtgcgttgcaacgggaagataaaatatcacaataactcatgtacaaatatggtataatattatagaaaaaggttac

SEQ ID NO: 3590 - DNA, 2332 bp, Zea Mays
aaaagctatcgcttatcatgctaggctaggcagctttgttgagaaggagcacgggggaagcccggcaagatcactacacgtggcatgtatgtccaaaactccaaatgccgagtagacagtggcggcggtagagagcgctgttaccttgcggggtgacgggggcaccttcttcggcgcggctgcagctgcagcatcggcggccgcgccggacgcggaggccgtgctggcgtaccgctcgggcgccgcgccgcgccgcgggaagccgcgaagtagggcgttgcggagggtgcgtcgccacgcgagtgcggtggaagatgacatcgggaacgcgaggggagaccaggcgcgggaagggcgggaggactgtgaagagcgcgaggagggcggcggcggcggcggcgctgatgctgatgctggtgcaggggctgatgagccggattcccgttcggcgtggccgcgtggggagcaagcagaagtgcagaactgcacaaggagagggcccacataaccatttctatgatattgcgcgtgtctcagtgtatcggcccagtttttcatgggctgacccggttatgtggccttgttagttttcgcctaatttcaaataacagcaatttcttagtggcccgtacactctgcagcagtgcggtgcgggcgtgcggcctccctttttttctccagttcctccggcggcggcgtgcttggcggtgcgccaggtgcccagatctccaccatcttagtcgccggcgacgagcatcaccaggttcccgatgaccatggcgcagcgcacgatgtgcctgcttcggcggtccattgggtttacagggccgcaggcacagagagccctgagtaccactgccgcgccggcggcggagggtgcagccgtggctgaagctacggcgaaggaggcgaagaggaggaggaagaatctgtttgacgtagtgcagttcctgccagagtggggcattggatacaaggttgccaagaccacctggcgtgatgtctcctatcagatcaccaagatcaacctgtacaaggatggtcggcatggaaaggcgtgggggcttcggtacaaggcagattctcttgtaggtgtgcaagctgcagacaccccaactaggatcagcggtgttaacaaacgtgggtggaagtacataaaagaatcacagaagaaactacaagaagcccccaaagtagacgtagctgttgctgctgcctagtttgtagttacatgcatgtttgttgtaagatgattcggtaaatctttagatggctgttgccagggttttcattctacactgcggaggcgattgactggtattctcagtcagatgatgctggacggagtcatgcctacacgttcgcaacgcaggacaagtttggtgttcagccccgcgaggaccactacatggtcgatctgggactggtgttctggtatggcaggcggtgctggttgcctgccatctttcacggcagcgaggctgtaggcactcatctaattttggaagcagcaagcgagcgaacaaacaaacataccattgtgtgtcacaaagatgtcgaaaaacaaacttgcttgtatcaaaattagctcttcatgtatactgtaccaaatatacgcaaatgaccccgcagcatagttaattacaagctaaactcataaaaggaaattccttcaacattcccattggcatcctcggtggtcggtgctgaagccgcaggcaatggtcttaagtgactgtcgtagtcaagagaggttccaggtattgcttgaacttatcttttgtcattgccccttctcgccggctatctgctacctctcggccattcttgaagaaaatcaaagtcgggagaccatagaccttgtactcttcaatcagctgcggattggcgtcgtgatcgatcttgacgatttttactcgcccgtcatattcctgcgtcacaagattagactttaatcaaagctgtgattctggttagaagcaagcaatattgtttcctcgcacatatgtttaaagcatcacattctgctatgaggtgccagccaatgatggatcatctccctcaggatcgtaacactagccttgaatcaaacatgctgttccagtgttcctaatagcttccacacctgatgaacactgaaactgtcctcactttctaaagcgttttggccactgaatttcagcaaagcaaaaaactggaccgtggacttgtacactgatgccaactcaaatcacagacatgaacctatggacaagagcacgacatggcaccagcacagacgaacacagacatggataaggataagcacccgccgggaagcaggcaagcagca

SEQ ID NO: 3591 - DNA, 2670 bp, Zea Mays
ctccaacgaaggaaagtctgatcccgccatggcgccatctccacccccgcttacctctctcggccgccatcatggaaggtccgaccccgccatcgctgtccccacgcggttgctccaaggaaggaaactctgatcccgctatccccgcccccgctctctctcgccatctccgtgcggctgctccaaggaaggaaggtccgaccccgccatcgccatccccgcgtggctgccttcccctctcgccatccccgcgcggctgctccaaggaaggaaggtccgaccccgccatcgccatccccgcgcgcccggtcgagcgccaccagccgcataagtctgggctagcgccgccggccaccattggctcggtcgagcacctcatgcccacgacggtcagtcgccgccttcatggctcagagtcgtcggtccctgcccaccaaggtcaccatgggctcgacgacgatggcaacaaggtcaaggtcgtcatcacaacccaaggtagtagctcttcagttcccccgccattccccaccacccctccaccgtctccaccgcacacagcatgcccgactctattctcctccccgaaatccccgtggcgcgcagatctagccccggctcctcgccggcacaaaccacgtgcgcgccctcgacccatggcatccccaaatcccgcccccggttcctctcccttcccgttcgcggacgacgcttccgcgcgttgacgtacgcgtccccaaatccccggttcccctcccttcctgttcgcggatggcgcttccgagccctcgacccatggcgtccccaaatcccaggttcctctcccttcccgttcgcggacggcgcttccgcgcgtcgacgttcgtgtccccaattcctgccccggttcggcgcttccccacatcgaggcaccacaccatcgccatggggtatcgacaacgtcgacagcgtgtggccccatcgttcgcagaccaacccggccacggttgccctgctgctgacggataaggacctggagtcggaggagagcatgtacgagcggtggagcagcgtgcacaccgtgtcgcgggacctcacggagaagcagagcaggttcgaggcgttcaaggcgaactctaggcacatcggcgagttcaacaagatgaaagacgttccctacaagctcggcctcaacaagaacaaaaggaaagttgagaagattgaaaatgactatgccaaatgcaagttcgttgcccaatgttttatatatggtgatagtttcagctctggaatttagctgaagttgaatgcttcatatgtttagactgaaattttggtactaaactggtagattattgttatttaaatatataaaaaaaatcatcttctacgattcagagaaattatgtgaagcttcaatttgactccatgcaacaggtttagctattgacaacctcgattacattttcacagtgggagctccttcgattattaaccacagcatatgttcgtgcattgcaaccgataaataaagatgaagaggtatctataagctacattgagactgcggcagtcaccaagaagagaaacaatgatctgaaacagtacttcttcacctgcacatgtccacgctgtgtaaagggttttgatgaggatgcactacttgaggggttcaggtgcaagagccaagcatgtgatggctttctgctgcccaactcaggtaaaaaggcttatacatgccaaaaatgtggtgcttctagagatgtggaagagataaaaaatatgagaagcaaaatactacagttatcggataaagcatcttcatttctttcatcaggaaataaggctgaagcaggttctatctacaagataatcaaacagttagagagaaatctgtaccatgctttctcaactactttgctgcacacgtgcgaaacactattgaagatatatctggaattacaagattggtggactgcgttgacatactgtagattgacaattcctgtttatgaaagagtttatccaccttttcatccgatgattggattacaattctatacttgtggaaagcttgaatggtatggactattagcccttacctatttacctcacacaaggacaacaatcatatgagtttattccttatccggtataaatgtttgctgttaatgtcttatgctttactaatatagctgttattgattctgacaaaagttgattttggatttgacactgatagtatagggtcaataagagcaactctaaaagcctctgtaaatttcaatctctatatctaacatttggagagccattcaatgaatattatttttgtatatctctcttatctgcaacaggttttccaatatttgttctctatacttcgatagcttatcatattttttctttgttgaaaaacaagaaaactaaatgtagccgcctcttcaaaaatggagtgaaggaaggatggttttggagagtggtttagagaagtttatctattggagtttttttatttgttttctaaattttgttataaagaaacatgtagaatgtcttagagattctctaagaaaaatgctagctatgaacttttataaagagaagttcagaatcagttctttttattctctaatatatatgttgttcgtttccatgtaattattatgtactaacatttatcgaataattttt

SEQ ID NO: 3592 - DNA, 3052 bp, Zea Mays
ctctcggccgccatcatggaaggtccgaccccgccatcgctgtccccacgcggttgctccaaggaaggaaactctgatcccgctatccccgcccccgctctctctcgccatctccgtgcggctgctccaaggaaggaaggtccgaccccgccatcgccatccccgcgtggctgccttcccctctcgccatccccgcgcggctgctccaaggaaggaaggtccgaccccgccatcgccatccccgcgcgcccggtcgagcgccaccagccgcataagtctgggctagcgccgccggccaccattggctcggtcgagcacctcatgcccacgacggtcagtcgccgccttcatggctcagagtcgtcggtccctgcccaccaaggtcaccatgggctcgacgacgatggcaacaaggtcaaggtcgtcatcacaacccaaggttcgaggcgttcaaggcgaactctaggcacatcggcgagttcaacaagatgaaagacgttccctacaagctcggcctcaacaagaaaaaatcatcttctacgattcagagaaattatgtgaagcttcaatttgactccatgcaacaggtttagctattgacaacctcgattacattttcacagtgggagctccttcgattattaaccacagttgtgtaccaaatgcagttttgatatttgatggtaggacagcatatgttcgtgcattgcaaccgataaataaagatgaagaggtatctataagctacattgagactgcggcagtcaccaagaagagaaacaatgatctgaaacagtacttcttcacctgcacatgtccacgctgtgtaaagggttttgatgaggatgcactacttgaggggttcaggtgcaagagccaagcatgtgatggctttctgctgcccaactcaggtaaaaaggcttatacatgccaaaaatgtggtgcttctagagatgtggaagagataaaaaatatgagaagcaaaatactacagttatcggataaagcatcttcatttctttcatcaggaaataaggctgaagcaggttctatctacaagataatcaaacagttagagagaaatctgtaccatgctttctcaactactttgctgcacacgtgcgaaacactattgaagatatatctggaattacaagattggtggactgcgttgacatactgtagattgacaattcctgtttatgaaagagtttatccaccttttcatccgatgattggattacaattctatacttgtggaaagcttgaatgggactggttcggagggagacggcccctcactctctgccctcctgctgcctgcctactgctatactgttctcttgtgttcatgttcatataaaattcagtttcatgttcatattttcataactgtatatgttcatcttatcatacagtttgggtccttgaactttggaacactgaatccctactactctccccccataaaggctccgccgccggtgccgtggcctgcatcgcatgcccgacgctctacgcctacctgaagaagacagaccccggagtgcccgcgcagctgctggagtacgacgagcggttcgggcagtacggctgcgacttcaccttctacgactacaaccgaccggaggagctgccggcggcgatgaagcacgcctaccgagtcatcgttgccgaccctccctatctggtactgtttctaccctaccagagattgcctattaaaaagtgtttgatcagttcttaacatttgagatgagaggaaatatcgaggagaaatggctattattcattggttgatgatgtagagtaaggagtgcttggaaaaggttgccaaaacagtatctttcctcgcacgacctgaaggttcattcctgctgctgctcacaggggaagttcggatggaccgggcattggagctgctgaatgttcgtccctgcggtttcaggcctcgccactcgaacaaactaggcaacgagttccggctgttcacgaattaagatcctgctgacagacttggtggttgggagcaaagtgatggtgcccccatttaactataaactaatacaatttttgttctagagctgttccatctttatgaacatgttgcatctttgatccacagctcactgatccctccaatttaaattgtagtgacaattatttgaggaatctgtgtgctatgatgtatgattaatcaaacatttacactgttagtgtacctcattttaatttcattttaaaatacactgttagtgtatgtttcattttaatttcatcagtattctttagaatgtctcgttggcttattcagatttatagccaaaatgacattatcttggggatagttcatcagtattttttaatttcattatctcgttcggcggcggcatcccggacgggcacagcctgcacactggcgggcaggtcgtgaaggcacccaccatcgagcagaacctgtcgtgcaaccttgagtagctgtacaagggcatcaccaagaagttgaatatttctagggaaattgttgacgcaagtgggcgacgcttctccttcagacgctcaaccagtcaagaaggagtccgagagccaggcatggctcggattaggaccgaatgccgtcaagtccaacctgaacctgagctagcacacaacgacacagccaaataagacagcacagcaacctcaccaaagcctttgcaggacgatctgaaaatatgctttgccactagagtaccgaaaccataaatatcctctcgttatcgtgttttagtgttctgtttaggccgtggtcctacgccctcttgtcacatagtctggatgtaaagataagtagccagccatgactgagagaagttttttgggggggggggtgttaacacacggccactctgaattggccatgctaaggaaaatgatagtagtgcaaagagaagtatatgtcttttttctttttctttttctgaaagccagatcgtttggctctagccttgatgtatgcagaacaagtgattgtaatggattctgagtatcctcatcgtcttgctgttgcttc

SEQ ID NO: 3593 - DNA, 3127 bp, Zea Mays
ctgatcccgccatggcgccatctccacccccgcttacctctctcggccgccatcatggaaggtccgaccccgccatcgctgtccccacgcggttgctccaaggaaggaaactctgatcccgctatccccgcccccgctctctctcgccatctccgtgcggctgctccaaggaaggaaggtccgaccccgccatcgccatccccgcgtggctgccttcccctctcgccatccccgcgcggctgctccaaggaaggaaggtccgaccccgccatcgccatccccgcgcgcccggtcgagcgccaccagccgcataagtctgggctagcgccgccggccaccattggctcggtcgagcacctcatgcccacgacggtcagtcgccgccttcatggctcagagtcgtcggtccctgcccaccaaggtcaccatgggctcgacgacgatggcaacaaggtcaaggtcgtcatcacaacccaagaaaaaatcatcttctacgattcagagaaattatgtgaagcttcaatttgactccatgcaacaggtttagctattgacaacctcgattacattttcacagtgggagctccttcgattattaaccacagttgtgtaccaaatgcagttttgatatttgatggtaggacagcatatgttcgtgcattgcaaccgataaataaagatgaagaggtatctataagctacattgagactgcggcagtcaccaagaagagaaacaatgatctgaaacagtacttcttcacctgcacatgtccacgctgtgtaaagggttttgatgaggatgcactacttgaggggttcaggtgcaagagccaagcatgtgatggctttctgctgcccaactcaggtaaaaaggcttatacatgccaaaaatgtggtgcttctagagatgtggaagagataaaaaatatgagaagcaaaatactacagttatcggataaagcatcttcatttctttcatcaggaaataaggctgaagcaggttctatctacaagataatcaaacagttagagagaaatctgtaccatgctttctcaactactttgctgcacacgtgcgaaacactattgaagatatatctggaattacaagattggtggactgcgttgacatactgtagattgacaattcctgtttatgaaagagtttatccaccttttcatccgatgattggattacaattctatacttgtggaaagcttgaatgggactggttcggagggagacggcccctcactctctgccctcctgctgcctgcctactgctatactgttctcttgtgttcatgttcatataaaattcagtttcatgttcatattttcataactgtatatgttcatcttatcatacagtttgggtccttgaactttggaacactgaatccctactactctccccccataaagataggaaggaacacaaaagggtcaaatcaatacccttatgtctccccttctggaccaggctccgccgccggtgccgtggcctgcatcgcatgcccgacgctctacgcctacctgaagaagacagaccccggagtgcccgcgcagctgctggagtacgacgagcggttcgggcagtacggctgcgacttcaccttctacgactacaaccgaccggaggagctgccggcggcgatgaagcacgcctaccgagtcatcgttgccgaccctccctatctggtactgtttctaccctaccagagattgcctattaaaaagtgtttgatcagttcttaacatttgagatgagaggaaatatcgaggagaaatggctattattcattggttgatgatgtagagtaaggagtgcttggaaaaggttgccaaaacagtatctttcctcgcacgacctgaaggttcattcctgctgctgctcacaggggaagttcggatggaccgggcattggagctgctgaatgttcgtccctgcggtttcaggcctcgccactcgaacaaactaggcaacgagttccggctgttcacgaattaagatcctgctgacagacttggtggttgggagcaaagtgatggtgcccccatttaactataaactaatacaatttttgttctagagctgttccatctttatgaacatgttgcatctttgatccacagctcactgatccctccaatttaaattgtagtgacaattatttgaggaatctgtgtgctatgatgtatgattaatcaaacatttacactgttagtgtacctcattttaatttcattttaaaatacactgttagtgtatgtttcattttaatttcatcagtattctttagaatgtctcgttggcttattcagatttatagccaaaatgacattatcttggggatagttcatcagtattttttaatttcattatctcgttcggcggcggcatcccggacgggcacagcctgcacactggcgggcaggtcgtgaaggcacccaccatcgagcagaacctgtcgtgcaaccttgagtagctgtacaagggcatcaccaagaagttgaatatttctagggaaattgttgacgcaagtggctaaccagatggaccagtccctgtcagatttatgcttggttaatttctgctcgcccggtgcaggcgacgcttctccttcagacgctcaaccagtcaagaaggagtccgagagccaggcatggctcggattaggaccgaatgccgtcaagtccaacctgaacctgagctagcacacaacgacacagccaaataagacagcacagcaacctcaccaaagcctttgcaggacgatctgaaaatatgctttgccactagagtaccgaaaccataaatatcctctcgttatcgtgttttagtgttctgtttaggccgtggtcctacgccctcttgtcacatagtctggatgtaaagataagtagccagccatgactgagagaagttttttgggggggggggtgttaacacacggccactctgaattggccatgctaaggaaaatgatagtagtgcaaagagaagtatatgtcttttttctttttctttttctgaaagccagatcgtttggctctagccttgatgtatgcagaacaagtgattgtaatggattctgagtatcctcatcgtcttgctgttgcttc

SEQ ID NO: 3594 - DNA, 1491 bp, Zea Mays
gccaaaccgagctaactaagaatcgaagtagctgacaagcatttcgtcccgctttgacagtgtctttgaagcctgaactttttgaaggattgaggtttgacttcacaaaagggttgaatcaaaagttttctcttagccacagcgtttttatgggctccttagaagttccagcccaggggtctgaaactattaaagttccaactgctcattatgaatttggtgccaattttttagatccaaagttaatgctcattggaagggtgatgacagatggaaggcttaatgctcgcgtgaaatgtgatttgacagacaatctgatgctgaaagtaaatgcacaggtagatggatcaaagagtttaggttcagtggttcatcctttccttcgttgatactttgctttccttattctactgatggttgttctcttcccagcttacccaagaggcacattactcacaaggaatgtttaactttgactacaagggaagtgactatcgagcacaattccaaatagggaacaatgcattctatggtgcaaattatattcagagtgttactccgaacctatcaatgggaactgaaatgttctggcttggtcaccaaaggaagtctggaattggttttgcctgtcgctataacacggacaaaatggtgggcactctacaggtcgcaagcactggaatagttgccttaagttatgtccagaagatttctgagaaggtttcccttgcgtctgatttcatgtataaccatatgtcaagagacgtaacttccagctttggttacgattacttgcttaggcagtgccgtctaagaggcaaaattgactcgaatggtgttgttgcggcatatctggaggagaggttgaacatgggtgtcaactttcttctatctgctgagattgaccattgtaagaagaactacaagtttggtttcggaatgaccgtaggagagtaattctgctaaaacaattgctgagaagagcacatgaggactttcgcagtctgctttgcattgtatgttaagatacttcaggtctcagttttgattgatcaggttctgccccgtcgaaaaaaatactagctgttgctgctttacagggttttgtctcagtgtattggtggttgtttattttcagctacttgagcatgggggccatgattctttgttcatcttggatgtaactagctgattggtgttccaatgatgttgtatttgcagaacgattttttccttttaaatcaccaacaaccaccacactaggctttttctgtaccatcatggacgggccacaagattttacagttcaaagctttggcacttgccatatttgatgtcgtcttgtgcttttgctcatccatgtaagtcagaaatctcagttcatatcagtgcttttgctcatccatgtaagtcagaaatctctgttcatatcagtttttttattaaaaaaagtttccgctgcataaaaagagaatgtggaatcattgtacc

SEQ ID NO: 3595 - DNA, 3524 bp, Zea Mays
aaatagacgaataacttttttttttacgtgcttttgatctgcaacagcaggtatgctgttggtttgtatcgcagtcagtttctgaagtcctgaagtcgtcttctccacctcgaagcaaaccagcaagcagtgcgaagttagtcgccggccggcagcgtccccctcgccccccaagtccctagtggttgacactgacagaggtctgcagagactagcggcgatggcgccaccctgccccgaaccctaaccccactccaccaccggccatgggatcccagccgccggcctcccgcgcggccctggagcacctcgctacgcttgaccccgccgcactcgccggcctccctgtctcctccccgctcaccgtccgctccgccgccgtctccgcccacctgctctatctcggcaccggcggcggcaagctgctcctcttctccctgcaggatccctccactcctgagttcctccgcctcctccccatcggcgccaccctacccgtctctgctatcgtcccgctcccctccgtcgcccgcctcctcgtcctcgctgacggcctcctcctcctcgccgacccgctcctctcgcgccccgtccgccgcctcggctccctgcgcagcgtcaccgccgtcgccgcccgccgcgtcgtcctcgcggacccatcatcatgctccgtcgccatctccgtcgggaagaagctgctccgtgtcgacttcacgctgcacgacgccgacgagctggatgtacagacgcgcgagatcgcctcagtcgagggggtcaaggcgctcgcttgggtcgacgattctgtcttcgttgccactgccactgggtactccctctactcgagcaccaatggtcagggtgtggatatattctcgctcccagaatccgccggtcacccaagggtgaagccgctctctggaggtgacgaggtgatgctcctggtcgacaatgtcggtgttgtggtcgatagatttggccagcccgttggaagcagcttggtgttcagcaccacgcccgactacatagctgaggtattcccctatgtgattgttgctggggactccaaggtcgatgtgtacaggaggaggaacgctgcacacctacagaccattccggttgccaggactggtcaaggcgttctgattgtggctggggatgatgatgggatagacacggagctagttgtgatcgctacaacttataaggtcttttgctaccgtaaagtatctgcattggagcagattaaggcatctttacgaagaaagaactacaaggaagctatttctttgctagaagagtttgagtcggacggtgaaatctcaaaggatatgatctcctttgtccatgctcaacttggttttttattgtttttcgacttgcgtttcgaggatgctgtgaatcatttcttgctatcggagactatgcagccatcagaagtatttccattcattatgcgggatcctaaccgttggtcagatctggtgccaagaaagcggtattggggtttgcaccctccccctaagccccttgaagaatttattgatgatggactggtaacagttcaacaggcattgtttctgaaaaaggcaggtgtggatacagttgtggatgaagatttcctttcaaacccaccaagtagagctgatcttttggaactagcgatcagaaatattatcaggtacctttgtgcatcgcggatgaagaatctaccttctccagagatggaaggagttgatactcttctgatgtatctttatagagcacttcatcttgttgatgacatgtataatctcgcatcttctcagaatagctgtattgtggatgaactggaatcccttttggatgactctggacatttgcggacacttgctttcttgtatggcagcaaaggaatgtgctccaaagccctttctatatggcgtgtactggcaaggaattatagtgcaggtttgtggaaggatctgtctgagaatgattcttgtggaactttggttactaaaaggtctggcgaggaaattgccgctgtagaagcagccaagatcctcaaagcattatctgatgaggaccttgttctggaacatcttggatgggtggcagacattgatcaagatctagcgattgcagttttaacatctgagacgagggaaaatcaactctcaccagaaaaggttgttgcttctgttgatgcagaaaaggttgtgattcatcaaagatatttgcagtggttgattgagggtcagggctgcgatgatcctcactatcacacatcatatgctctttcactggccaaatctgcaattgaagcagttgatatggagtctaaatatagagggaaagatgatagtgaaattgattctgatgcacagtttgtttattcagtaagagaaagcttgcaattgtttctgcaagcttcagacctgtatgacccagaagatgtgctcgatgtgatagcagaatcagagctatggctggaaaaggcaatattgtataggaagatgggccaagagaatattgtacttcagatactagcattgaagctggaggatagtgaagctgctgagcagtattgcgcagagattggtcgagatgatgcttatattcagcttttgggcttgtatttggaccctcaaaacgggaaggagcctatgtttacagcagctgtacgacttcttcataatcatggtgaatcgttggaccccatacaagtattggagaaattatctcctgatatgcctctccagctggcatcagacacaattttacggacactgagggcccgagtgcaccatcatcgtcaaggacaggttaagcttatgagagatgctgtcttaccagttgaatttctttgctcctatatgatcctttgcatgttttagatagtccataatctatcacgtgcgacaaacctggacgtgcggttgacaagactggaggagagatcgaggcatgtgcagctaaccgatgagagtatctgcgactcctgtcgagctcgcctcggcaccaagctatttgctatgtacccaaatgactcggttgtttgctacaggtgctatcgatcccagcaaggtgaatcttcatcagggcatggtcgtagcatgaggaaagatgttatattcaaacagagctggcttgtaagtagatagatagcgaggaaggaatgaagagtggtgatcttgaggccagcatttggctgtggctgctctgaaatgggcaccaagtttttttgtctggatgggctctctggaaacttgaacagggtgttgtatattctttttgaggccaatgaatgaatatatacaaatacaagcatacagcataccggaggatgtctagtctgttcttccgtttttttttgtactttagtttttttgtcaaaattttatattcacacctgtagtgggactattaccgtatgcgtcaaggttatacggctcggtgctgtaagtcatggcactgaagtagtattatgtggtgtggacgatacaagtcatggcaccgaagtattatgtcataaatggtgtgga

SEQ ID NO: 3596 - DNA, 1985 bp, Zea Mays
ccaacacctcgccgtctactcgtctcccactcccccctgcaccaacaccaccaatcgggtcccccaccacttccgtcgccctcgcccgctccgccgcgccccgtacagcggcgacatggccgagtaccgcctcggacttcagctgcacggccacaccgacgacgttcgtggcatctgtgtatgcggcgatgctgggatcgcgacatcatcgagggaccgtactgtgaagttctggacccggaacccagaaaaggagagcgaatatgttctctccaagacactcgcaggacattcgagttttgtcggcccattggcttggatacctccttcagaccgttttcctgaaggtggaatcgtctctggtggaatggacacatttgttttcctctgggatctgcaaaaaggagaagttgccgagacaatgaaggggcacagttcgcaagtcactggactcgctgtggacactaacggtgacatcatctcttcatccatggattgtactgtaagacgttggagaaatggcaatgctatagaggtttgggaagcgcacaaggttgcagtgcaaactgttctaaagctgcccacaggggaactcttcactggttcaagtgattccactattaagctatggaaaggaaggacttgcctacagactttctcaggacatgcagacactgttagatttttagcctcaatgccaggtctaggaattctttccgcctcacacgacagcactgtcaagttatgggcgttgtcaggtcagcccctgctggacatgatcggacattcttctcttgtatattctgtggatgcacattcttcaggtctaattgctagtggtagtgaggatcgctctttgaagatatggaaagatggtgtctgcgttcaaagcattgaacacccaggatgtatatgggatgctaagttcttgggaaatggagatattgtaactgcttgttctgatggcactacaaggatatggacagcagattctaacaggttctgcagtgatgaggaaattgcagcttatacagatcttatttctcaatacacacttagcagaaagactgttggtggacttaagttgatggatctaccaggtgtggaggcgctgcaagttccagggaactccgatggacaaacattaatcgttcgagaaggggataatggtgttgcatattcatggaattcagcagagttaaaatgggacaaaattggtgaagtagtggatggacctggtgaagctgctcaaggccaagttcatgatggtgttcggtatgattttgtttttaatgttgatattggagatggagaacccatacgaaaactaccctataatcgttcagatgacccatacacagtcgcggacaagtggctcctgaaagaaaatctgcctttgacatatcgccaacaggttgtagaatttatactgcagaattctggccagaacaactttgttccagatccatcttttcgggatccctatactggggccaatgcatatgtgcctgggcaaccatcatcatcatccaatggtaatactccggaaccaattttcaagcacataccgaagatctggtgctggcggttaccacatgagtggggtctagggaaggaataaccgagccaagcctaactcctgcatttttgcagagaggatgcattgaaccgagaacccaggacctttggctcagtggaaaggcttctcatcactgtgccagacctatccttctaacaatattgattatgttaatataatatatatgtaacatgaactaattgtcttgccaaatcaaacaaagccttgtgcaaaacaataaagcagtatagatcaaaatttttatccaatcatctgcctcatcttgttacattaactgttgattgatgctttatattttttaaaccagaagcaagttgccatgaaaataatacatgagttattttacaacttttgtgaattaacccggagcctgcttatttgattt

SEQ ID NO: 3597 - DNA, 2910 bp, Zea Mays
aacacctcgccgtctactcgtctcccactcccccctgcaccaacaccaccaatcgggtcccccaccacttccgtcgccctcgcccgctccgccgcgccccgtacagcggcgacatggccgagtaccgcctcggacttcagctgcacggccacaccgacgacgttcgtggcatctgtgtatgcggcgatgctgggatcgcgacatcatcgagggaccgtactgtgaagttctggacccggaacccagaaaaggagagcgaatatgttctctccaagacactcgcaggacattcgagttttgtcggcccattggcttggatacctccttcagaccgttttcctgaaggtggaatcgtctctggtggaatggacacatttgttttcctctgggatctgcaaaaaggagaagttgccgagacaatgaaggggcacagttcgcaagtcactggactcgctgtggacactaacggtgacatcatctcttcatccatggattgtactgtaagacgttggagaaatggcaatgctatagaggtttgggaagcgcacaaggttgcagtgcaaactgttctaaagctgcccacaggggaactcttcactggttcaagtgattccactattaagctatggaaaggaaggacttgcctacagactttctcaggacatgcagacactgttagatttttagcctcaatgccaggtctaggaattctttccgcctcacacgacagcactgtcaagttatgggcgttgtcaggtcagcccctgctggacatgatcggacattcttctcttgtatattctgtggatgcacattcttcaggtctaattgctagtggtagtgaggatcgctctttgaagatatggaaagatggtgtctgcgttcaaagcattgaacacccaggatgtatatgggatgctaagttcttgggaaatggagatattgtaactgcttgttctgatggcactacaaggatatggacagcagattctaacaggttctgcagtgatgaggaaattgcagcttatacagatcttatttctcaatacacacttagcagaaagactgttggtggacttaagttgatggatctaccaggtgtggaggcgctgcaagttccagggaactccgatggacaaacattaatcgttcgagaaggggataatggtgttgcatattcatggaattcagcagagttaaaatgggacaaaattggtgaagtagtggatggacctggtgaagctgctcaaggccaagttcatgatggtgttcggtatgattttgtttttaatgttgatattggagatggagaacccatacgaaaactaccctataatcgttcagatgacccatacacagtcgcggacaagtggctcctgaaagaaaatctgcctttgacatatcgccaacaggttgtagaatttatactgcagaattctggccagaacaactttgttccagatccatcttttcgggatccctatactggggccaatgcatatgtgcctgggcaaccatcatcatcatccaatggtaatactccggaaccaattttcaagcacataccgaagagtggaatgctgtcatttgagacagctcagtttgatggaatcctaaagaaagttgcagagtttaattcaaaactttcatctgactcgagctgcacgcctacacatgtgacttgcactgagaagtatattgtatagaagtatgttgaaagggaggacatggtctgcatcgaagatgtgaacagaaacaattatctctgtctgagacggagatgtcaagattacctgccatagtgaacgtgttgaaagagacatcattttatcacacaagtaagcttgcagatgctgatatgacattgttggtaaagatattgaagtcttggcctccacaaatgatgtttccagtcattgattttctgagaatgttcgtgttgcatcctgatggagcttctttacttctcaagaccatcgaaactggaaatgatatacttttggaaacctttcgtaaagctgttgcgtcgcctgtacagccagcaaatttgcttacagtcctcaaagctgtgacaaacttgtttggcaactcatgcttgcaccagtggctgaggacccactgtgctgagatcattgattcggtgtcaaactgcaagtcttcttttagcaagaatgcacacttggcatatgccacgcttctactgaactacgctgttctttcgattgaatcaaaggaggaacagagtcaggcgcagattctttctgccgcccttgaaatcgccgaagatgacacccaagatttcgactcaaagtaccgggcacttgtcgcaatcggttctcttatgctcaagggccttgtgaagtcccttgccctcgaccttgatgttaagagcgttgcaagcagcgccaagtcttcaatggaccagaagattgcggaagtaggaggtgacatcgaatcgctaacaagatgactacaataggtttgcgtgcacttggtcgttgcggacattgttgctccttcgctcgaggcgctaccatgcataacttaaagccggtctgtgttgcagaccaattcagacgccctccacgtctctaccgaaaaatcgcaatgggttatgattattttttcacctttgtaaccatcatggaagtgtggattttgggtggtagcgcttagattttgtaaattgaatagctgggctactctgcagatacagttcaatatttctcgcggagggatgcagatcagacacgcaacgaatatttcgatatcatctgcatttctatcaggcacgcaactacacacaaaggacctcctaaacgtgtcacctaaagggcaagaaacgaagcaaatggaagaaaaacgaaaaggaaaataaacaagtaaatcatcacacaaaaaacaaaaata

SEQ ID NO: 3598 - DNA, 2291 bp, Zea Mays
atctcatctcagatcgtctctcatccaacctgatcccattcacatccccttccgattctccgtcgcctgagcggctgagccaacttgccaagccaagcaagccaagtcgtcgcctccccgacccaacgccgcgacccccttgcccgtccgcgaccgctgcagcacctcggatcccgccccaatggcaacagcgtgtccgccgctctcgctgccgtccacctccctcttccgcggcaggtccgcccgcgccgggcccagacgcaggcagctcacggccgtccgctgcagcgccgtcggagaggcggtagtggaggaggcctcgcccaggacggcggaagagccgctgctggtgagcgcaatcagagggaggaaggtcgagaggccacccgtctggctcatgaggcaggccgggaggtacatgaagagctaccaattgctctgcgagcggtatccttcgttccgtgaaagatcagaaaatgtcgacctagttgttgagatctctttgcaaccatggaaggttttcaagcctgatggagtcatcttgttctcggacatccttactccacttcctgggatgaacataccttttgacattgtgaagggaaaaggtccagtgatctatgatccattgagaacggcagcagctgtgaatgaagtcagagaatttgttcctgaggagtgggtcccttatgtggggcaggctctgaatattttgagacaagaggttaagaatgaagctgctgtactaggttttgttggagctccgtttaccttggcatcttattgtgtggaaggaggttcatcaaagaactttacattgattaagaaaatggccttctcagaaccagcggtattgaaaagatctttgttccacatgaatactgttctactcagcacaatcactttgaaaagaatttgcggttgcatgtagggtactgaatgctacacagtttgattgacttctagcatgacatctgaacaaattggttgatgtgtatctcagagcactacgaaggacattgctagagtttattaacacaaagcatattttaagtttgttcattattttcattcatttttctgatcatatttagcctatcccaattcccaacttgctttgaactaaaaggctttgttgttgttgtttcttgatcatccaaagtcttgttataaagctttgaccttgacatttttttttgtagattctacacaatttgctacagaagttcacaacatcaatggctaactatattaaataccaagcggacaatggggcgcaggctgtccaaattttcgattcatgggctactgaactcagcccggctgattttgaggagtttagcctgccttatctaaagcagatagtggatagtgttagggaaacacatcctaacttgcctctgatactctacgcaagtggatctgggggcttgctggagaggcttcctttgacaggtgttgatgttgtcagcttggactggacggtcgatatggcagagggcaggaaaagattgggatctaacacagcagtccaagggaacgtggaccctggtgttctttttggatccaaagagtttataagcaggcggatttacgacactgtgcagaaggctggcaatgttggacatgtattgaaccttggccatggcatcaaggttggaactccggaggaaaatgttgctcacttcttcgaggtcgcaaaagggatcagatactaaagaaccttgcatggttctttcctttctccaaatcggcagaagttgtagagtcggcggtcgaggatagatgcagaaagccatgtgcagtatagagtgcctgaaaacatttttgtgactgattctgtctgtcgcatttcaagttccggtttcagtgtaatattgtaagcagatttgagtggaggcgtaatgaagtgcctaattgtttatagcactatagttctgtacaaccagtagccttgtctatgagactacgaagcagaaatactgatcatgtgttgacatgatagaagaaagaaaaaaaatggaagactaagatatgctcaaaagaagaaggaaaaaaaacaaacaaacttgtcagtggctagctcagtgccgcgcttagaaacctggatgtttatctgcatttgggctttgacgctatcctgacgctcacagcatgtaaagtaaagcaaacagtggatttaggaggtgacactagaaaaggaaactgcagcttttgctacggtggcggcgctcgcaagccacagtggaggaggctaaaaggatggagaggaagagcaacgacggaggaag

SEQ ID NO: 3599 - DNA, 1766 bp, Zea Mays
cgtgtgcttggtgttgctatttctggcatggctgttttggaggcgcggctgcaggtcgacccccctccgtgaccgtctccgtccgccccccgccaccaccgcactcccatccagatgggagtgcgcaagaggagctttcggcattccggtctcgctcgaccaaccggatccccgtgagagtccccacccacaccccgagggcggcgtcgggtcgtcggggacagctgatttcacacgacgagccggcgagccggccggcatttcgtcgtcggatggcgccggcctcctcctcgtccgccggcgtcgcgtgcctcgtcctgctcctgctcctgctcctcgccggcgcctccgcggcgcacggctcgttccaggctaggcgtgctctgtcagtgcaaagatctctgcacgtatgccctgacgaccccgctcgtttccttgtacaaactgccgatcccagcgccgggtgcctgatcttgcacggcggcagcgacctgttccacgggagcaccatcaggaccgtcgagtacgtcttcgggcagggcaacctgacggtggaccacctgaggaacttcgccgacagcttggcggcggcgaaggacatcacgatcaaccagatcttcctcccggccgatgtccagcagaagatcgacgtcgtcgaggagaagctcaactcctccgcgggcgtcttctccactcgcctgcaggagaactccaggaagatcaagggagtgctgaaccacatggagcacgaactgtttgctgttgcagctgttatggctggcctatcaatactcggattcttgttctccgtactggggttgcggtttcttgtctccctactggtgatcgctgcttggatccttctcaccaataccatcatcagttctggtcttttcctcctcttgcacaacgtggtggcggacacgtgcgtcgcgatgggcgattgggtggcgcacccgcaggcgcacacggcgctggacgacatcctcccgtgcgtggacgtggccacggcgaacgagtcgctgtaccggagccaggaggtgacgtcgcagctggtggcgctggtgaacaacgtcgtcgtcaacatctctaaccggaacttcccgccggggctccgcccgctctacttcaaccagtcggggccgctcatgcccgtgctctgcaacccgttcaacccggacatgagcccccgccggtgcgcgcccggcgaggtcgacttcggcagcgcggcgcgggagtggaagcggttcgagtgccagaccacggggccgccggggtcggagctgtgcgccacgccggggcgcgtgacgcccgcggcgtacggccagatgacggcggcgacgagcgtcagcaaggggctctacgagttcagcccgttcctggtgcagctgcaggactgctccttcgtgcgagagacattcacgtccatcaccaactataactgccccggcctcgagcagtacagccgggacgtctacgtcggcctggtcgtcatctctgccggcgtcatgctgtccgtcgtcttctggatggttcacacacggcaccgacggcggcgcgccatgcgcaagcagctgtgactgagatcttgatggcgcgccaggccacgccacgattgagctttagctgttacaaccgtggtccacgcatccgtttcaaatttgtacaatactcactcggttctaaaattaatcgttgtcgtttaatttctaattctgaaggagtcaaatattttcagtttaattaaatatatacatattaatatc

SEQ ID NO: 3600 - DNA, 8637 bp, Zea Mays
ctgacctcccccctgccccctcgtcaagctcatcatccggttccgcctatcggatctcgccgtgcaccgccgctgattccacccaccgctccgcacgcatttgcaccccaactcctcacagatctccccagatctacgcgctccacgcactgccattttcccgctccgattcttcccccactccagtctacgccgcgcttaatcgcccgcccgctgtttcacttccgttgaccgattcccgctcgcatttccacaccctgcgcttggttcggaattggtctcgatggagtaaagtccttgcaatggcggaagacgcgcacgagttgttcgattcctccccgccgcgggaggagggctccgacgagcagctcgcggccgtaccgctcggcgacgaggcgggcgtcgtcgaggaggaggaggcgtcggatccggggatgagtaccagcatgccggccacacccgcgacgccctacgagccgcccccgcggcccaggcggccgcctggagtaccggccgacgcgccactggaggtggtgcgggcggtggaggaggcgatcgcgggcggggcggaccttctccgcgaggtggtctcccaggagcagggcgagctggctcactccgtcgtcgacgtgctgctcggcaccatgggcggtgtggacgaggcaggcgacgccaccggcaccggcgctcctcccaccgtcatgatcagctcgcgtgccgctgtcgccgccgctgagctcctgccttatctccccgaagacgacgagccgtcgccgcgcactcgaacagccttaggtctgcacgccgccctccgcgcctgcactcgcaatagagccatgtgttcttccgcgggcctcctggctgccctcctcgcgtccgcagagaagctgttcgtcgaaatggatcagggtagcagatgggacgggacgccactgcttcaatgcattcagatgttgggtgggcactcgcttagtgtgaaagacctgcattcctggcttgatttggttagaaagtcacttggaacgagctgggccacaccacttatgctagcgcttgagaaggccatgggcagcatggaagcaaaaggtcctgctgtgacatttgagtttgacggggagagctctggtctgcttggcccaggtgacagcaggtggcccttcttaaatggatatgggtttgccacttggatatacatagaatcattctcggatacccttagcacagcaacagctgcggcagccattgctgctgctgcagcggcaacatctggaaaatcatcagcaatgtcagctgctgcggcagccagtgcccttgcaggagaaggaacaacacacatgcctcggcttttcagctttctctcttcagataaccagggtgtggaagcttactttcatggccagttcttggtggtggagagtgtgggtggtaggggtaagaaagcttctttgcacttcacatatgcgttcaagcctcagtgctggtattttgttgggttggagcacacaaacaagcatagtttgctcggaaaggatgacagcgaattgagtctgtatgttgatggaagcctgtatgagagccgtccttttgagtttccacgtatctctaaaccacttgcattttgctgcatcgggacaaatccaccaccaactattgccggcctgcagaggcgccggcggcaatgcccattatttgctgaaatggggcctgtctacatcttcaaagaaccaattgggccagacagaatgagacgtctagcatcccgaggaggagacacactgcccagttttggaaatggcgcaggcttgccatggaaggcaactaatgaccaagttaagagtatggctgaagagagcttttcactcaacaatgggatagggggaagcttgcatcttctttaccatcctagtcttctcactgggcggttttgtccagacgcctcaccttctggttcatcaggcactcatcgaaggcccgcagaggttctcggattggttcatgtctcacctcgtgtgcgaccttcagaatctttatgggccttagcttatgggggtccaatggctttacttccactaaccataggcaatgtacatgtggacagccttgagcctgcacctggggacttgccatcgtctcttgctaccatttccctttctgccccagttttcaggattatttcccaagctattcaacaccctggaaataatgaagaattatgccgtacatttgcaccagagcttttatcacgtgttttacattatgtgttgcaggctcttccaaagttggaaagtggggaagaggttctgactgatgaggagcttgttgctgccattgtatctttgtgccagtctcaaagaaataatcatgaacttaaagtgcagcttttcagcagcttgctgttggacctaaatctatggagttcatgcaattatggtttacagaaggagcttctgtcgtctctcgcagacatggtatttacagagtctgcttgcatgcgagatgccaaggcgatgcaaatgcttcttgatggctgcagaaggtgttactgggtaattcaggaaccggattcaatcgataactttgcatttactggaacaaagcgatctttgggggaagtgaatgctctagtggatgaacttttggttgttattgaactactgctaggagcagcatcttcaacagcagcagcagatgatgtccgctgtttgattggatttattgttgactgcccacagcctaatcaggttgcaagggtgttgcacctcatatataggttgaatgtacaacctaacatttctagggccaacttattttctcaatccttcatcactagtggtggtgtggaagcactacttgttcttttacaacgggaagctaaagtgggtaacaaaaatattttggatcattctagtgcaagtgaaaataatgtgcccaaggatggaagttccaacagaaaagctgatagtgctgacacaagttgtcaggttgatgaaaatcaatcagctgaacgtcatgaaactgtcttccatgaagaagccattgaacatgaagccacaaatgcaaaagatatgctggactcaaatattggaagtaaagtgcctggttctgagaatgggctcttgaagaacctgggtggcattagcttctcaattacttctgataatgtccggaataatgtttacaatgttgacaaaggtgatggaattgttgttggcattattcacattcttggtgctctaattgggtcaggtcacctgaaatttgattctggagctggaagtgcaaatatacctggtggtagtcagaccacacttaatgaagaaggaaatactatgtcagaagatagagtatcattgttactttttgcattgcaaaaggcattccaagcagccccaaggaggcttatgacggcaaatgtctatatggctttgatttctgctgtgattaatgtttcatcagctgatgaaagtcttaatctttatgattctggtcaccgttttgaacatatccaacttttactggttctacttcgctcgcttccatatgcatcgagggcattccaagctcgtgcaatacaggatattctgtttttggcttgtagtcatctagataacagaactacaatgacctcgatttcagagtggccagaatggattttggaggttttgatttcgaaccatgaaatggacacaaagaaaaatgctgatggtgtaagcattggtgagattgaagacctcatacacaattttctgattataatgctggagcattcaatgcgacaaaaagatgggtggaaggatgtggaggcaacaattcattgtgcggagtggctctcaatagttggaggatctagcactggagaccaaaggatcaggcgtgaagaatcattacctatttttaaaaggagattgttgggtgacttgcttgatttttctgccagggagcttcaagttcaggtgatagcatcacatcgtccacatcaatgacttcattggctgccagtcggtcaaattctttgagcacagctggtaaagaacccatggctgctggggtctcaagacgggcatctttgtccagtgatgctggtggccttcctctggatttgcttacttctatggctgattcaaatggacaaatctctgctgccgtgatggaacgtcttacagcagcaacagcagctgaaccttatgattctgtcaagcatgcatttgtgtcttatgggagctgcataactgatcttggagaaagttggaagtaccgaagccgtttgtggtatggtgttggcattccacccaaatctgatatatttggtggtggtggaagtggttgggaatcttggagatctattctagagaaggattcaaatgggatttggattgaatttccacttgtgaagaaatcagttgctgtgctgcaggcacttcttttagatgaatctggacttggtggtggtcttggtattggagggggatctggccctggtatgggggttatgactgccctctatcagttgctagatagcgatcaaccatttctttgcatgctcagaatggttcttgtttcgatgagggaggacgacaatggtgaaggcgatgcttttacgaaagatgttagcataaaggatgtggtatcagaaggaatgggccaccaggctggaagtgtgatgccatttgatggcaacagttattcatctccaagaaaacctcgatctgctcttctttggagtgtgcttggccccatccttaatatgccaataacagagtctaagagacagagagtgttggttgcttcctctattctctactcagaggtatggcacgctattggcagggacaggaaacccctaaggaaacaatacattgagctgattttaccaccgtttgtagcaattcttagaagatggcgaccccttttggctggtattcatgagcttacttcttcagatggacaaaatccactaattgctgatgatcgtgctttggcggcagatgcattacctgtcgaggcttctcttttgatgatatcgcctggttgggctgctgcttttgcatcgccaccagttgcaatggcattggccatgatggctgctggtgcctcaggaacagaaacaagaacacctcctaggaataccttgaataggcgtgacaaagcattgcctgagcgcaaggcagcagcaaaactacagactttctcgagtttccagatgcctatggaaacagcatctaacaagcctgggtccaccctgaaggacaaggcagcagcaaaagctgccgcattggcagccgctcgtgaccttgaacgaactgctaagattggttcaagaaggggccttagtgctgtagcaatggcaacatcaggacaaaggaggagttcgggtgacatcgaacgagcaaagaggtggaatacgtcagaagctatgagtgctgcttgggtggagtgtctgcaatcagatgattccaaatcagttgtgggaagggatttttcagccctttcatacaaatatgtcgcagtacttgtttcttgtttggccttagcacgaaacttacaacgagctgagatggagaggcaaacactagttgatgtgttaattcggcatcgcgcctcaactgggcttcgagcatggcggcatcttcttcattgcctaacagagatgggtagactatatggaccttttgaacatctgtgcactcctgatcgtgttttctggaaattagattttactgaaagctcttcaaggatgagaagatttgtgaaaagaaattacaagggatgtgatcatttaggtgcagctgctgattatgaggaccggaagcttcttaatacttctgcacagtcaaatgaacataactctgaggatgctaattcttcattaacaagcactcttccatcatctgcttctgtaattatggctgatgccatgtcgatgaatgacagaaatgtggaaaatgagcagttagaaactgacactactcgcagcagtgttgatgacgatcagcttcaacattcttcagcagctgatcaacaatcggtaaaaggatcgataggttcaagaacttctgacatttgtgctgatcgaaatttggttaggtctacagttcttgcacctagttatgtgcctagcgaagctgatgagagaattattgttgaactgccatcattaatggtgcgaccattgaaggtggttcgaggaacattccaagtaacttcaaagaggattaacttcataattgatgagcgttcaaatgacagtaacattgatgatgctgcatctactagtggccaatgtgatcaacaagataaagatcgaagctggttggtctcatcactttatcagatatatagcagacgatacttgctacgccgaagtgctttggaattattcatggtagataggtcgaatttcttttttgactttgcggatattgatgcccgtaaaaacgcttatcgggccattgttcataccaaacctcctaacttgaatgacatctttttagctacccagagagctgagcagattcttaaaagaactcagttgatggagcgctgggctaattgggagatcaacaattttgagtacttaatggaacttaacacactggctgggcgcagttacaatgacattactcagtaccctgtttttccctgggtagtagcagattacaaatcccgagtgttgaatctggatgaccctttgtcgtatcgagatctttcaaagccaattggagcactaaaccctgaacgtctaaagaagttccaagaacggtactctacattcgaggatccaatcataccaaagtttcattatggttcacattactccagtgctggcacggtcttgtattaccttttcagagtggagccttttacaacactgtctatacaactgcaagacggcaaatttgaccacgctgatcgcatgttttctgatctttctggtacatgggatagtgttcttgaagacatgagtgatgtaaaagagctagtacccgagatgttttacctccctgaggtatttaccaacataaatggcattgactttgggacaactcaacttggagggaagctagattccgtagaattgcctccctgggctgaaaatcatgtggattttgtccataaacatcggaaggctcttgagaatataaacagaggggcaaagaagcgataatggcaaacaatgtattcttctacataacatatgaggggactgttgacattgacaaaattacaaacccagtggatcggcgagctacacaagatcaaatagcttactttggacaaacaccatctcaactgctgactgtacctcacatgaagaggaagccactggcggaggtcttacaactacagacaatattccgaaatccaagtgaacttaaatcatatgtgcttccacattcagatcgttgcaatgttcctgccagtgctatgcttgtatcaaacgactctattgtagttgttgatgtaaatgccccagcagcacatgtggcacttcaccaatggcaggctaatactccagatggtcagggaacacctttccttttccatcatggtagaaattccacaaattcaaccagtggcgcactcatgcgcattttcaaaggatctgctggttctgcggaagattatgggttcccaagggctatagcatttgctgcttctgcaatccgcagttcagcagttgttgctgtgacatgtgacaaagagataattactggtggccacgttgatggttcattgaagttgatatccctagatggagcgaagacaattgaaactgcttctgggcatattgctccagtgacatgccttgcgctgtcacctgatagcaactaccttgtgacagggtctagagataccacagttatactctggaggattcatcagacaggctcctcacataagaaaaatgctcaagaacctccaccgactacaccaacgacaccacgcagtcctctctctggcagcactagcaccatgagcagcctctcagaaacaaagagacgtcgcgttgaaggtccaatgcatgtaatgagaggacatcttggggaagtaacctgctgctcggttagtccagacttaggacttgttgcttcctcatcaaatgcaacaggcattcttctgcattccttacgcacaggcaggctgataaggaggcttgatgtcgatgaggcacatgcaatatgcttatcttctcaaggaatcattttggtttggaatggaacaaagaaaacattatctaccttcactgtcaatggactccctattgctaactcagttctgttgcctttctctggacaagttagttgcatcgagatttctacagatggccattttgctttatttggaacatctttgttcaacaactacaagtgtgataacagtactgaaactggggatcatgagcttggacccaatggcactgatgatgtatcaaaaaattctgaacaatctgttcacgcgccttcaatctgctttgttgacctgcatacactgaaggtttttcatactctgaagctggcaaagggccaggacatcacagcaattgctctaaacaaagagaacacaaatcttttagtttctactgctgataattttttttatagtctttactgatcccgctgtaagcatcctcgatac

SEQ ID NO: 3601 - DNA, 2907 bp, Zea Mays
cgagcgaccctctgcgctcgcgcgaatcccgcccgagatcgccgccgatccgaagcaacggcaccgtgcccctccccctcgcgagatccgcgaccgccccatcccggcgccgcgggatccacgcctccgccctcgcccttccccacccccacccgctaatctcgcggtcgatccgcgcccggtcctgaccccgcctccgtcctcagcaccgccactccgtcccccatcttcggcgccgccgtctcccgctcccctggcacgcattcggggtccttgcgggcgacaagcacctccgtcccggaggcatctgccgctgcagcatagaccaccatgtcctcgctcggcagcaccgatgttgacgatggcaacgaggaggaggacggctccgcgagcacccccgagatctactgctgccactcccacgcagttcttgctcacgagatctgtgtgcaggttgatgtcctcgtggtgccacgccgacctcgccgccaccaagcgcgccacccatgtcctcaccgacctcgccaaaattggacggatcgaagcaccataataagtgtttagctttcctccgcgcctcgggcggccgcggcacaggcgccgccgcgcccgctcgccgcgaagcacaaggacgagccggaccccgacgacggcaggcagagggtcactgtcttcttcggcacgcaaaccggcaccgctgagggctttgccaagtgcatgactcgtgcccgcgccaggactcgttgccaatattgcactcttagtgcaaagaatagctgagcttgttacagataatatgggtggacctgtcaaagatgctaacgacatgctcacaaggtggctggagaagagtactgagctgagaacatcgctacaaacaagtttgttgcctattggttgcatcaagatagggttatcacatcaccgtgccctacttttcaagatccttgcctatagtgttgggattccatgcaaacttgtcaaagggagcaattatactggtggtgatgacgacgatgctataaacataattaagatggacaatgaaagggagtttttggttgatctgatggctgctcctggtgctcttattccagcagatatcttaagttggaaaggcaattcgttaaattctaatcgaaaactcggcctgaatcgaacagctggatcatcaagtactgttgatgctaatgtggatcctactgtattgccacttgaacctaaaggtggccaactgcctttgttcagcagtggtgattggatgtcagacattgattctggatatgaggcagcagaaattgcagcttctactcaaacctcttcgggtgtcacaccatatctgtgttctgctggaagtgtttttggcagttcatggatgctggttaatcatgaccaatcagatggaccatcaacttctgctggtacatcatcgcagcagaaagttgtacctcaaagcgagcatcagcggaatttaaaccgccttccagatctgcaggaaattccagagtcaaaaaacctttttgctgaccttgttccttctggggataataagtccaagaaaacttcagtaccattcaaaggaccagatcataggaacaatgagttgcaaaagcgcagagagaacattgtccctaatgctggaagaccacatcagcggttagttatgaagaattggtctccttacaatgatgtttccaacaacaaacagtacaattatgtcgaggattcgtttgctcgtagaaatgttggtaataatgctgcaccatcatcatcccagatgccacgaccagccgcaagatctaaccttaattctagattgcataatgatgcatcatatcataattatgatagcattatggctggtacctctgccatgaacattacatctacagctgagaccgggaaggttcctgaaagggttatgcgtggtgatttggacaaaggccaaacaaattatagattggaggatcaacatgtcatagttcaaccaccacagggaagacttccatggggtattcctgcagaaggaagcgttccaatgaatagagttcagagtcaagcaaaacaacacttggaaaacatggatgcaaagcaagaccataagaaattgctccctgatccaaaaaaatctccccttgacaaattcatggacacatcattgccttcaagaaacatggacatgaggtcacagaggcttgacttcgatgatgtctctgagtgcgaaattccttgggaagatcttgtgattggtgaaaggattggcttaggttcatatggagagatttactgtgctgactggaatggaaccgaagtagctgtaaaaaaattcttggatcaagatttttatggcgatgctctggatgagtttaggagtgaagtaggcggcgaccagaatatgcatcaggcgggaggaatggggcggtcgctggagctgctgctgatccagtttttgatgccggataacgacacacgtcggcaggcggaggagcagatccgacggctggcccgtgacccgcaggtggtccctgcgctcgtccaccatctccgtacggccaagacccccaacgtccgccagctcgccgcggtgctactccgcaagaagatcacctcccactggcccaagcttccccctgactccaaggcatcacttaaacaagcccttatcgattcaatcacactcgaccacaggttctttgctaaatacctatcaccaatccttctacgcatgtctgccttagaatctgcacgctttcaattcactcaaattgtgcatttggccatttgcctaaggaacactttgagtgtattctcaacttattagtttgtgctgatcagaattgaactgagaggtccagctttagtgaaccttcctgtttgcgccccaaacaacatagaattttgatgctc

SEQ ID NO: 3602 - DNA, 1436 bp, Zea Mays
catcaaaggcgtaaactcggcgtagacggagactgcagacgcccggaccacaggaacaccgaagtaccgaacactaccggccacacgctcgagaataggcggcggtgcaggtcctcctccatctctgtcgtgactccagggttcaacttcactgtgaatacgctgacgctacgagaagtcatcacggaaggggtctcgaagcaaggtgtgccatttgggcggagttcgcgtgagccaagttaccgcgtcgaattccatcctgttgattcaccattccatccagagaatggtcaagaatcggtaccaatggctagtcatgatgggaaacgttataaatgctttctaccagttgaagaaactaaaaccatgaagtcaatgcttccgcaaaatgcaactaatgttataatagaaagtgaaaggagaattaagccaaaggagccagatgagttacttgaggttctcaaggaccagtgcttctacaggcatgaaggttggtggtcgtatgaattctgttatcatgggaaaatcagacaggtccatgtagacgacgataaggttatccaagaatttgttctaggcgaattcgatgacgacgcgactgctgcataccatgaaaatatcacttctgagttagttgacgatgaccatcatgtgaaagatatatctcagaggtatcatgttcacttgtatacaaatgggactgtatgcgatctcacagatattccgcgggagacagaggttagatttgtctgctcggagcctactgtactgattagttcagtcaaggagatctcttcctgcagatatgttgtaacgattcaaagtcccatgctttgcaaaaacccgttattccaggaagaaaaacgaaccctctccatccactgcaatgagttgcctgctagagcggaatccagcgcggaggatgactcgcttccaaaagaagctcagatttccatcatccccgatcaggatgagctacatgatttcccagcctatgctacttgatttgcctccaataattatgtttgatgtagaaaaaaaaacaccattttggaggcgcaggggcaactgagcaacactatgtattaactatctcgtagatactacagcagaggctccttgtaaagcaggttgagacgatcattctgcagttcttattatataggatgattacgaaggtaacatgtttgggacagtaacatttgcttgaaatgtatatagtctacaacaagaataatgccagcattcttgaaatgtaggtgtgcgagcacttttacacgaagtaatattgctctggtgtgacgaacgatctgttgtcggttgagatgaaaaggcgttcgccttctattaagaatgtaaatggtacaaaaggatgtaaatggtacggatattatctgttcgtatttgaatttaatccggtttgagatgtatccgag

SEQ ID NO: 3603 - DNA, 2717 bp, Zea Mays
catcatgggtgctgcggacggcgccaccaacgtgtgcttgcaagcgcggcaggagggagcagagccggagatggggcggtgctggtgctgctgccggtacctaaagctgctatgcttgagttggccttcaggggaagaccgctccacaggccaagaagtcgtggggttccgagattgccagtagcggtggccggagctcctccgatgtttccacgccatatgctacgacgtcttgtgcttccacgccggatgccacaatagacaagcatattaagactgtcatgtctctcaatctctgcccatacttgaagccaatctggctgatcacaaaagacagtcatcaccctttaccgcacgtagcagcccagtattcgagattaaatcctgaatttgattgttaaaagatatcatcatatcaacgaagctaggccacaagactagcctgatacactgtgatgcctgcaccacttaaggtactactttcctgaagaaagtcaatttgctgacaatgcaatgaccattcccttgcctattcacatggagaaacttgatgttcatatagaaataaatatttctagacacttcaagtaataaaaatacaaaacaacttaagactacgtatgaatggctcaaaataatcattagtcacaaagctgaaaatacaccgtgacctaacttttttaattgtggtctcacagtttgatgtatatagtgcaaaatttctttcaatctttgcttacttcaacttctttctataaagtggacataatctaactttccaggcacatgccctagaagatgagatcttttcttcattgcatgaattcttgagaacctttatttgaattctagtgttaatttcttttcaattgattttctccctgctgatatacatgcttataaagaaaaataaaattatttctttttcacttatatatgtttaaccttttcatgagagcagctttatatattcacgatttcttgttgggttgccaacgttatgtttatattgaccaactttattaggacactgcattctggtatttggcacttaacagttccactttgcaggaagaaaggttcagattgtgagacaaaggatatatgtaccatatcactgctcctctatcaagcatcagttctcattatgtatatagttttaccattatgacatccattttccttatcaaatgaatatccattttatccctaggaagaatgggataactgttagtattaattaggtatgtgatattcgtgaaaggcactgtgactttactacatgaatatgctcaaatcactttaatataaaacccttcatataacacatggtaacagaactgttacttatatttcctctaaccattctagacgatttaccctacaatctttcagttccttcattaatacttttcttttcaattcatgcctgtgttcttatacaacacacaaatgactacttatgttttatagctccgtctagtttagaatcgtagaatttcctgcccgtgcaagcattagattgttttttggattggttaactaacagttatcgataattatttgttgtagtcactgttgttttcttttttcctttttttacttgattcaaggactgctagtggccgaagggcactgcctcctccttttgcttttacgtgctgcaagaccattgttatgtatttcatgtttattattacttcgaatacggctagaatacaatgttttaacaaggtatggtgatggattactctcggttgttgattaatcttgtagcacgtcctttactaaatattgtgtttaaatggcgaaggatgatggagatacaatgaacacgaaagtcattattatttttagccttggcgctatatgtttgttagcagaggttacatgattcttctttcggaataggcggaaaaatgagagccttcactgttgtttatttagtagaggttgagatcgtatttcaaattattaagaacactattgttttagattctttcacatattcatacgtttgaaaaaaaaccgcattctccatgatgttttggtcatagagaatgtaataaaagtccattaaatagcattgatactcccatactatagtattttcctttgtgttgaggattaatgcaaccacagtgttgtggtttgaacactaatcgagaaggcctctttactgttgtctaggtcagttataactttcatatatgtgcttccatacactttaatgttagtagtacaattgctgttagcagattaaaaacttagttaaacatatgcgtactcacatatttattatttctctttacatcaaggattcccatggacatgtggttgtccattacacagatgttgatacaaatgttcagctcctttttaggtaccgttgctcatgttgcagcccgaggttgtagctacacaggaacacaaattcagatataaacagtttcatctcagatgacacaacaacagccgcaatattttgctttgacaatattgctaaacatattcttggaaaaccttgtgaaccctgatgtcgtgaacacctttatgcagtacatagctaatgtatttttatgatattaatcatgcccctaggacatgttgctacaacagacccttttgcatgtatgtataggactataggtgatagatcgatatcttaggctactaataaatagacttgctagaaacgtacttatattgatgagtac

SEQ ID NO: 3604 - DNA, 2128 bp, Zea Mays
atcacagaccgaaaaggaaaatagaggcgagacaaacgagagcgagcgagagagaaacagttcgagctcaccccggcgagagccgactctcaagcgataaggggcgtgggcgtcgtcggcatggagagcgagatggcggaggagtcaccggccgcagtctcagcggcggcggcgcgggcccggccactggaggcggtcgcggaggaagggcaggaggtggcggagcagcacgaggtggcagttggctccaccaagaccatggagcgcgtggcggccgcgaagaagttcatcgaggaccactaccgcgcgcagatgaagaacctccaagagcgcaaggaggcgcttgattttggaacaacagctagcttcttcacaagttccgagggaggagcagataaacttaataaaggatttggagagaaaggagactgaatacatgagacttaaaagacacagaatttgtgtggatgactttgatctgctcactatcattggaaaaggtgcttatggacaggttcaactatgtcgggaaaaatccactggtaacatttatgccatgaaaaagctgaagaaaactgatatgcttgtgaggggtcaggtggagcatgttagagctgaaagaaacttactggcggaagttggtagccactgcattgtgaagctatattattctttccaagatgctgagtacctctatcttatcatggagtatcttcctggaggtgacatgatgaccctcctgatgagagaggatactctgactgaaaatgtggctcgattctacattgctgagactattcttgccattgaatccattcataaacataactacattcacagagatattaagcctgacaacctacttctagacaagaatggtcatatgaaattgtcagattttggattgtgtaagccaattgattgttcgaagttgtcaacactgaatgaaaatgaaccaatgactgatgaaaaccttagggagtctatggacatcgatcattctctctctgatactgcaaatggtaggaggtggagaagtccaaatgaacagcttcagcattggcagaacaacaggagaaaattggcattttcaacagtcgggacacctgattatattgctccagaggttctactaaagaagggatatggactagagtgtgactggtggtctcttggtgcaatcatgtatgaaatgcttgttggttatccaccattttattcagatgatccactagttacatgccaaaagattgtgcattggagaagctatttgaattttccagataatccaagattgtctcttgaagcaaaggatctcatttgtcggttattatgtgatgttgatcacagaattggcagcggaggagcagatcaaataaaagctcatccttggtttcgaggagttgaatgggacaagctgtatgagatggaggcagcatttaagcccctagttaatgatgaactggatacacagaatttcatgaagtttccagatttaaaccctgctccagcaagagcaagttctggggcttcaaggaagatgatgcttaattctaaagatcttagctttgtggggtatacatacaagaattttgaggccgtgaaaggtttgcatcagtttgcagatcttcagagaagttcctcatttacaaggcactctgctggctccccatctgatacagcagatatggacgcctcaatggaagctaacgggaccgacacacacatgcgcactggttcagctggcgaccctatggcgccataatctgccctgttgttttcgtgaagtaccctgccctacaccggcatcatgcatgcacctcgacaacatggctacatctgaagagacctggttgtggacttgcatttattcaggtctggtgcccttctactatttggcgagcaccttcgtagttgtacaaaccagaggtatttgtgtagtatgtttcaggtgagacaagttgggcaggtctggccctgggtatatacttcttgacgctggttgcccaggttggcatagtattaggtcgtcgccttccttgtggcagctctttgcccgtttatttaacaataatatatattatatatggtcatgaggaagaggaaatggagacataataactgtgtt

SEQ ID NO: 3605 - DNA, 1062 bp, Zea Mays
ggaaacagaaattcttttctgcggggcatttttgaaattggtcgtgagccgctgccgcacacggcgagaggaatagggttgctccccccgttgccgactcgccgccgcatcgccgcgagcgtcatgaagaccttcccgctgtccaggggaagcaccatctccctagccctcttctccgacgtctccaacagccgggagctcctggacttgatgcagtcagggaagctggagccggcggtcgctctcctcaacgcgtcactggtgccggatgtgttccctatcctcgcggcagcgcttaaggcgctgttgtccaagactagggagtcactgaccacaaggactctgcactctgagctcgtctacaactactcggggtccaaacatataacagagtccctgaagcgctgtgggatctctgataatacaacttacatccttgctgcttgttttgatgcttccgacgaggagatgaaggcagtggagaagctcatcagtggcaccgagattgatctcacagaactggaaagaagagcaaaccagccacagatcttgaagcattacaagatacctccccaagaactatcgatatctacgttgccggacgcaattgtatgcaggattgctgctcgagatgctctctgaagtctcaataatcaccgtaagctatgtggtttcaggatgtaggtctctctctaccacatgtatggtgtgacattgacagcacaagtgcacaactagaattaggtatccgaaataccattgatgttcgcattccctgcaagcaacccagaagcacattgcgtggttaatttttcttgctaaactgtgctgcaaagcaacagttatgttaatttctcccttgaattcgatgaagcttatatgatacaatctagcaaaggaatgtatgatgtatctgatgtggcgtgtaagtttctggtgcatagtgctttgtctataggcgagatagttccctgtttttgtatggaaattggagttagattgtgattgctgtggtaattccatcgattgcatgtgtgtgttgtgtagcaaaacaaaaatagg

SEQ ID NO: 3606 - DNA, 2383 bp, Zea Mays
acacgccatacccttctcgcaagcagtcaagctcctcccccaatccttccccgatgctgcggcgcaacagcgtgtgcgaaaccgagtccgaatcccgacgcgctccggctcccatggagcttagattttaggtgtgagctgctccccctgtatggatccagatgttctcgtggagccgtaagcagtcctcctccggctcgtcctccggccgccgccgcggcggggcggacgcctccatggactccagcagccgcggcggcggcgggagcgggagccgcggacggagcccgcggttggatcgccgcaacgcagtgaagcgcatcgagtacgaggcgagcgcgggggcgtccgcgtcgtggtcgtcctcgtcctccgcggagcagcagcgctcgccggggctccggccctcgcgctccctggaccttgcccccggcgcggacctccgaatcagcgggagcgtggagggggaggtcgacgagctctgccgcagcctggggctctcggggcccgaggatttcgccgtccccgtcgcggcctgggaggcgcgcaagtcgcggtctaactccgacctcctcccgcgctcccgcctcgacccgtccacacccgccgacgaaacctcgccgattgcgcgggcggtctcggcgcccggtgctcagccgactcgctccttccctgcccccattcccgaggagtcactccactcttcgcctgcttccaccgccaccgagtcggcggaggagcctaccgttgcggcgcccgaggagtcacccaacgctgcccctgcctctgctgtcgtggctcccgtcgggggtttgcccctgccttcgccaaggaggggaggcggggagtcgtttgctcccagggatcagggaagtgaactgggactgggaggaagtgtcgacagtcgttgcaattcggacaaagaggaagagaatgatgttgaggatggggacgcagcggtggagggcgagctgaaggaattgaggataggagagactttcgaggggttcactggaacttcttcattgtcgacgacgaatgatgatgacgcgtccagtacaaccacggaggccatgttcatcatttcaccgaatggcaagttcaagcggaacattaaatcatggatgcgtggtgctcttctgggaagcggctcatttgggatggtgtacgaggggatcagtgatgagggtgcattttttgctgtgaaggaagtatctttgcttgaccaaggaagcaacgcacaacaatctattgttgcacttgagcaggaaattgcactcctcagtcagtttgaacatgaaaatatagtccagtattatggaactgacaaggaagaatccaaactctatatttttattgagcttgtcacacaagggtctctttcatccctctatcaaaagtataaactacgagaatcacaagtctctgcatacacaaggcagattcttaatggattggtttatctccatgagagaaatgtggtccacagagatatcaaatgcgccaatatattggtccatgcaaatggatctgtaaagcttgcagattttggattggcaaaggagatgtcaaaaattaatatgctaaggtcatgcaaaggaagtgtttactggatggcacctgaggttattaatcctaaaaagatgtatgggccttcagctgatatatggagccttggctgcaccgtgttggaaatgctaacccggcaaataccatttcctaatgtcgagtggacaaatgctttcttcatgattggaagaggggaacagcctactattcccaactacctgtctaaggaggcacaagattttattggccagtgcgtaagagttgatcctgagagccggccttctgcgtcacaacttctggagcacccatttgttaacagaccactgcgagcttcatttgaatcttcgtctccaccagccatctgattctagtattgatataatggggtgtttctcgttgaggccaatgctcaggtcacgtactcacgtgttgatcttcatgatctacactactggttccagaatggaattacgtgggcttgtttaggatgtagtttagtagctgtagtccgtagggttggtgggcagcattgctctgtggttttgtattctttggggtgttcttcattgggcaaagggttttcttcctggttattacgtagatttgtgtaaacttgtaggtaaaagggctgcaattgcctctgggctctggtgtaggtttagccgatgtttgtgaatgtttgacatcgccattctttacgtaaatggttttgttgctcaaaaaagcatccggagcattgaatccccctggtgttacttttttcttcgtcgcatcggaaactgtttttttccttctaatttatcatccacgggat

SEQ ID NO: 3607 - DNA, 1502 bp, Zea Mays
tgacttctcactcggcagcccccctccccgctcctcttcctcgcacgtcttcgcgttccaacggatgtgacatttcctcgcgaatccacggctcctcggatgggatgtgaaaactagaagggaagaacagcctcctaatggataggaacaacgaactggaagaggtggtcccaaatgactcggaccctcttattgggagggagaacagggagtcagagtcatcggtagagctgtcaccgccacagccagcaactgtgaacctgctggagattgaggatgaagagaccgacggctcttctgctgcgtgctgccgcatttgccttgagaatgagtctgagataggtgatgagctaatatcaccttgcatgtgcaagggaactcagcagtttgttcaccgttcttgtcttgaccactggcgatctgttaaggaaggatttgcattttcacactgcacaacttgcaaagctcagtttcatcttcgagtggaaacctgggaggataactcatggcgtaaaatgaagttcaggatctttgttgcaagggatgttctactcgtgtttcttgctgtacagcttactattgctatcatcggtgcgattgcatactttttagacagggatggaagtttccggaacagttttagcgatggttgggaccgcttcttgtcaaagcacccaatacccttctactattgcataggtgttgtggttttctttgtgctgcttggattcttcgggctgatagtacactgctcatccttcaacgacaaccaggatccatgcctagctgggtgccggaactgctgctatggttggggcatcctagactgcctgcctgcttccctggaggcatgctttgccctggttttggttttcgtcgttgtgtttgccatccttggcatcgcctatggcttcctcgctgcaaccatggcggtccagaggatttggcagaggcactatcacatcctgaccaaaagggagttgacaaaggaatacgtggtggaagaccttcacggcaactacacagcgccgaagcttgatccggagcatgaggaacggctgaagatgctgaagcttctttagagagaaagaggtgcacgccttcctgtatccgtggcaagtgcatcaacatggggcaatcctctctgcgtgccagattagggaatggtcatcccataacactgtacaaaatgatgaaatcctgcttggacttgtatgaattctctatcagacgaaacaaacagaagttctcagttttaccttctcggtaaccttcctcgacaacttggtctccgaaagtgtacgtgttcttctttactctttcccctttttttacaattgaaagtttgttgtctgaattgatctagcgatttcaatgatttcaataccttttagcgtccgaagcgaagatctcttacaatgtgcggtttgtgtaagtactgtggtaatatgcattctcataccattctagtgcctttcgcagttattcatttggtagatagg

SEQ ID NO: 3608 - DNA, 2582 bp, Zea Mays
gctggcaatgatgcttgcgtgtctgcagagcaaagaggcagagagcctgaacaattcgtttggcccttttcttgtgcttggcagcctgatcagatgccaatgcgatcccatatctccccatatctgatagggaaaataaaatctctccgcgtctgctgcactaccggctggtggttgtgctcgccagcgcggttgaatcccatctcacctcccctcatctgccgtcgtccggtgactgacaggacgaggctccttttccgcaccagcagcgccctctccacttgatgatggcctggcctgctagctcgagaagaagaaatgggcaagcagtggcaatgagatggatgttcttggtttagcagttcttggtcgttgcctgaatcctgcacattttactactacagttgtgagccagaatcgcacagatctgcctgaattcttcttctgaatatccacagcaatgcgaaattggacctgcggaaaaggaatgggcaactgattggccatgaacagtccaagggcgtttgctgtaatctgctcgcgtccaaattaatccaggaggatgagagtgtgagactgacacatgcacagggatcacgccaggagcggagcagggaggtgaaggggatgaaggaggagatgatggtcggcctgtcggcgccggagccggtggggaggtggggcgccgcgccgccgcaggcgatgctggagaggatgaaggactacggccaggagggcgccttcgcgctctgggacgatctctcgcccgaggaccaggagctcctcgtccgggacatcgagagcctagacctctcaaggatcgatcggatcatccggcgctcccttggatcacaaggcatcccattgcctgctgtcgagcccgtgccggaatctagtgtctccaaggtggagggcaggtctgcagaggacaaagaaagatggtggaagaaggggttgaaagccatctcggaggggaagctggccgttgtccttttggccggtggtcagggtactcgactgggaagctcagatcctaagggatgtttcaatatcggacttccatcaggaaagtcacttttccagctccaagctgaaaggattctgtgcgttcaaaagctggctgctcaatctagcgaaagcccgagtaacactgtgccgatccactggtacataatgacaagcccctttacagatgctgccaccgccaaattctttgaaacccgtagatattttggcttagaccctgaccaagtgacatttttccaacaaggcacacttccatgcgtttctgccgatggtagatttattatggagacaccatatagggtagcaaaggctcctgatggcaacggtggagtttatgctgcactgaagtccaagaagttgatggaagatatggccgcgcggggtgtgaaatacgtagattgctacggagttgacaacgcgctggttcgagttgcagatcctacgttcttagggtacttcattgacaagggcgcatcttctgccgccaaagtggttaggaaggcttatccgcaagagaacgttggggtgttcgttcaacgaggccgtggtggaccgctctcggtggttgagtacagcgaaatggatgcggctatggctaccgaaatgaatcagtcgacagggcgactccgttactgttggagcaacatctgcctgcacatgttcactctggacttcttgaaccaagtggcaaacagccttgagaaggacagtgtataccatctagctgagaagaagatcccttccatccatgggttcacgacgggcctgaagcttgaacagtttatattcgacgccttcacatactccccgtccacggcacttttcgaggtcatgcgggaggaggaattcgcgccggtaaagaacgccagcggcgcaacgtatgacacccctgatagcgcgaagctcatgctgctccgcctccacagcagatgggtagtcgctgctggcggcttcttgacgcactctgtgcccttgtatatgacaggcgtcgaagtttctccgctctcctcctacgccggagagaacctggaagccatctgccgtgggcgaacgttccatgcgccgagcgagatctcgttttaggaggtagacctgttcatgggactggagtagcagttgtgtgatcatctgtaaaacgagcgtaaaggatgggcaggctgttgtgtactgcgtgttgtagatgtaacatctcggacggacaccaaattcatctcgagttttctctccatctctgtgttgctcccccgtaggctgtagatcgtttcgacatttgagtcaccctattaaaaacagaaagaccgttcgtccaatttaatttgctaggctgaccagcaagttgaaacaagtcatacgagaggattgcagattggcaggtacaaatgatgaagaaccgtaaagcttcgttctcccatttcagcacatgatagtgttgacgtatgatcttaaacacagcgagaaacataacgaatcggtaaaactaatacaaggatcggccaaatcaacattgacccaattcttcgtcagtaagctctcgaatactactttctagaaagacc

SEQ ID NO: 3609 - DNA, 824 bp, Zea Mays
gtcccattctttattatctttgttgagaaaggacttgagaaatggcagtttgcagtcatttctcggtggatcatcctatgtatccaatcctcctgctgtagcaccaaattctattagtatctgtctgctagaactctcggtctgaatggtgcttttagcaaggttgccaaggtcggtcatgtttgctggctcaagaaccagagaaaagttacaatttggctgtatcagatctagcagccaaagtgaatcgtcaagcgattttgtttcaagtaaaaaggcaaacttgttttgcgtgcagctgggaactcatgatgttggtgcatcctgctgattgcaaaagcatgttagatgctttcatagctggctgtgattttcattccaggacaaccatgagcatgtatcagcatattcgtgagactgttgaagaagagaaagtaattcttgagtagcatcctcaacctgatcaagagaaatctcccatgctattgttgaaggatgcttttggcgctgagaggaggaaagctataagatgctaaatctctccattgcatgcggaaaaacgtaggaagggcactgcagctgatgttgctgtgtgcaatgcttgagatagacagaaatactcgtcttaaggagcttggttgggcgctactcatgtgggtagtttatgcataaagttatgcctgttcgctgcttaaatgttgccatattttgtttttctctttgaaactgtgaagggcacaactttttaatgacttctgtaacttgtgtatctaacatctgtattcggtattctgagttaaaataggcacatttaattatatttt

SEQ ID NO: 3610 - DNA, 3595 bp, Zea Mays
cccgatcaacgggccctggcagccagattagtcccgcgccccgcctctggctctccttcctccgccttccgcgcgcagcgcagagcgcacgggacacccgccgcccacgccttccgccccagacccactgcacgtgcacggccacgcgacccagcccacacatccactccgctttttccaaccgccgcccacgcgaaccccgacgcggccgcctcgagctccactccgtttaccctgcaaccccatcctcctcggcttcccatgtcgtgctcggcggcggcgggcgccgaggccaccgctctcctgttccgcagcgccgctccgtccacgatcgtcgggcgtcaccgcctcgctatgtctcgccggacttcgcgccgaaacctcaggactggtgtgcaccctcatcagaagagtgcacctagtgctaaccatcgtaacagggctagcattcagagagatagagcatcagcttccattgatgaagaacagaaacagatgtctgaagatgaaaatggcctactagacattcaactggaagatctgatatattgcttctgaatcaagctcgtcttcaagcattggaacgtgctgacaaaattcttaaagagaaagaaactttgcaacagaagataaacattttagagatgaaactgtcagaaacaggtaaacaatctgtgctttctagtgaagtaaagtctgatgaagagagtctggagtttgatgtcgtaaaggaagagaatatgctactgaaggatgagatgaattttctaaaaggaaagcttattgagataactgagacagaggagagtctattcaagttggagaaagagtgtgctcttctaaatgcttcccttagggagctcgagtgtacatccacttctgcccaatctgatgtgttgaaacttggccctctgcaacaagatgcctggtgggagaaagtagaaaatttggaagacttgcttgattccacagcaaaccaagtggagcatgcttctttgacgctagatggttaccgtgatttccaggataaggttgacaaactaaaagcatcattgggaacaacaaacgtatcagagttctgtctttatttggttgatattttgcagcaaagggtaaaatcagtagaagagcgctttcaagcatgtaatcatgaaatgcattcacaaattgaactttatgaacactcaatagtggagtttcatggtactctcagcaaactaataaatgaaagtgagaaaaagtcaatggagcattatgcagaaggcatgccatcagagttctggagtaggatctctcttctgattgatgggtggtcgcttgagaagaaaatatccattaatgatgcaagtatgttgagagaaatggcttggaaaagggataatcgcctccgggaagcttacttgtcatccagaggaatggaagagagggaactgatagatagttttctaaagatggcactaccaggaacaagttctggtttgcacattgtccacatagcagcagagatggctcctgtcgcaaaggttggtggtctggcagatgtgatctctggtcttgggaaggcacttcaaaaaaaggggcaccttgtagagattattcttcccaaatatgattgcatgcagcataaccaaataaataatcttaaggttctagatgttgtggtgaagtcttactttgaaggaaatatgtttgccaacaagatatggactggaactgttgaaggtcttccggtctactttattgaaccgcaacatccaggtaagttcttctggagggcacaatactacggagagcatgatgacttcaaacgtttttcgtactttagccgtgttgcactggaattgctttaccaatctgggaagaaagttgacataattcactgccatgactggcagactgcatttgttgcacctctttactgggatgtatatgcaaacctgggcttcaactcagctagaatttgttttacctgtcacaattttgaatatcaaggaatcgctccagctcaggacttagcatattgtggtcttgatgttgatcacctggatagaccagacagaatgcgggataattcacatggcagaataaatgttgttaagggtgcagttgtatattccaacattgtgacaactgtatcaccaacatatgcacaagaggttcgctcagagggtgggcgtgggctccaagatacactcaaagtgcactccaagaaatttgttggaatacttaatggcattgacacagatacttggaatccgtctacggataggtttctcaaggttcaatacagtgctaatgatctatatggaaagtcagcaaacaaagcagctcttaggaagcagttgaagcttgcttccacacaagcttctcaaccattagttggttgcattacgaggctagttcctcaaaagggtgtacatctcatcaggcatgcaatatataaaataactgagttgggtggtcaatttgttctgctgggttcaagtccagtacagcatatccagagagagttcgagggtattgcggaccaatttcagaacaacaacaatgtcaggctgcttttgaagtatgatgatgctctggcacatatgatctttgcagcatcagacatgttcattgttccttctatgtttgaaccatgtggcctcactcagatggtagctatgcgatatggttctgtgccagttgttcggagaaccggcggtttgaatgacagtgtcttcgatttggacgatgaaacgatacccatggaggtgcgaaatggcttcacctttttgaaggctgatgagcaggattttggtaatgcactggaaagagctttcaactactaccacagaaaacctgaagtttggaaacagttggtgcagaaagacatgaagatagatttcagctgggatacttcagtttctcaatacgaagaaatctatcagaaaacagccactcgagccagggcagcggcataaacagcagagacattgagacagttccctgctgtctccatgaagtctcctagatgctgtgcttaaccgtatggtaaagaaatatggtctgtatcagctcagaattaagcatctgccgaggaagcgcggtgcatccggactcgggtgtacaaggggcgacgtggcgttacgtgcagtccccaacgaagcaaagagacagaagtacagctgtacagaacggatatcttgtgaagcacacattgggatcaggacgtttggtgctgcagctactttcggtgcagaagcacatatatacgagacctgccagggcgagcaaatacccagttatacacgcgattgctcagctctatcaagctgtgaattgaaagatttctatagtgtattcacgcgacgttttcataaactagtgtgagttatgtactctgaccagtgaccagtgcgaagtctgtgttgtctcaacaatgttgcttggtataaaatgctaaaatgacgtttaagacgagaggggtttttagaaaagagagaaaataagagttttatgggtatgaaactcggttgccttcatttctagctctatatgagtcttggaattaaactccctataaaacactaaaactagactatgtattgtgaat

SEQ ID NO: 3611 - DNA, 1210 bp, Zea Mays
ggaaagcaacgactccgcgtccgcctgacctgacgtccgcctgatgaccgattatcttccttctccgtccgagtaaaggaaagcaacgactccgcgtcccgcttccctttccccgcacggcggagttcacaatccccaccggccggcgtagcggatattgcgagttacgacggggaaggagaggaagatccgtcgatccgcgcagattcgtttcgatcgtggtttggtgacttggtaagaggggaggggagaagcggcgatgtcgggcgtgttcggcagggtgttcgggaagtccaaggagcagagccaggcgaccgcgctggcctcgctcgacaagctcaacgagacacttgaaatgttggaaaagaaggaaaacttgctagtgaaaaaggccaatcttgaggtcgagaaggctaagaattttaccaaagccaagaataaaagagctgcaatacagtgcttgaagaggaaaagactatacgagcaacagattgagcagcttggaaatttccagcttaggatacatgatcagatgattatgctggaagcagcaaaagctacaacagagaccgtggatgcattgagaactggagcatcagcaatgaaagctatgcataagtcaacaaatattgatgatgttgataaaaccatggatgaaattaatgacaatatggagaacatgagacaaattcaggatctgttgtcagcgcctatgggagcagcagctgattttgatgaggatgaactagaagctgaacttgcggatcttgagggggaggagttggaggcagagctgcttgcacctaccacaacagctccgtccacagctccagtgcgtgtgcgtgtacctactgctcagcagtccactaggccatctggtcagagtagcaaagctgaagacgacgagctggcagcactacaggcagaaatggctatgtaaatatagattctgcggttatctcgcaactctggtatactcatgaggatcttcctaggaagacaagctttttcagaatcacaaacacaagctgcataccagcctaactgcttatgtatcatggcatgctatgttattgttttgtaatgaaatattttataggctaataaacatatttctattaataaattgtttcgtgtcagtattatgttcttcaggctttgccatatccgtgttctagtgccaatctaattgatgatgaaactcttcacc

SEQ ID NO: 3612 - DNA, 2301 bp, Zea Mays
gtcgattctactctacccggtcctcgcttccccgttctgtcctcgcggtcgcgcaggcgtaccaaacagctagggccgggggccgcagccgcgcacacagcaagcaatggcggacgccgccgagatggtgcgcctcctctatctccagaccccgccgcggccgttgctcccgcagttcgctgtacatacacatcggccacaaagtctgctcagagtttccccccgcttccgccctcccatccgtcttcggtgccgcgcgctcgacgccagtagaccggttgcggtggagggggagcgggatgaggaggacggtctcgaggacgaggaggagtcctacttctcggtcacctcgtcggggctctcggaggtggactacctaggggaaagcaccaggggggatttgaacgtgaggagggagcgcctcgaggcgcttgggaacagcaagtcaactttgcatggtcctattgaggagatagcttggaaagaagcgggagaagctgaaacattgcttcatgacttgggaattgcagacccgttttcagtaagacactctcctcgtggaattttctgcaccaggacactaaatcttcgatctatcagtgcctgggaaggacgtgcatatgactatgggatggacaacctcaagagcatgggttttccagtagatgaccttaaatttgaccctgacctggtcataagaggtcttgttattgataaagagaagggaaacttggttaaagctgatcgatttgggtacattaagagggccatgcatggtacccaaatgctttccactcgtgctgtgagtgaaatatatggaagagaattggtggacctgcggaaagaaattcgatgggagttccttaatacccttttctctgtttcagaagctgtcatgttcatgcagatggttgacaagttagatcagggattggtgccagctgaacttgggccactggattacaaaggactgtacaatgctgtttccaaagcactttttcgagcacatgtagaaggccaacttaagagagaaataatggctgagcctgatcggtttgtagagcctgatccagaacttcctttagctcttcttgatcaaaaagaggctggaaaaaagttgcttctcattactaattcagatttccattatacaaacaaaatgatgaatcatgcattcaatcgctttcttcctaatgatgtgggatggagagatctgtttgaaatggttatagtctctgcaaggaagccagaatttttccagctttcacatccattgtatgaggttgtaacagatgatggactgatgcgtccctgttttaaagtaaattcaggtggcttatattctggtggtagtgctcagatggttgagaaatcactagacattcatggggatgagatattatatgttggggaccatatttacacagatgtaagccagtcaaaagttcatttacgatggaggacggcattaatctgcagagaactagaagatgagtttaatgcactggtcaaaagccatgatcagaaagaaaagcttgttacacttatacaacaaaaagaaattgtgggggatcttttcaaccagcttcgcctggctctgcagaggcgctctaattcacgtcctgcacagacgcttgctgcaacttgtatggatgaccaggagcttacggagagtatgcaaaagttgctcattgttatgcaaagattagatgaaaagatcgggccaatgctagaagcagatggagaacttttcaataaaagatggggttggttgtcacgtgctggtctatgggataagagtcatcttaccaggcaaattgaaaaatatgctgatatatacacatcaagggtttcaaattttctgcactatactccattcatgtatttccaatctcaagaacagacacttgcgcatgatgcccattcctattctggaggaaaggacatcaaagttcattgagcatccgttcgtcacaatctggagattaggcaggaaagagcgaacgtgatcattgtgattatggctgcgatggctacacaataacaattgtcgttttgaacaaattaattaatacaccttgtaagattgtatttatatataagtaaatctttagctatagcatgctgaatgattgttctgatagtcagtttgtttgtcgtggcctacctagagtttcatattgggaggcacagtacctgttttggtgtacctgctgctatttgcattgtatatgtgaaatgcgaagtgaagtatgacaaggtaacgataagtgacaaatcacgtcatttgatcctgcgcaa

SEQ ID NO: 3613 - DNA, 631 bp, Zea Mays
tctgagctctataaatcgccccaaccccctccctcgttctgccaccattgccatatcctcgatcacaagagcagctactagctgcctctagctcgatcggttagtttgtcgtgttgcttacgtacgtcagcagaggccatcgtcgagtgtatcccgtggtcgagaagagggaagaaatgtctgcgaacgacggcgccggcgacacgaagatgagggcgatcgtcgtcgtagaggaaggggagatgagcgcgccggcggcgacgccgaagcagggcaagtgctgcgagtacacgctggacggctccgtcgacatgaagggccggccggcggtcaaggggaaatcaggagggtggcttgccggtgctctaatcctcgtgaaccagggcctggcgacgctggctttcttcggcgtgaacgtgaacctggtgctgttcctgacccgggtgctggggcagagcaatggcgacgccgccaacaacgtcagcaagtggacgggcaccgtgtacatgttctccctcatcggcgccttcctcagcgactcctactggggacgctacaagacctgcgccatcttccaggccatctttgtcctcgaactcccgagactgagtagtagcatccatttggttca

SEQ ID NO: 3614 - DNA, 2278 bp, Zea Mays
taagcggcagtcagccagacagccagtcggccgtggacagtggcgacggcgaggcgaagccgtatttggaacttggaagcaaccgccccgcaggcgcgagcgccgtcgtccgtctcgcctcgcctcgcctcgcctggcactgcacgcgcaaaatcgcatcgcatcacgagctctactctccccggctccactgcccgctcgctctccgactccatacaggcaaaccgcgccgccgcgcttctaacccccacccaactctgcctccgatcccaccctcccagcccagcgcgtcaagtaccccgcctcggttcgctccccgtgtgatctggttcccacccgcggccatcgcatcgccgccgccgccgccgccgccgcagaacctcgcgctcccggcgcgggatctcgcgggccccggccccacggtccggcgatcgggatgacagcggcgcgccggcgatgaccggctcggcggcctcgctgggcctgcggtccgggagctacggctccctcgcggccgccgccgtcgtcggcagcggcgggaggaaggccggcgccaccgcctgccgcacgctgcgcgtggagaaggagcgcctgcaccgcgcgctgcggctggtcggacgccgcaggaccggcgtcctgctgctgctcgccgtcgcgtccgccgctctcttctgctccctcttcgccgtcgtcaaagatgacgccaattcaactagtattgtaaataattacgaagtcccaaatgccatacagaagtcagtgtatcccagcagaacacgacctctaatgatgtctggaaaccaagagtccaccagtgttgtcaacaaaattgattttccaaatcggcttcatctttcatttgcaaacttcacacatccttgtgaaggtttctcagttcctcctcccctggttgataagaaacgcactggaccccggccatgccctgtttgctatgtttccgtggaccaggcatttgccttgatgcccctacaagcttcaccatcacctgtcctaaaggacttaaactatgtatcagaagatggtgttactgcaaatttatcaaatcagggatctggatttggagggcatccatccctggatcagagaaacgattctttcaacattaatgagtcaatgactgtccactgcggctttgtcagaggaaagaagcctggccaaggtactggattcgatatcaaggatgacgatctgctagagatggagcaatgccacgatctagtcgtagcttctgctatttttggaaattatgatatgattcagcatccgaggaacatcagtgatttttcaaaggcaaatgcatgcttttatatgtttgtagatgaagaaacagaggcttatgtcaagaattctagttctctgtacaacaataataaagttggactgtggaggctggtggttgtccgaaacctcccttatgaagacccaaggcgtacgggaaagattccaaaacttctgctccataggctttttccaaatgtgagattttcagtttggatagatgcaaaacttgagcttgttgtggatccctatctcctgcttgagaggtattcttgatgtagagagctttacttgtaatgtcctacattttgatggttctataactattcttaaaagagaaaatctggagaagatatatgacctgtgaaattgaggtaaatgaatttggggctgtcttgcaccctagcaacttcacttcaatttcttagtgccaatgctatcgtgaactggtcccagcaaatttggatctgtggtagggttttgttgcatctgtatcccatcattgtagtacgacatttatttgactgatccatgaaagttgggctgctgtaagtgataatgagtaatctgatttctcactctacctgttaggttcctttggaggaagaataccacttttgcaatctctcggcattacaaacgctttgatgtgtttgaagaagcagaagcgaacaaagctgctggaaagtacgacaacgcgtcaatcgattaccaaatagagttctacagaaacgagggcctaacgcattattcttctgctaagcttcccatcacaagcgatgtccccgaaggctgtgtgatcatcagagagcacatccccatcacgaacctgttcacgtgcgtatggttcaatgaggttgatcgcttcacctccagggaccagatcagtttcagcacggtccgggacaaaatcagggctagagttggctggatgcctgagatgttcatggactgcgaaaggcgcaactttgtcgttcag

SEQ ID NO: 3615 - DNA, 1401 bp, Zea Mays
actctcgaatctcgactgtcggtgctgaactcgattactcatcactactcgtccttcgccgtttacctgtctcaggagtagtacgcagagtcgctggacggtggacgctagcccaattgactgcttcagaatttacagcctgctttcgattggataatgatcagcccattccgtattcaagttccaagcccaaatgcaaatccgatgcatgggccatgaccaccaatgggccttcgccgagcatcgagaagcctccgcgcccgccgcacgccggaggaaaggaactccccccgtccccaaattcccaaagacagtaccgccgagaaggacagagagtcagagactgagagactggaagcgcccgcgcgtgccggcgatggagagggacgtcgtgctctccgcacccgaggccgctgggtcctcgtcctcccccgcctcctcgtcgtactcctccttcgccgagaccagggtcatctgccgcgtgtgtcagaagcagttcgcgcagtacacttgcccccgctgtaacgcccggtactgctcgctctcgtgctacaaggcttgcagcaggtagggtatggtaatgtcgcactggtgtcaatagtcttccctgacgacatcttggcaccccctggctctgataccacttgtcaggaaccacgccggagagacaaccttcagcaggttgccgacaaactcctacctcccagggtcatagtgttcaatgcactgaatccttcatgcgtgagaatgttatggacgagcttaagcagatgcaacctgaggatgaatcaaagaaaaagatgctagatatcctcaagcggctccacttggaagaagagatggcatcagatggtgaagatggtatgttctgcgtgcttcatgttcctatgccattgatctatcttactttctttaataataacactagaggtgcacataattgcattttttttatattgtgataactgctaatgaggacaaaactacagatacctccatgccagtggtggattcagacatgagacaagagaggagctaaatataattgaacacttaaaatcttattaacgtaaactaaaagctataatttgtataataaagaacataaataactatgtaaattaacattgttcaagcaacatgtaaaatatttttcagctgcgagagagggagaggctggctgtgtcgtcgttaggtcgggtggggctgggccttcaaacctggaatttccctgggctgctgaggtgaaaattacagggggtattctcatttttcttgggctcaccccgggatgagcaccccctaccgcttgggccctagggctgctcctgctccatgcgcagtatgctacacttacgattttactgtttggtacattaagttttcctgtttataggtagt

SEQ ID NO: 3616 - DNA, 1854 bp, Zea Mays
cgcctcctcctctgagtacgacaacctccttgaggtggactctgtggttccccctcttgctcccttgcttcccacaccctcgtgtgcgatgcgctgtcaaggagtctcccgcgccgccacgtaggactgggcagaaaacccgataccagaagcccgatcccgaaaccaaacccaaataacccgaacccgaaaagctcaagaaacattttggtacgaacttccggtacccaaagtttttaagcaaattttgggtcagttgtaccggtacccgaatagacatactacccgaactggtgcctgacgttgaatcgctgtcgcctgtggttaagccaacagaagaacaacaccaacatcggaggaatcttgcaatgcttgcagcaggtagggtatggtaatgtcgcactggtgtcaatagtcttccctgacgacatcttggcaccccctggctctgataccacttgtcaggaaccacgccggagagacaaccttcagcaggttgccgacaaactcctacctcccagggtcatagtgttcaatgcactgaatccttcatgcgtgagaatgttatggacgagcttaagcagatgcaacctgaggatgaatcaaagaaaaagatgctagatatcctcaagcggctccacttggaagaagagatggcatcagatggtgaagatgagtccatgctatcagaggagcttattcaaaaagttatgtctggggaagagataaagctggaagacctctctgattgtgaaatcaaacgattccgtcaagctctggcctcaggtgagctcagtaagatgattgaaccgtggacaccttggtggaaaaaaccctcagccagatctatttcccttggcccggatggaagccagcttatcagacaagtaaacgcagaagacactgctgtaccatatccagatgcaaatactgaccaagaggctagcatcaacgaaatccctgaagggccagaatctcctctcccgtcactgaaacagttaacaaggacagagccatctcctttgcttgctgtccacttggttgacattctgtacagttactgcttcacacttcggctctacaacggtgattggcactcagatcctttgggtgcttccactgtcgccctgtcgatgtcgaaagtcatgggccaggatgctaaacctgagactgtacctgaagcactcgcagcctgcatcgaggagacatgctcaccagcttacaggcatactggtggtttcaggtttgctattggactcgtggacgatatcatcgccattctctccttgggacagaacgcacttatttgtgccctatgcgacttccatcgactcgttgaagttggtaagagcatgctcaaagtggagaaggtgggcaagacggagagggcacagggctctccaaagcttcgcagtgcagctaggaagctattcttcatgacttgttgggtccatgagcagccagatgaggcgtggccatctttagctcacatcgtccaggtgcagaaagcatctatggaggagttggagaccgggaattggaaggcggatagaaagagcaaaccacaatccgcggttcttatcgaggagctgtaggcatatggatgtaccactggaaactggatcgcgaagctctgtacccttgtgtatcgctcaggatgaatccaacgagagaccttgtccttgtaatgcagttagttgcttttgtgtacacttttttttttgaaaaaaattgtatttgttgaaatcctggttgaagcgatcctgctttactttgcttgttaagttgcgggctgatttaatccatgcgttggagcttatgcagttcagatattcttatgattgcaagtttgtg

SEQ ID NO: 3617 - DNA, 3220 bp, Zea Mays
aggcctcacgcggcgctgtcccgaccccgtcgaggcaaaaagccctggccgttccctcctcgccccgtgccgccgccgcctccgtgcgcgcccaggcttcctcctgtgacttcgctacaatgggtcatgccgtaatcaaaagaaggactacattttcatgccaacattgaagataccgccttccattattgctgggtaagttggaacagaggagtgcgtattcaagatgatggacatgaggcgccactctgtgtctgtggatgccccactgtcaagaaccttggtgcagctcaagcgagtgaggtcgctgcgggatccagcgacaaactcgatgagcaagtacgcgtctccttccgatcacatgatctgggagactgcttctagcaatggggtgactccggagcttggcaggtcagcacaccatcacctggttggggaagacgaagatgtgggagctgagcctactacaatggggtcagagcggagtttccggggaccaagcgcaaggactgcatcgtataggaaatcttctgctgtcaggatcagaggactgaacccaccaagaagcaagcaggttcaccgtgtccgccaagacggccaccgcaagtcattggattctaaccactcaaaccatagctctatccgtcaattggcagacaatatggtcagcaatgtggatgcagataaggaagagggggaagtgaattcctatgaaagaccaaaacttgcaatgccagataagtctgacgaagaggtgaaaatgccaggctgctccaaatccaggagcaagtcttctgctgcaatgagccgtgttgggagcccctgcatgtcagccagtgaggcacgctcagttgggtcaagaagaagcactttggggcatggaaccgaggatacacgactgaggtcaaatgatgtcgtgggatccaatttcagtggctgtggtataagctactgctggtcaggagcgtcaaagtaccgggagctttattctgacagcgatggtccagaccaacctctcttatccacagatgggattgaggcagcattccaaggcaatgtaccatacactgagacactgaggtgtctaagccagaagttccgccctcgttccttcagtgaactgattggcctaaatgtcgttgcccagtccctcctatattccacttgcaaaggaaaagttgctccaatgtacttgttccatggcccccggggtacaggcaagacatccacggcaaggatttttgccgcggcactgaactgtgtatctcttgaggagcaaaggccgtgtgggttctgtaaagagtgtgtcattcttttctctgggaagagcagagatgtgaaagagcttgacgctgcgaaaatggatcgtctaggccgagtgaaggcacttctcaagagcgcatcgctcgtgccatactcctcgcgcttcaaggtcttcatagtagatgagtgccacctcttgcgagaagatgcatggtcagcaatactgaagagccttgacgagccataccggcacacggtgtacattatgatcacttctgacatagaaagcctgcctcgcgcttccatcacacattgtcagaagttccattttccaaagataaaggtggcggatattgtctacaggttggagaggatctgtatagaagaaggattggaatttgaccatgatgggttgtacttcattgctgcaaagtctaatggttctcttagagattcagaaataatgcttgatcaactcagtttgcttgggaagaaggtcacaatttctcttgtgcatgaacttgtaggatctgtgtctgatgatgagttgattgaattgcttgatctagcgttgtcatccgacacaaccaataccgtaagacgagctcgagaacttatggggtcagcaatcgatcctctgcagctggtgtctcagttggccaaccttattatggacattctctcagggagatgtcaatctgcagtcacggaagtcagcaaaagtttcttgggtagatatgcattatcagaggttggaataaagaaactaagacatgcactgaagatactatcagaaactgaaaaacaattgagaacatcaaggaatcaggctacttgggttacagttgcgcttttgcagtttagcaccaatgaacctaaccctgttgctgaaacaaatgatatgcatgcacattcagtaactggatatacagatgactgggtttccaaggtgcactcaagtgccaatttttgccaggcatgtaacagcagcaagtccaactgttctgagagacactgtaggcggcttaagctcgagaacatatggaggagagccattggaaagtgtcgatctaggtcagctaaaagtttcctcaggaaagaaggcttcttatcgtcggttcacgtcaccgaagagctggccatagcagaagttggttttgaacacccagatcacctgtcaagagcggagaaaatgcaaagcctaatagaatcctctttgcaacacgttcttgggtgcaatgtggagatcagattcaaactcgtgccatgcccagtgagcaaagatgctaggttgaagagacagccgttcagctttctcaactgctctggccggaagcaagagctgtcagattcagtcgtgactgatgaagacgaagctgcgagggggcctggagcaagagagacaccgcttaaaggctacacctctagccagcaggaatcaccatacaccatgcgacgtgtcgattcgaaaccaacaacggtccacggttgcgaggatgacgcccggagtaccttgacgtcaagcagatccacggcagatgacctgacaaggacgtgcaggtcggagactggctacccaaagggtgtgcgtgagcagggccgctctgatggcacgcagcaggagcctgacctacagccgaactgcttctcgcgaacgctcaagcttcagaagaagctgctgtcttctggcgcagcgcacaccatctgtctgagggtccagccacataacaagatggatttcctgcctaagaaagagttcgatacgtacttctgcgcgtatgagccctacgagcagtgtccaagatcagattcaagagctacttacagttcaagagacgatgacttgtggagcaagaattcacgctttggctcgaatctactctgctggagagccccaaaacagtccatgtaatggagagcatcccccacaccagcatgttgctttcttacaagcgta

SEQ ID NO: 3618 - DNA, 3528 bp, Zea Mays
ctgtttgtttgtttttttccttgggagccccaagttcgttagaaaaggagagagtgtgtggattatctgcactgttttacctttcatttcgtgacttcgctacaatgggtcatgccgtaatcaaaagaaggactacattttcatgccaacattgaagataccgccttccattattgctgggtaagttggaacagaggagtgcgtattcaagatgatggacatgaggcgccactctgtgtctgtggatgccccactgtcaagaaccttggtgcagctcaagcgagtgaggtcgctgcgggatccagcgacaaactcgatgagcaagtacgcgtctccttccgatcacatgatctgggagactgcttctagcaatggggtgactccggagcttggcaggtcagcacaccatcacctggttggggaagacgaagatgtgggagctgagcctactacaatggggtcagagcggagtttccggggaccaagcgcaaggactgcatcgtataggaaatcttctgctgtcaggatcagaggactgaacccaccaagaagcaagcaggttcaccgtgtccgccaagacggccaccgcaagtcattggattctaaccactcaaaccatagctctatccgtcaattggcagacaatatggtcagcaatgtggatgcagataaggaagagggggaagtgaattcctatgaaagaccaaaacttgcaatgccagataagtctgacgaagaggtgaaaatgccaggctgctccaaatccaggagcaagtcttctgctgcaatgagccgtgttgggagcccctgcatgtcagccagtgaggcacgctcagttgggtcaagaagaagcactttggggcatggaaccgaggatacacgactgaggtcaaatgatgtcgtgggatccaatttcagtggctgtggtataagctactgctggtcaggagcgtcaaagtaccgggagctttattctgacagcgatggtccagaccaacctctcttatccacagatgggattgaggcagcattccaaggcaatgtaccatacactgagacactgaggtgtctaagccagaagttccgccctcgttccttcagtgaactgattggcctaaatgtcgttgcccagtccctcctatattccacttgcaaaggaaaagttgctccaatgtacttgttccatggcccccggggtacaggcaagacatccacggcaaggatttttgccgcggcactgaactgtgtatctcttgaggagcaaaggccgtgtgggttctgtaaagagtgtgtcattcttttctctgggaagagcagagatgtgaaagagcttgacgctgcgaaaatggatcgtctaggccgagtgaaggcacttctcaagagcgcatcgctcgtgccatactcctcgcgcttcaaggtcttcatagtagatgagtgccacctcttgcgagaagatgcatggtcagcaatactgaagagccttgacgagccataccggcacacggtgtacattatgatcacttctgacatagaaagcctgcctcgcgcttccatcacacattgtcagaagttccattttccaaagataaaggtggcggatattgtctacaggttggagaggatctgtatagaagaaggattggaatttgaccatgatgggttgtacttcattgctgcaaagtctaatggttctcttagagattcagaaataatgcttgatcaactcagtttgcttgggaagaaggtcacaatttctcttgtgcatgaacttgtaggatctgtgtctgatgatgagttgattgaattgcttgatctagcgttgtcatccgacacaaccaataccgtaagacgagctcgagaacttatggggtcagcaatcgatcctctgcagctggtgtctcagttggccaaccttattatggacattctctcagggagatgtcaatctgcagtcacggaagtcagcaaaagtttcttgggtagatatgcattatcagaggttggaataaagaaactaagacatgcactgaagatactatcagaaactgaaaaacaattgagaacatcaaggaatcaggctacttgggttacagttgcgcttttgcagtttagcaccaatgaacctaaccctgttgctgaaacaaatgatatgcatgcacattcagtaactggatatacagatgactgggtttccaaggtgcactcaagtgccaatttttgccaggcatgtaacagcagcaagtccaactgttctgagagacactgtaggcggcttaagctcgagaacatatggaggagagccattggaaagtgtcgatctaggtcagctaaaagtttcctcaggaaagaaggcttcttatcgtcggttcacgtcaccgaagagctggccatagcagaagttggttttgaacacccagatcacctgtcaagagcggagaaaatgcaaagcctaatagaatcctctttgcaacacgttcttgggtgcaatgtggagatcagattcaaactcgtgccatgcccagtgagcaaagatgctaggttgaagagacagccgttcagctttctcaactgctctggccggaagcaagagctgtcagattcagtcgtgactgatgaagacgaagctgcgagggggcctggagcaagagagacaccgcttaaaggctacacctctagccagcaggaatcaccatacaccatgcgacgtgtcgattcgaaaccaacaacggtccacggttgcgaggatgacgcccggagtaccttgacgtcaagcagatccacggcagatgacctgacaaggacgtgcaggtcggagactggctacccaaagggtgtgcgtgagcagggccgctctgatggcacgcagcaggagcctgacctacagccgaactgcttctcgcgaacgctcaagcttcagaagaagctgctgtcttctggcgcagcgcacaccatctgtctgagggtccagccacataacaagatggatttcctgcctaagaaagagttcgatacgtacttctgcgcgtatgagccctacgagcagtgtccaagatcagattcaagagctacttacagttcaagagacgatgacttgtggagcaagaattcacgctttggctcgaatctactctgctggagagccccaaaacagtccatgtaatggaggaaagaacgagtgaactgggtggaacaaatcgattctgctacgagattttaccaattttgcccgaagctggagacatggacaccacccgcagctgcggggacaaattttgaagggaagtctaggaggggtctgtgctattcttgatcttggtaggcagctgaggattgaggaactatttagtgatgttttcttggaaatgcagatcctttataatgctagtgggcagttgtacagcgcgccagcgacgaaaccctgtgaattgttctgttattctgaattttgtaggacgatttgatgctctctctctgaatttacatgatctttttattagctgaatgattacagtgtccagaaaataggcc

SEQ ID NO: 3619 - DNA, 1226 bp, Zea Mays
acaacacctaaattgtaacgcctccagcgaaacccaaaaccctcccaccaaatttcaatgacgccgtcgaaaccccctggcaagcgccgccgttcggctccacctccgcgcttgccctcacccgctccacccgtggcgctctcgccgccgggcttcgtcgccgaccgcgccgaggccgcggcgcgcgtggagcgcctcctgcggtaccagttctgcgaccgcgcccttctagaggaggccctgacccaccaatccttctcggatggcgctctctcttaccagcggctcgagttcgtcggcgacgccgctctcggcctagccttctctaacttcctatacctcaccaaccccaccctcgggcccggcgcgctctccacgctccgcgccgccaacatctctaccgagaagctcgcgcgcgtcgccgtccggcacgacctctacccgctgctccggcgcaagtgcccccgcctcgacctactagtaggccagttcattgagtcagtgaagcaagaactaatgcatgaccttgccactgcaccgtatggtggtagcgtggttaaagctcccaaggtgcttgcagatattgttgaggccatcgctgctgcagtctacgttgattgcaaatttgaccttgagaagctttggaagattagaaaaagaaggtggccctgcacatgaaaggaactttgtgtgttctgttcaggtagatacccaaactggcacttttgtaaccataggtgaatctatgtcaagagttaaggatgcagagaattcggctgcgcataagatggtcgaactattgttgaaattgtgagatatattcatgtacatggctagatctttggtatacctctttcgagaaacaatttgttcaaggatacctattatggtagctttgtcattacatggatagatctttagccctctcgagaaacaatttgttcaagtacacctattatggtagctttgtcatagtgtgggtcatgtcatctagttaatacggtttataattgagcatttatctcaaatcatgtctttttataatgcatgattctagacaacttagttttagaatagggtaaggagacgggtttaactatcaaaaccaatgcctatatagttattgttttgtactgtcctgttttacattaatattatataaaatatcatgaagcgtggaatattttgtggatttgatatttggattatttcaaataaggagagct

SEQ ID NO: 3620 - DNA, 1122 bp, Zea Mays
ggctataaataacccttaaacattattttataagcctcttgattacataatttgattatgaactcactaatgaaagtttttaacatgcaatacgccaccagcacagaactcaaagcatcctggatacattattgaatcgtgtgatgaacaaaagatgttagaaataaaaaattaaaaagaaaaaaaggcccatctaaaagtccattacttgagaaacccaatttccaccagaccctaacctttccattgttccagcgaacgcacacagccgccgctgtttcttcatcttcctcgcagcgccggcgctgaggctcgggctctcagcgacggcggcagcggcagcggcttcccctcccgcctctcgccagtcgcctcgcgccctcgcctccggtcctccgcacaccggataatggctcatcgtggacatctagatggactgactggccaagctcctgctcttatgcgccatggttccttcgctgcaggcagcctctctagccgctcacctttgcagtcttcatccacactggagatgctggagaacaagcttgccatgcaaactacagaagtggaaaagcttatcacggagaatcagcggttagcatcaagccatgtggtcttgaggcaggacattgttgatacggagaaagagatgcaaatgatccgcacccacctaggtgaagttcagacagagactgatttgcagattagagatttgttggagagaatcagattaatggaggtagatatacatagtggtaatgtagtgaacaaggagcttcaccaaatgcatatggaggcaaagagacttattactgaaaggcagatgctaacccttgagatagaggatgtgactaaagaattacagaaactctctgcctctggggacaataaaagccttcctgaattgctttctgagctagataggctacggaaagagcatcataatttacgatctcagtttgaatttgagaaaaatacaaacgtcaagcaagttgagcagatgcggacaatggaaatgaacttgataaccatgaccaaacaagctgagaagttacgtgttgatgtggcaaatgctgaaagacgggcacaagagaggatctatggaacctaggacctttg

SEQ ID NO: 3621 - DNA, 2252 bp, Zea Mays
ggctataaataacccttaaacattattttataagcctcttgattacataatttgattatgaactcactaatgaaagtttttaacatgcaatacgccaccagcacagaactcaaagcatcctggatacattattgaatcgtgtgatgaacaaaagatgttagaaataaaaaattaaaaagaaaaaaaggcccatctaaaagtccattacttgagaaacccaatttccaccagaccctaacctttccattgttccagcgaacgcacacagccgccgctgtttcttcatcttcctcgcagcgccggcgctgaggctcgggctctcagcgacggcggcagcggcagcggcttcccctcccgcctctcgccagtcgcctcgcgccctcgcctccggtcctccgcacaccggataatggctcatcgtggacatctagatggactgactggccaagctcctgctcttatgcgccatggttccttcgctgcaggcagcctctctagccgctcacctttgcagtcttcatccacactggagatgctggagaacaagcttgccatgcaaactacagaagtggaaaagcttatcacggagaatcagcggttagcatcaagccatgtggtcttgaggcaggacattgttgatacggagaaagagatgcaaatgatccgcacccacctaggtgaagttcagacagagactgatttgcagattagagatttgttggagagaatcagattaatggaggtagatatacatagtggtaatgtagtgaacaaggagcttcaccaaatgcatatggaggcaaagagacttattactgaaaggcagatgctaacccttgagatagaggatgtgactaaagaattacagaaactctctgcctctggggacaataaaagccttcctgaattgctttctgagctagataggctacggaaagagcatcataatttacgtttgaatttgagaaaaatacaaacgtcaagcaagttgagcagatgcggacaatggaaatgaacttgataaccatgaccaaacaagctgagaagttacgtgttgatgtggcaaatgctgaaagacgggcacaagcagctgcggctcaagcagcagcacatgcagctggtgcacaggtgacagcttcgcagcctgggacagctcaagctaccacggtttcagcagcagcagccacagactcatatgcaggtgcatataccagctacccccctgcatatcagcagggagcccaggctggggcatatcagcagggtgctcaggctggggtatatcagcagggagcccaggctggggcatatcagcagggagcccaggctggggcatatcagcaggggggccaggatggggcatatcagcagggggctcaggctggggcatatcagcagggagcccaggctggggcatatcagcagggagcccaggctggggcatatcagcagggtgctcaggctggggcatatcagcagggagcccaggctggggcatatcagcagggggcccagtctggggcatatcagcagggggcccaggctggggcatatcagcagggagcccaggatggggcatatcagcagggagcccaggatggggcatatcagcagggtgctcaggctggagcatacaactatgcttatgatgctggcacggcttatgcatatgcaggttactctggctatccagttgcaggctacgcgcaaagtgcagtgcccaactattcctatgctgcacctccgcagccaacaagcagcggtgcagctacgaacgccgcaggaggccagtatggggcagttggtagtgctggatatcctactgggcaagttcagccgagcagtggcactgcaaatgcagcgcaagcacctcctcctccaccaccaccggcagcaccatatccccccagcacatatgaccaaaccagaggagcccagagataaaatctgggatgtaaaccagatggatgtttgccatgcacatttgttgagcagacaaatatggtgaaatctgggatgtaaaaccagatggctgtctgtgcctccatcccattgactagggcgtattttcaccaatattgtgcctccagtgcaatttcttctgtgttatatatcaccaccatttgttgagcaccgtagaaatgagttccagacggccgggacagcaacaccacatgtgtctttacatcaccaccatttatccacagcgcgtaatgtaatggcatcaacatcaatatatatggttcctggct

SEQ ID NO: 3622 - DNA, 2240 bp, Zea Mays
cctggatggcattcaacagctcaagaaaatcccagcgctcctccccagccacaaatcgcttgcacgtggggcccaataacgcggtgtccactgcaaccgccaacgctgcacacagtgggggcgagcaaggcgaccacggtggcgatagagacgcgcgatttttactcttcgcggtaaccgattcttgtaaacgcaagagctccatgcggccaccggccacggttcggcaatggtagtttcgtcacacttcctctgacctctgctccaccgctcgcccatggtgctagcatggtaggaggtctagttctgtcccaggcgcagacgcaccaggccgccacgccaagaaccgccgcaccggcgccggcgccggctcaggcgttggagaagaggccgagggaccaggcgcagccatgcggcacagtggcggcggctgcggccgtctcggtctcggcgccgagtttggacgaggtcaggaaggtgcacgcgcggcacatcaagctgggcctcgaccggtgcccgcggtatgcgcggccgctgctcgcggcgtgcgcggtctcgggctggccgggcggcatggagctcgcggcgtccatcttcgagtcgctcgtcgagccggaggccttcgattacaacaccctgatgcgcggccacgtcagcggcggcggtggcgaccgcgatccggcggccgcgctgcgcctgtacattgacgggctggaggcgggcgtcagccctgacagctacacgttcccgttcgtgctcaaggcgtgcgcgcagttggcggcattgcaagaagggaggcagttgcaggcgcacatcgtgaagctcgggttccagcacgacgagcacgtgcagaacagcctgatcagcttctacggcaagtgcggcgcgccggcgatggctcgtctggcgtttgaccgggtggaggccgaggagcgaacgacggtttcctggagcgcactcctcgcggcgtacacgaaggcagggctgtggggcgaatgtctcgcgtcgttcggctcgatgatgctcgatgggtggaggcccgacgagagctccatggtcagcgcgctctcggcgtgcgcgcacctaggatccttcgacgccgggcggagcgtccactgcgcgctgctgaggaacaccgcgaggctgaacaccatcatgctgacgtccctgctggacatgtacgccaagtgcggcagcatcgagaaggccgcggcggcgttcgacgcgatggatgacaagagcgcgtgggcgtacagcgccatgctatccggcctggcgctgcacggggacgggcggaaggcgctgcaggtgttcgacgcgatggtccgggagggccacgcgcccgacgcggccgcgtacgtcggcgtgctgaacgcctgcagccgcgccgggctgctcgaggacggcctgaggtgcttcgaccgcatgcggctggagcacaaggtcgcgcccaacgcgctgcactacggctgcatggtggacctgatggcccgcgccgggaggctggacgacgcgcgcgcgctcatcgggaccatgcccacggggccgacggacacggcctggcgaagcctgctgaacgcgtgccggatccacggcgacctggatctcgcctggcacgcccttcaggagctcaggcgcctcggcgccgccaacgccggcgactacgttatcgtcgcggacatgcacgccagggccaagaattggaccgctgccgccgcgctccggacagaggcggtggactcgggcctcgcgcagtccctcgggttcagcgccgtggaggtgcgcggggagctgcaccggttcgtgtcgcaggacatggcgcacccgcggacgcgcgacatctacgagatgctccaccagatggagtggcagctgcggttcgatggctacaaacctgacacgtcggaggtggcgctggacgcgggcgaagaggagaaggggcgcgtggtcgcggcgcacagccagaagctggccatggcgttcggcctgctcagcacgccggagggggcgccggtgagggtcgtgaccaacctccggatgagcaaggaatgccacgcgtacagcgccctgatctcggagatcttcgggcgggacatcgtcatcagggacaggaaccggctccaccggttcaggcctcaggtcgaaccaccaccaagcagcccaacccggacgaaaccaaggcgaaaccaaggcgacgccatcgacgagctcagcgacgccggcgccgtagcgaaagcacc

SEQ ID NO: 3623 - DNA, 3271 bp, Zea Mays
caagctaataatggcgcgcatcatgacaacaaggcggtcggacagcatcgccgacatgatgcccgaagctctgcgccagagccggtactacatgaagagctgcttccagcggtacgtctcccggggcagcaggctcatgaagcagcagcatctcctggaggagctccacgccggtagctcggacagcttcctcgggcacgtcatttcctgcacgcacgaggccgtggtgctccctccctacgtggccttggccgtgcggaggaaccctggcgtctgggagtacatcaccgtccactccggcgacctcaccgtccagcagatcacgccctccgactacctgaggcgcaaggaaagcctatacgacgaccactgggcgcaggacgacaactccctggaggtgaacttgagcctctgcctctccacgccccgcctcacgctgccttcctccatcggcaacggcatgcacttgctgtccagattcctgtcctccagcctcggcggcgtgaacaagatcaagccactgctggactacctgctggcgctcaggtaccagaacactaagctactcatcagcgacaccctcctcgacacggtgggcaagcttcaggccgcgctgctcctcgcccaggccttcgtctccgagcagcacccggacacgccgttccagcagatggcgcacaggttccacgagtggggactggagaaaggatggggcgacaccgccggggcgtgcggccagacgctgggcttcctctccgagatgctccaggcgccggaccctgtcagcgtggacaggttcttcagcagggtgccgtcggtgttcgacgtcgtcatcttctccgtccatggctacttcgggcagcacaaggtcctggggatgcccgacaccggcggccaggtcgtgtacatcctggaccaagttagagcgcttgaggaggagcttcttcaaagaatcaaagggcagggcctcactttcaagcccaacatccttgtggtcacaaggctcataccagaagcaaagggcaccacctgcaacgtggagctggaacctattgacaagacaaggcactccagcatcctccgtgtgccattcaagacccaagatggccaggatctgccccactgggtctcccgcttcgacatctacccttacctagagagatacgcccaggattcttgtaccaagatccttcatatattggggcgcaaaccagacctggtcatcggcaattacactgatggcaatttagtagcttacctggtgtcaaggaagctaggagttacccaggggacgattgcgcatgctctcgagaagacaaagtatgaggattccgatgtcaagtggagggaaatggaccacaggtatcatttctcatgccagtttactgctgatatgatcgcgatgaacaccagcgacttcatcatcgctagcacctaccaagaaatagcaggaagcaaagacaaacctggccagtatgagagccactatgcgttcacaatgccagggctctgccgcttcgctacaggcatcagcgtcttcgaccccaagttcaatatcgctgcgcctggcgcagatcaatctgtttatttccccttcacactaaagcacaagcgcctcatgggcttgcacccacagatcgaggagctagtctacggcaaagaggaaaatgatgagcacatagggtacttgcaagacaggagcaagccggtcatattttcaatggcaaggcttgacaaggtcaagaacatcactgggctggttgaatggtatggccagaacaagaggctcagggaccttgctaaccttgtagtcgtgggagggctcctggaccccaagcactccaaggacagggaggagattgaggagataaacgagatgcacagtttgatcaacaagtaccagctcaaggggcagatccgctggataaaagcccagacagaccgtgtgcgcaacggggaactttaccgttgcgtagcagataccaggggagcctttgttcagcctgcgctctatgaagcgttcggactaactgtcattgaggcaatgaactgtgggctgccaacctttgcaacaaatcagggaggccccgcagaaatcatcgtcaatgaggtctccggtttccatatcaatccacttgatggcaaagaggcaagcaacaagattgccaacttcttccagaaatgcaacgaagatccaatgtactggaacagaatgtccactgctggactgcaacgcatctacgaatgctacacctggcagatctatgcaaccaaagttctgaacatggggtccatgtatggcttctggaggactctggataaacaagagaagcaggacaaacagcattacctaaacatgttctacaaccttcattataggaagctggcaaatacggtgccaaaagtgggcgaacagcctgagcaagctacggcagcggcattgcctgataggtcggcaacaaggccaaaagaaagagggacacagataaggattcaaagaactgtgagcaacttacttggaccagtgcttccagcctcccatctctcggatgctgcctgaattgaggggctatcctgaccaaaaccagatgtgtgcccgagtgataatctgtttcctccttttttttcctcataactgtcattgactgcgaaagatgtaaatggaaaataagtaaataaatgtgttaaaaacagtaaataaaataaaatagtagatgtccatgatgattgtgaaagcaataggtactggccagagttgcaagctgcccgtgacatgaaccatcaccaacctggcacaagcaatacttgccagtagtccctggaagaggggatagcttaccgatcgatacagagcaggtgcaccttgcataactgcacatatgaatatgatgcaagttagaaaaatagtgttccaaaaggtaatttcaccagagaaataagcacttacgtgtaacagaggttgtttgtaagagtctgcaactcatcagcagagaagttgttttcatcccacaagacatgataatgagctggacagctagtgcccttacatggggtaggtaaatgatgacttgtatgtaagatagaacgatattatctgacagaccaggtgcaagcaaatcatggctagattaggtatccgcataggtttttttaaggggataaaattagaggcttagtttagaagcgaaaattagaagtcttaattcatcaccctcttaggcgtccatatttctttcaatagtgacttcattctttaactgaacgatgtttt

SEQ ID NO: 3624 - DNA, 1205 bp, Zea Mays
gggaccgtgaaggcgtgaaccgagcccacccaccaaccaaattccgcgagaccgcgactgcttctccatccttccacgaactagacgagggaagagcgctgaagctgtggaggaaaacgaaggatctccccgtgcttgtgtatgccaggtcgcctgctctccgtccgcatcccgtccctcgcgaaactcggcgctcccaggtgtgcaaaatccatggcttcagacactggcaagaagctcatccagatcgatgtgagctcggacacagtatgcccttggtgctttgtcggcaaaaagaacctcgagaaagcgatggagcaaagcagggacaagtttgacttcgaggtccgctggcatccgttctttctaaaccctgatgcgcctaaggagggcgtcaggaaatctgacttctacaaggcgaagtttggtcctgttcagtatgagcgtgtcatttctcgcatggccgagatatttcgaggactcgggcttgagtatgacatgtcggggctgacaggggatacgatggatagtcataggctcatagcacttgctggacaccaaggctatgacaagcaaaatgctcttgttggagaattattccttaattacttttgtgaaggaaagtatattggtgacaagcaggttttgctggacgctgcaagaaaggtgggcatagaaggggccgaagaactgtttcaagaccctaccaaaggagtcgatgagatcaatgataaatatcaactcagtggtggccagcctccaaatgtattcatgagggcgtttgagatggctgcaaaagatggagcttaatggcatttaaaaggagctcctccagtagtcttcgcatatgttaaaaaggaataggagccgaatttaacaataaagttccagcacagctcatcgctgatttgcgaaaaatatgtggaatcagttgtatttccgtagttctgatatggtgataattagtggtgaagatggtgtggatgttcactttcgaataaaattctaggcgatcggatatggcatatgggttagaatgccccatcatcagagcccggtctgtatttacatttggttcgataggatgtgtgcaagatatcagaaaacaacaaagttcagatttgatattcgaaaggaataaaaaaaaagctagcatacacagctgcatttagattgattgttaccatttacactgaatattccgc

SEQ ID NO: 3625 - DNA, 1292 bp, Zea Mays
ttggcaggttgctgagactgagagcacgggaccgtgaaggcgtgaaccgagcccacccaccaaccaaattccgcgagaccgcgactgcttctccatccttccacgaactagacgagggaagagcgctgaagctgtggaggaaaacgaaggatctccccgtgcttgtgtatgccaggtcgcctgctctccgtccgcatcccgtccctcgcgaaactcggcgctcccagcaggtgtgcaaaatccatggcttcagacactggcaagaagctcatccagatcgatgtgagctcggacacagtatgcccttggtgctttgtcggcaaaaagaacctcgagaaagcgatggagcaaagcagggacaagtttgacttcgaggtccgctggcatccgttctttctaaaccctgatgcgcctaaggagggcgtcaggaaatctgacttctacaaggcgaagtttggtcctgttcagtatgagcgtgtcatttctcgcatggccgagatatttcgaggactcgggcttgagtatgacatgtcggggctgacaggggatacgatggatagtcataggctcatagcacttgctggacaccaaggctatgacaagcaaaatgctcttgttggagaattattccttaattacttttgtgaaggaaagtatattggtgacaagcaggttttgctggacgctgcaagaaaggtgggcatagaaggggccgaagaactgtttcaagaccctaccaaaggagtcgatgaggttcaggaagaactcaagaagtattcatctggcatctccggggtaccacattttgtgatcaatgataaatatcaactcagtggtggccagcctccaaatgtattcatgagggcgtttgagatggctgcaaaagatggagcttaatggcatttaaaaggagctcctccagtagtcttcgcatatgttaaaaaggaataggagccgaatttaacaataaagttccagcacagctcatcgctgatttgcgaaaaatatgtggaatcagttgtatttccgtagttctgatatggtgataattagtggtgaagatggtgtggatgttcactttcgaataaaattctaggcgatcggatatggcatatgggttagaatgccccatcatcagagcccggtctgtatttacatttggttcgataggatgtgtgcaagatatcagaaaacaacaaagttcagatttgatattcgaaaggaataaaaaaaaagctagcatacacagctgcatttagattgattgttaccatttacactgaatattccgc

SEQ ID NO: 3626 - DNA, 2617 bp, Zea Mays
gccacgaggcgagcagtctcgagtgatcccccctgtagtccccggccccgtctctccgccgccgcctgcaaccgcttcacgtgcccctcgcaggtcccctttccgaccccaaatggagccgaagaaatcctccgtccagcgccagccccacgccatggagcccaacaagtcctctccatgcggcgccaccgccaccgctcccgccgccaccaccgaagccgagtccccgttgtgcagcttgttctacccgccggcgccggcgccgaccgcggcaaatgggaaagattcggacttgtacagcattctttacaaagggcagagcgggagcgcacaagctggcgtcacagatggtaaaccgcaatgggctccttccagaagtcgtgccgcgaatgcgaaggacggtaaacattcaccgccttatgactcagttgatacgtcgtgttttggatcgtctgtggattatggtggtcgagattatttctacggcagctctacgcccaagaaagtgacagaatcctccactgactacaaagggaacaagaaagatcccgccgcagattctcatggcgattggtggcaaggctcattttattactaagagaacccggtggcctctccttggacaacaaggtaaacagaaggatcctattactgttaaagctaccaagtttgttgctacaacgcatatgctatccatctcacattttttaccagagaatgtttttcaaattccattttaatactcgcagctgatagtttgtagataacgatgttggctcacttggcctgtgatacatcacgtgtaatcttatttcttcatatagaagggagcgtatgtcctctacttctccaaacgttattttcctcgctatttaattttaaacaacaaaggattccttttccatggatctcctctatttacatgttcggttttactcccatctatatggattgtaggagatttggtaggtttaaatctatagcgagtcaacatctctactagcttttttctaatcctatccaatacgtgtggagtaggaataaccgaataaggcttaaagaggatgcccagccaatcccactcctatgttgaaattctgttaacgcatagttcgacgtttaggctatcttccaactctgcctttcgtgtttgcggtatcaacctataaagataaacttatttatttgtttcattctttatgtgtctcgagctgtcatcatcttttttggtagacaacaattttttctgcagaactagctgccggattgctgtacaatgatgtgcatgtggagaaaggccagtgggtggggtgggatcaactgtattggagtgaaagctttgattgacatctaccttaacatcatttccatattgcgtaggcaaatcattaactattgctgttttggtattgttttggctgataactagtcacatcgtttttagtatggttacatgggctaccgttgtttgtcacctaaacagtttggtaggtagcaaggataatgaaagggattgagggaacctaaataggtattttggtcccttcaatcacctccattactcttgctacaagcaagcctttagagtgagaagccaatcaaggaaagcacacctgactattaattgagcgcagtgatgtgatgtttcattatattggagcgcaagggaaaccttagacaataatagtgtaaattagatatcgccacaactttatttccatgtcaagaagctaagcagaattaaaatgttaactctgttgatctactatattatattacttggctggtgttaccatcttccatgctttttttttgttatttaaaaaaaagacaaatccaatgtcggagggcttccacgtacgtaatctcaaatccttatggatcagagggagtcttctctaaagcatagaaatggttggtttgttaacgcatagaaaatcaatgacaaagatctagagtttgtatgaaattgaaattgaaaatggagataggtgccaagcatttatatgtaactgatgctctactctacctgttgttatgcaccctttggtgaatagtagaagtatttattatcatgttattaatttttccagctgatgctctactctacctgttgttatgcaccctttggtgaatagtagaagtatttattattatgttattaatttttccagctgtcctcagaattatattggattctgcatggcaggaacagaaggagattctattgacagttcttctggaacagaagaacagaaagagaaaatagtattgtcggtgtcatagtgaacccgctttcgttcagtggtggtgccattatctagaagcatcatctcagatgtgcaagcaatgaagctgtaggacagtacgaattaggtcgcataagggtccttgtccattgtacgccagtaatatgaagggtttggtgtctaattattagtcaaatgtctgtacagttggatcgtcactccaaagcaaaaaaaaagtgctggagaagcggcggtggcttcacattgtacattttttttatcggatgggatttgactgaagtttggagactgttcttgtcaattacattatacaggtatcgacttcaggggaaaaaacttctatttcc

SEQ ID NO: 3627 - DNA, 2225 bp, Zea Mays
gtcttcttccccaatttctcgcggcgtcgttccgtcccaaatatcgccccgcgatcccccacctcgccgactggctcccccgctccacctcgtcgacgggcagaggagacccctcagggccgggatcggactcctctttcaccgcaggcaattgaactcacgcagggtatacggttaataaggccaaagtataccaatttgattgccgtgtctgtcgactgcactcgcaaccgaatcgaatgtggaaagtgcctgtctccagaggtcctttatagcctgttttaggctttgttttgcacgatttttccatgcactttaggctaaaaatgctttggtctgaaacctatctgcccttttttctggccgccaacggtttcagccaacgcataccagtgatgaagatcttccgctgaagcttgctcaagctgcaataaagcatgacggtggacctagttttgaggtggatgcgctgagttttgaaggtggcgagggatctttgctgcggggttctatttgttctcagtgatttttggcaaacactctttggttagattaagaatcatggaaaggtacaaattgatacggaagataggtgatggaacctgtgggaatgtttttatggcttctaatgtagaaactaatgaaattgttgctgttaaaaaaatgaagagaaaattttgtcattgggaagaatgtattagtctgcgagaagtgaaggcccttcagaaactatttcaccctaacattgtgaagctgaaggaagtgacgatggaaaaccatgagctgttcttcatctttgaacacatggagtgcaatttatatgatgtcataagggaaaggcaagttgctttccctgaaagggatataaggaactttatggtccagatactgcaaggtcttgcatatatgcataataatgggtattttcaccgtgatttaaaacctgagaatttgttggtgacaaatggtattattaaaattgctgactttgggttggcaagagaaatatcttccaatcctccttacactgattatgtttccaccagatggtatcgggctccagaggttctactgcaatcttcagtttatacacctgctattgacatgtgggcggttggtgctattttggctgagctttttacactgtccccactttttcctggtgaaagtgaaactgaccagctttacaaaatatgcactgtgcttgggacccctgattgcactatttggccagagggaatgaacctgcctcgttcatgcagctttaagttttttcagaatcctccaagaaacttatgggagcttattcctaatgcttcatctgaagcaatcgatttgatccagcaactttgttcctgggatcctcgaaggaggccaactgctgagcaagcattacaacatcctttcttcaatgtgtgcaattgggtaccaagacctgtacatgatgcttaccatacaaaaacaaacggacctaaagctgaaccaagattggaactgaacctgtgggatttcagcacagaacctgatgattgtgtccttgatttaactctcagtctgaagccaagtttttctggaacagaccttggtaagcatgttccacgacgtacagaagaggaaattctcctgtacccgggatttgagaatacccctgtgaagtccggtttttggcctctggtgccatctgatcgtcccgttggtgatgttccggccataccatcctggcagcaggcgtacatggttgacagccaaggcgcattttctggctctccgttcttgcagtcgaacctgttggagaaccgttcgttagcacctatccggcaggtgaatttcttctgacggagacaggattaacagattcatacgattcttgatacgtccagcttctcgctgtatacacactatcttgaataaagtgttgccagtagaggaaatgtatatacagttcgttcgtagctcttgagcttctttctttctagagtacctctttttttttaatcgtctgttcatattccacaccactcctatgtaaataacggcatgcatgataatctctctcccaaaaacaaacaattttgtttgtacgccggctgctttgattttagaaaactttaaaacagatacagtatttgcaatacttcagttttaaaaacaaagattttagagcagctccaaaagagcacaaaatttgttcctaaaatctttatcagcatagttggaaaataaaa

SEQ ID NO: 3628 - DNA, 3416 bp, Zea Mays
cgcagagcacacacgggcaccgggcgcaccagtgcaccaccgcatacggccgtgcgcttcctttccttcccccgccgccgcagatcttccccgcagtcccggttcccgttcaccacctccgaaccagaggaggaatggccatctactccttcctttctgttcgcaagcgcccagttgttgtcgtcgccgccgtcaccctcttcattgtcgtatcctctctcttcctcctcttcagccccgcaccgacagcgctcccgtttttctcctcctcctcttcccacctctcctctcaagcttcaattgctgccgtctcctctaacgcatttccacctgagaccccaacctctgttgtctccaactgggtcagcagcaacacttctgctgatcgcgtctctgctgacgcatctccgcccgtagtcggaaccgccatcgcgtctgatgcggtcagcaacagcacggctgacccgcctaggccagataccaccgccgctgctggcgacgcgaaggctgatgtgtcccaaccagatcacggcatgccccctgccgccactgaagcgagtggatcggcaggcaacggtgagacagccgcgggagtctcgagcgagagggatgaggaggggcaaggcggcggcggcgccgtggaggagctaccatcgtgggagctgtgcaaggtggggaagggggtggcggccgcggactacatcccctgcctcgacaacgtgaaggcggtcaaggcactcaagtcgctgcggcacatggagcaccgggagaggcactgcccgacagatccgaggccgaggtgcctcgtgccgctgcccgagaggtaccggcgtccggtgccgtggccacgcagccgtgacatgatttggtataataatgttcctcatccaaagttagtggaatacaagaaggaccagaactgggtcaggaagtctggtaactattttgttttccctggaggtgggactcaattcaaaaatggcgtggcttcatacattaaattcattgaacagattttaccaaacattcaatggggaatccatacaagaactgtccttgatgttggatgtggtgtggccagctttggtggatatttgcttgataggaatgtcattaccatgtctgttgcacccaaagatgagcatgaagctcagatacagtttgcactggagcgtgggattccagcatttttggcagtgattggaacacaaaagcttcctttccctgataattcatttgatgtcatccactgtgcaaggtgtagggtccactggtggaaaaccattgttggagctcaatagagtactcaggcctggagggtattacatttggtctgcaacacctgtctatcgcaaaaacccaagagatatagatgattggaatgcggtggtagctctgaccaaatcgatctgctggaggacagtggtaaggtctcgagatatcaataagatcggagttgttatataccaaaagccgacatcaaattcatgctcccttgagagaaaaaataatgaaccacctctgtgctctgagagtgatggatcacgtttcccttggtacattttcttgaactgtcttaaccagtggttacatcagtggtcaatagtcaaggcaattatgatttgtgcaatcttgggtcttggttactgatgcatcggcttcagaggggatttatgctatgatctttttcataccatatatgttaatcatcttgttccccttcttcaggtataaacctctcgatagttgcctctttcctgcagttccgagttcaggtgaagggaatagttgggccgtctcgtggcctgaaagacttaatattaagcactcggctacatctaacaattcttccattcagtttcctcaagaaaaaattgattctgatacaagttattggaaggaccttgtttcagaaatatatctcaacgaatttgcagttaattggtctagtgttcgcaatgttatggacatgaatgcgggttttggagggtaagcaaaaactggtttgagatctttatgcaaaattaatttagactagttgattgtatcagctgttacaacaacataccttttgaaatgtctaactttcacttcttctgcctggatcttgtttgacacttaattcagatgtgtcagacagtcactcaatcagaatcactaatttgtaaatatactgacactatggttttcacttttttctggcatagtttttttttctggttgaagggattaatatgcagattttttcaacagttgactttgcaatccttggcttcaacttatctattgttaaacggggtacactgtacatagttgttgtttagaagctgtcagtcagctttacatagtcctggattgtgagctgaggtacccatacctcattaaaatcaagtatttaactttattcagaggacatatgatgtgcttgcatgattcttagggtttatatttgatactacacttagtttcagcttttatttacacagattcttcttttcctaaattagtcataatttatgtcctccatctgtggtactccctctgccccaaattaaaatttgttttagattattaatggattcatacaacacttgatgtatgtgctttatatatgtgtctaaattcatcatcacctatttgaatatagacattgaaacctagagctaaaacgaatagtattttgggactcagggagtaactggtaagacattgatcatgactgtttccttaaatcagatttgcagcatcaattatcaatcgaccgttgtgggttatgaatgttgtacctgttgatcagccagatacattgcacatcattttcaacagaggtctgattggggtatatcatgactggtgtgaatcttttaacacatacccacgaacttatgatcttattcacatgagttatctcttagggccccttacgaaaaggtaaatgaactagccttttaattgtgaagaactcttactgtgtatattctgacattctcgtgtcccaactttatagcaagcaagctttttcattttttttatcttaggtgccacatcattgaagttgcagctgaaattgacagaatacttagacctggtagatggtttgtgctgcaagacactatagacatgataagaaagatggaccctgttctcaggtctttgcattacaagactacaattgtcaaacatcaatttcttcttgccaccaagggtttctggcgccctggcagtataggttcttagtcatgatgattccggcttccacccaaaatgtgaaatttgtcgaggaaatttcgacagtgaatttgtacgaggtggatcgcaagatcgagaaccgacgacggtaaacgcacaaacgacacgagtttagacaagtccgaggtctcaatgcgagataataccctacatctagtatattggtg

SEQ ID NO: 3629 - DNA, 1008 bp, Zea Mays
cggggtatttaaacgagtacgacgattgccggagtatattttttggcgagcgccagcggcaaacgaaccgtctccattccgttctccacttctccagatcccctccgcaatctaccttcgcgcggctaccacggcgccggtgctgaagccagcgaccgtggccatgcagtcgccggagccctcctcctcctccccggttctcctcaatatagggggcaagaagtacgcgacaaccgtggagacgctgatgcagcgggagcccgactccatgctcgccgccatgttcagcgggcggcacacgctccatgatcacccaaccacggggaagggagtggtcttcgtggacagggacgggaagcacttccgccacgtgctcaattggctcagggacggcgccatccccgtgctgtccgagtccgactaccagcagctgctgcgagaggcagagtactaccagttgctcggtttagtcgactacataaacgagaggctgggttggaaggaaaccgacaattcggaggctgaattgacacgaaaggacgtgatcaagtgcatacaaacgcaaagagtcaggttccgtggcgtgaatctatctggccttgatctgtctaagcttgacttatcagaggtggacttcagctatgcatgcattaagaacactgatttttcatatgctaacctttacaaagcaaaatttgggcaggtagaagcttcgtcttcatctttccaaaacgcaattttgcgtgtgagtttattggagctaatcttgaagaatctattttggatggagcaaaccttcgaagtgccaatttacaagatgcttgcttaacacgatgtagcctcattttaacagatcttcattctgcccatttacagcatccaaaatggtggcagcagaatccagtgtttgctgaagtgcactaaggagacatgcctgtttgttttccttcatagggataatgttgtattatttaactagattgctgcaaataaaagattcatatcaac

SEQ ID NO: 3630 - DNA, 3413 bp, Zea Mays
cgcagacgctcccaatcccatgcgcccctctgctctcacggtttgatttccctttcagttgggccgccatggccgcggtagcagctgtgcgcctgcaccccggcctcccccatcgccggccctgacactgggtaaacgtggtggctgaagctgctgctgaggattcgggatcttcttgctgccgccacgagctgcctgcgtgatattgacacggcgcgctcccctggctcctgggcatgacgaggggaggcggtggacaaggaggcaaggaggagccggggaaggtgatgggtccgctgttcccgcggctccacgtcagcgacgcaggcaagggcggcggcccgcgggctccgccaaggaacaagatggcgctctacgagcagttcaccgtgccgtccaaccgcttcagctcccccgcggcctccgcccgcgccgcgggggccagcctcgtgccctccacggcggctgcccaggttcatttgttatgacctttatatgtatcctggctgtaatgatatgcttgggggggggaggtccagaggacaaccatgtaacaataaccagcaagaaatcagttactttgcaaatacggtgatagaaaggtagctacttgagaagaaatccaggggctgcccgcactcatgattctctgtccttattctctcaccattttgcggggtaaagcagtgagcaaagaaagaattgagattttgacccttaggtttatggttatgacaggacgctgttccagcccttcgacgtgccttcaaatgagcctcctcgttcatctgaaaagttcaaaggaaacactatcaacgggcagtctaatagtacaagaagagaacctttgaggatgtcctcacagaccaagaacaaggacgtctgtgcttcaaaatcaattgccaagtgcacctcacagcatagagtgggcaacaccatcatgtcttctggaaagaaagtggtcagtgatgatgaatttatggttccttccatctgttatcctagattttatcgacagtctactcaagatcatgcagataaatcaaaaccccaatctactacaaacccacacaaaagtcctgcaatgtccaaatcatctgtagagtgctatagtactgtgaacaagcacttggacaaaatcaatgaagctgataggaggttaatgaactctccaaaggttaaggagaaagaagcagtgcaaggatcaaaagctgtggaagttaaagaaaagagttcatcatttcaggcatcagaaaagttcaaagacaaatatgctaagctatgtcaaatgaggaataaggcaagtaatataaatcattgtgacaacaacggttgccaacctgcaagcgtgaatggaaatttcacagaagcaaagaaccctacagcagctagaaatacatcttcctgtaaaccatgtactgatgtagatagctctaacaggaagtctaatttactggaaagaagcccacgggaagttggtgctaagagaaaaagaggacatcacaatggagagcaaaatgatgatttatctgactcctcagtggaatgcatacctgggggggagatctctccagatgaaattgttgctgctattggtccaaagcatttctggaaagcaagaagagctattcagaatcagcagagggtttttgctgtccaagtgttcgagctgcataagctgataaaagtgcagaaattaatcgcggcatctccacatctgcttattgaaggtgatcctgtccttggcaatgcattaacaggaaaaaggaacaaacttcctaaaggaaattcgaaagttcagaccctgtcaatcacaaacaaagatgatatccagccaaccctagagcaaccagagttatcaaaacaagacacagaaggaaacttattggcccattctcatgatgatggacttggtgacaaccatcataatcaagctgcaacaaatgaaacctttacaagcaaccctccagctatgcatgttgctcctgacaacaaacagaataactggtgcatgaatccaccgcagaatcaatggcttgtcccagttatgtcgccttctgaaggtcttgtctataagccttttgccggcccttgtcccccagttggaaatctgctgacaccattttacgccaactgtgctccgtcaaggctgccttctacaccatatggcgttcctattcctcaccagccacagcacatggtccctcctggtgcccctgccatgcatatgaactacttcccgcctttcagtatgccagtgatgaatccaggaacaccagcatctgcagtggagcaagggagccatgctgctgcgccacagcctcatgggcacatggaccagcagtcgctgatctcatgtaacatgtcacacccgagtggcgtttggaggtttcttgcatcaagggacagcgagccacaggccagcagcgccaccagccctttcgacaggctccaagtccaaggtgatggaagtgctccgttgtcattctttcccacggcttcagctccgaatgtccagcctccgccctcatctggaggccgggaccgggaccagcagaaccatgtaatcagggttgttccgcgtaacgcacagactgcttcagtcccgaaagcccaacctcagccgtcatccggaggccgggaccaaaagaaccatgtaatcagggttgttccgcataacgcgcagactgcttcggagtcagcagcgtggatcttccggtcaatacaaatggagaggaaccaaaatgattcgtagctggttaccatatactttcgtgtcatccgatggcagcttagtgcagcattgcagtttacagggctacccgagctgcagattatggtggctcctgtattctgaccactgattgcgctttacccgatcgtcatagatattggatgatatgatcttgtgttctatgcagagttgtaagccaaagttgtgcccctgaagactgaagtgacagccctgaagttgggagtccttcctgattgtgctatgactggaattggtatatatataggttacttgaacggtttcactgtgttgagctcaccacacggccgcgcttctgtaacatacaatacaatagactatgagtggtacagtaggaagcagcagtcagaaaatgactgctggtaccatgctacggggtcgctatagattgatgtgtaccggtactctggttctggtagtatatgctgctgtataattcagtgtttaattatctatatattgtacattagctgtcaagcctgtaaggcattgtattgtgggcaatgaatttggttgcaaatgttcgtgtactgggaaccatcttttgattgtttgtgtttttgaacattgctttgcgcctttgcttgtggaccgccgtcgaaggctgagcatatatccattatcaccagaccagttcttg

SEQ ID NO: 3631 - DNA, 3553 bp, Zea Mays
cgctcccaatcccatgcgcccctctgctctcacggtttgatttccctttcagttgggccgccatggccgcggtagcagctgtgcgcctgcaccccggcctcccccatcgccggccctgacactgggtaaacgtggtggctgaagctgctgctgaggattcgggatcttcttgctgccgccacgagctgcctgcgtgatattgacacggcgcgctcccctggctcctgggcatgacgaggggaggcggtggacaaggaggcaaggaggagccggggaaggtgatgggtccgctgttcccgcggctccacgtcagcgacgcaggcaagggcggcggcccgcgggctccgccaaggaacaagatggcgctctacgagcagttcaccgtgccgtccaaccgcttcagctcccccgcggcctccgcccgcgccgcgggggccagcctcgtgccctccacggcggctgcccaggtttatggttatgacaggacgctgttccagcccttcgacgtgccttcaaatgagcctcctcgttcatctgaaaagttcaaaggaaacactatcaacgggcagtctaatagtacaagaagagaacctttgaggatgtcctcacagaccaagaacaaggacgtctgtgcttcaaaatcaattgccaagtgcacctcacagcatagagtgggcaacaccatcatgtcttctggaaagaaagtggtcagtgatgatgaatttatggttccttccatctgttatcctagattttatcgacagtctactcaagatcatgcagataaatcaaaaccccaatctactacaaacccacacaaaagtcctgcaatgtccaaatcatctgtagagtgctatagtactgtgaacaagcacttggacaaaatcaatgaagctgataggaggttaatgaactctccaaaggttaaggagaaagaagcagtgcaaggatcaaaagctgtggaagttaaagaaaagagttcatcatttcaggcatcagaaaagttcaaagacaaatatgctaagctatgtcaaatgaggaataaggcaagtaatataaatcattgtgacaacaacggttgccaacctgcaagcgtgaatggaaatttcacagaagcaaagaaccctacagcagctagaaatacatcttcctgtaaaccatgtactgatgtagatagctctaacaggaagtctaatttactggaaagaagcccacgggaagttggtgctaagagaaaaagaggacatcacaatggagagcaaaatgatgatttatctgactcctcagtggaatgcatacctgggggggagatctctccagatgaaattgttgctgctattggtccaaagcatttctggaaagcaagaagagctattcagaagtaagtatatggtgcttgagtagctgttttgtagttttgtaccaagtatttgtagcattctttagacaatactattcatatgtttcactctgcttatttcctttttcttttagttttcagttaattgtcatatggaagacaaaagtatgaagatgataagtctgttgtttggttttcagtacctaactattctgttgtactattaaatataaactgtggataataatgaatgccttcaattttgattcttttaagtagaaaacatggtagtttcatccaaaagaatagtatgttgcttgtaagactgatattgtgaatatttctttcttgctttctggattgctgcataatgcctttttttatgttttacactctgtcctgttaaaatctacagtcagcagagggtttttgctgtccaagtgttcgagctgcataagctgataaaagtgcagaaattaatcgcggcatctccacatctgcttattgaaggtgatcctgtccttggcaatgcattaacaggaaaaaggaacaaacttcctaaaggaaattcgaaagttcagaccctgtcaatcacaaacaaagatgatatccagccaaccctagagcaaccagagttatcaaaacaagacacagaaggaaacttattggcccattctcatgatgatggacttggtgacaaccatcataatcaagctgcaacaaatgaaacctttacaagcaaccctccagctatgcatgttgctcctgacaacaaacagaataactggtgcatgaatccaccgcagaatcaatggcttgtcccagttatgtcgccttctgaaggtcttgtctataagccttttgccggcccttgtcccccagttggaaatctgctgacaccattttacgccaactgtgctccgtcaaggctgccttctacaccatatggcgttcctattcctcaccagccacagcacatggtccctcctggtgcccctgccatgcatatgaactacttcccgcctttcagtatgccagtgatgaatccaggaacaccagcatctgcagtggagcaagggagccatgctgctgcgccacagcctcatgggcacatggaccagcagtcgctgatctcatgtaacatgtcacacccgagtggcgtttggaggtttcttgcatcaagggacagcgagccacaggccagcagcgccaccagccctttcgacaggctccaagtccaaggtgatggaagtgctccgttgtcattctttcccacggcttcagctccgaatgtccagcctccgccctcatctggaggccgggaccgggaccagcagaaccatgtaatcagggttgttccgcgtaacgcacagactgcttcagtcccgaaagcccaacctcagccgtcatccggaggccgggaccaaaagaaccatgtaatcagggttgttccgcataacgcgcagactgcttcggagtcagcagcgtggatcttccggtcaatacaaatggagaggaaccaaaatgattcgtagctggttaccatatactttcgtgtcatccgatggcagcttagtgcagcattgcagtttacagggctacccgagctgcagattatggtggctcctgtattctgaccactgattgcgctttacccgatcgtcatagatattggatgatatgatcttgtgttctatgcagagttgtaagccaaagttgtgcccctgaagactgaagtgacagccctgaagttgggagtccttcctgattgtgctatgactggaattggtatatatataggttacttgaacggtttcactgtgttgagctcaccacacggccgcgcttctgtaacatacaatacaatagactatgagtggtacagtaggaagcagcagtcagaaaatgactgctggtaccatgctacggggtcgctatagattgatgtgtaccggtactctggttctggtagtatatgctgctgtataattcagtgtttaattatctatatattgtacattagctgtcaagcctgtaaggcattgtattgtgggcaatgaatttggttgcaaatgttcgtgtactgggaaccatcttttgattgtttgtgtttttgaacattgctttgcgcctttgcttgtggaccgccgtcgaaggctgagcatatatccattatcaccagaccagttcttg

SEQ ID NO: 3632 - DNA, 1119 bp, Zea Mays
ctaggctcacagctcgcgactcgcaaggaggagcttgcggcagctcggtatgaaaaagggcatctgtcttctttatccatcgtccgtctccttccacccagacacaggccaggcgggcccattgttgcccaagaccctggaatccggagcaggagtcctctctctctctgactctctcctgagggggaggaggaggaggaggaggcagaggcggaagagcaaccaccaagcagcagagcgcgaggcgacacggggacggagccctggaggtctctcgcgagtccagaggcgatcgacggagtcgcgattcgtctcccactagagggtagcctggagtgagcatttcattctggagatacaatgggtggctgctgctgctgctgctgttctgcaagggcatctgattcagatagagcaccggtgcgcatctatatgtggagaagtcaggcattaaaatcaaaactgacgggcagcagtccccaaaagtggacgaatttgagtcgtgcgaaaaaggtgcccctgaggataaggctgatgaggaggaggatgtttgtccaatatgtcttgaagaatacgacaaagaaaatccacgttcggtcaccaagtgcgagcatcatttccatctctgttgcatactcgaatggatggagaggagcgagacatgcccagtctgtgaccagataactctgatagatgggatgtacgaatagcattcttggcggcggttcctgttgagttggcgttctttgtttttgtttttgttgtggtctggtctggacggctgtctggtggaggagatggttgatgagtcttggcaaaaaaataatttatagaagaaaaatgacatgaaattgtgctagagtcgcctgtgtcctgtttttacctgaaaaccctgtgagatttgctccctggtttcctcttgcttggtttgcgtgttcattcttccatttagatttcagtttctcagtgcctgtgtgacagggaaatcatctgtattgtacagttagtctgaaacggtgacagaaaagaagaaaagctgattctaccatatggttggtttgaactttgtccaatcttgctggcctaatggcacaaggtcgtttgccaggtcagaccgct

SEQ ID NO: 3633 - DNA, 1122 bp, Zea Mays
catcctggccatccaaccaatccggtcaacgggagaacatgtacgaggcgatgtcgccgcgccgggcgctcctcgccatcctcctcgccgtcgccctcgcctccgcttcctcggcaccccagcccccgccgtgcagccgctcgtgcgcggccctcaactgcgactccctcgggatccgctacggcaagtactgcggcgtgggctggagcggctgcgacggcgaggagccctgcgacgacctcgacgcctgctgccgcgaccacgaccgctgcgtcgagaggaaaggttacgtttccttcatccccggcctgcgtttgttgtgctcgttaattagggtctgagtgagatgggtggatggatcatgatcaagttcctagcttgcaactcatcggtagcaaaggaatttttcattggatttgatttcgcgttgcaatctgatcactacacttgctcactccgttttttttatttgtcgcgttttagttaaaaaaaataaactagccggtaacaaatattgaagaatagagtcagttttctttatttattttctgcttgtggtgtggttggaatgcagtgccttcaagcaccattaccacaaaattttgcatttaccatccacgaaaaggatgaccacagttattctcccaacctgaacattacatgtaatcagtcagtcactcagcctcagcctgatgggaatagaaatgaaaatagtgatcaacagcggattagcatgaggatatggtatgatgagcgtgaaatgccatgagaaattcaaaaactgcatgaggaaagtgaaaaaggcaggcaaggttggcttctccaagaaatgcccgtacgagatggctatggctacaatgactcaggggatggatatggccatcatccttagccagttgggcacccagaaggtggaactctagcgttagctagctccgcctcagctgcatgttgatttattctcacggaaatatttatatactccactgaagaatagaatttgcttccatatgattactgttgtttcatcgaagtcagagggatgcatagcttatctttcttctgccaaattgaaaaagaaaggaaaagacttcagtttattttctgtagcttgaatagttt

SEQ ID NO: 3634 - DNA, 1654 bp, Zea Mays
gccacactgtccgatctcactggccgctcgatctcatccgtccgctggtaagccataagccaaagaccacaatagatctcgtctccctccgttcccctcctgtccgtcattttctcgtcacctacatatctccggctcgccgtcggcgtcgccgcctcctcctccttcgcccgctggaggcgcccatagcgacctcaccggtgggtttgctgaagtgacatcggccgaggtggaactggttggggggagtccatttcgggttcgagcagcctgagccggcgcgccggcagcgacggaggggcctcgcctccgtccccctctccgatggctggcagcagcagcggccccgccccgggccaggcagccaaggacaagaagatggcgtccgcggaacagctggtcctggaactctgcgaccctgaactgcgcgagaacgctttacttgagctctccaagaaaagggagatttttcaagatcttgctccgctgctttggcactcatttggcacaattgctgcgttactccaggagattatatccatttacccgtcactatcaccccccacactgtcacctggagcatcaaaccgagtttgcaatgctcttgcacttctgcagtgtgttgcatcgcaccctgagaccaggatccttttcctaaatgctcatattccattgtacctgtaccctttcctcaacactaccagcaaaacgagaccttttgagtacctaaggcttactagcttgggggtcattggtgctcttgtcaaggtggcaactttcatcgtccaaaagattcttctagatgatgttgggctgcgctacatttgcgccactgctgagcgtttctttgccgtaggcagtgttttagcaaacatggttgtttcacttgctgatcagccctccacaaggctgctgaagcacatcattcgttgttacctccggctgtcagataaccctagggcttgtgctgcattgcagagctgccttccagacatgctcaaagatgggaccttcaataactgccttagggatgatccagcgacaaggcgctggctccaacagctcctgcacaatgtgactggcggaggcatgggaggtgctcctcaaccaggaatggatcccatgaacatgggaatgtgatgtgcattctagttgttgcaattcactgcaataacacatcacctctcagtgaattacaactagagaagatctggccactgtccagatgaaacttagtatggtgtagcctgactttctgccggggtaaaaataggaatgttgtttggtattgccataagctaagctgtagaaacaagatcggcaggcttctgttattgtgttcttgcaccggagctcttgtgcgttgacccttcagaacctgagaacaaaggaggaaacccccgtcccgtgaagctttgtcgcagtgccgatcgatcaagatcttgaattgcttcagatgatgccataagaaagcatactgaaaagaagtgtatgccgtgtgctatattttacgagtttatgggttgcttttgtctttctagtggcgtcgtgtaacaaagtccgctgttcttaatttgttcaggtaacaattaattaatccagcaatattttttcccaggttaccaataataatataaaaatatattctataaaa

SEQ ID NO: 3635 - DNA, 2054 bp, Zea Mays
tccaagttccactcccaaaccccctcgattcgtccatccctcgcacgcgctggccgcccgccccccatctccacttctcctcgccgctctcctgaatccttcgcccgaaagcctccgaccgcagaaccttagcgttgccgtccacctccatggaatcgaagcctcacgcgccggcgtctgggctggcaacgccgcggttcaggctgggtaaacagtcgtcgctggcgcccgagcgcggcggcgagggcggtggtgcggggtcggcagatgggtcggccgaggcgaacggcgtcatgagcttccagctcatgtacctggcccacgagggcagcgcggaggggatccgcgagctcctcgacggcggcgtcgaccccaatttccgcgactccgacggccgcacggcgctgcacatcgccgcctgcgagggccacgccgaggtcgtcgagctgctgcttcagagcggcgcggaggccgccgtggaggaccagtggggcagcacgcctttggcggatgcaatgcattatcagaatcatgatgtgatcaagatctttgagaagcatggctccaagcataagattgctccgatgcatgtgaacaatgttcgtgaagttcctgaatatgagattgacccggctgagcttgatttcagtaatggcaatgatttatccaagggcacatttagaaaagcaacatggaggggcattccggttgctgttaagaagctggacgatgatctaattgcggacggcagcaaagtgcaggcattcagagacgagcttgatgtgctgcaacttatacgtcatccaaatgttgtgcaatttttgggcgctgtgacacaaagcaatccaatgatgattgtcatggaatttatgcgcaagggtgacttgcgcactcacttgagtaagaaaggagctctgccaccatcatatgctgtgaagttagctcttgatattgcaagaggaatgaattacttgcatgagcataaacctcaggctatcatccatcgtgatcttgaaccttcataacagtaacatattgagggatgacactggacatctgaaggtggcagattttgatctatgtaagatgctaaaatggagaagaaaagttagagaagataaagcagtcacttctccaggcaatgcttgtaaatatgtggctccagaagtcctgcgaaatgaagagtatgataccaaagtggatgtcttctcattcgctctgatacttcaggagatgattgaaggatgccttccttattatgataagaaaaatgatgaaattgagaaggcacataattctaaagaaaggcctccttttcgagctcctccaaagcattatgcccatgggttaagagagttgattgaacagtgctggagcgaaaattctgcagacaggcctgattttagagtaattatcaaccggctgtctgctatccaaaatgagatagctcacagaaaccgttggaaggcgagacctctcaagtgtttcctgagcattgaaggaatgtggaagaaagatcgcaatgagggcagcaccacccgttcatcacgctcatcgcgatcctatttttaaccaccagcacaagctattgatttcaatcgcaagatcatattggtgattgctagaaaatatactcaaatgtatatcatattttcgttttctaaaactatgaaaaaagatggttctgcaactggttgattctcagctgatcatagttttgattgtatatcaggcatgccccttggccccaacccctgctttggcattcccctgggttgggacaatatggataatgccaacttaattatatttatataataatgtgttttgatgtaaatgagatatgttatatatcgtagctattcatacatgttgtattttttcgaaagtaaatattaaatggcttaagttatatgaaatgttcataactaaaaggtgactaatctaactttgatttctaataaatataacttaaaataatacctactaagatgcttctctaaaacatattgtgtatttgttttactaaactataaaaaatacacaacatagaa

SEQ ID NO: 3636 - DNA, 3401 bp, Zea Mays
cacatacacacactcgtcccttccctccccctccatctccattctccaatctccccttcgacgctctcccctcgcttctcgcgcacactaaccaatccgagcgcccgacgctgccccccgatcgaatccaccggagccgcccacctagggctcgcccgcgccattgtcgaaccaggagggttcgtccgcccgcgcctgctgccccgcactcccgcgccgtggcggtggcgttggcggtatgtatgatcgctagagggagaggaggaggtggcagcaccggtggggattagggtggcggcagtgctggtgccgggaggaggaggaggaggaggaggaggaggaggcgtagcccatgaaggcgacggcgccgccggcaaagcggcggaggggcccgcggctggcggtgctggcgctcgtgttctgttcgctgctcgtgccgatcgccttcctcttcaaccgcttccccgccgtgtatgtgacggatgagcgccctcagcaggagattgacttgccttcattcgatcgcgtggcatttgaaagtggtggatctgtaaatgaagatgtgttcaagaagacttctgggagcagtagtgtgtcgcaccatgttctcccgcctccaaaaattgaactagtcctcccccctccaaaagttgaacccaaaccagaagtgaagccagtaccagtatcagttccagttcatcataacaaaaaatataaaaacgaaggtcgagaggatggaccaatcaatagcaagagccaaatcatgcactgtggattgcaacaatgttgacagaaagcttcgtcaaattcttcatatgacagaggatgaagctcattttcatatgaagcagagcgcatacctgtacaaccttggtgttcacaccatgcctaaaagtcatcattgtcttaatatgagattgacagtagagtacttcaaatccatgccattggatccaaatgactcttctgcccatacgtttaacattccagacaataggcactatgttatattgtctaaaaatgtccttgctgcttctgttgtcatcaactcaactgttagtagctctgaggatactgaaaatatagtctttcatgtactaactgatgctcaaaatttttatgccatgaagcactggtttgcaagaaactcctacagggaatcagctgtgaatgtcataaattatgaacaaattattttcgagaatttccctgagtttggaacccagcagttatatttgcctgaggaatttcgtgttttcatcagtagccttgagcggcctactgagaagagtagaatggagtatttatcagtgttcagtcactcacatttctttcttgccgaaatattcaaagatttaaagaaggtaattgtgttggatgatgatttggtcgttcaacatgatctctctttcttgtggaatcttgatatgggagataaggtccatggtgctgtcagattttgtggtttgaaacttggccaactgaggaaccttctgggtaggacaatgtacgatcaacagtcatgtgcatggatgtcgggggttaatgtgattgatttggaaaaatggagagatcataatgttacagagaattacctgcaactcctgagaaagtttgggaacaatggtgatgaggcctcattgcgatcttcagctttgcctataagtttgttgttgttccagcatcttctttatccccttgatgagagattgactttatctggacttggatatgactatggaattaaagaaaaacttgttcagagttctgcatcattgcattacaatggaaatatgaaaccttggcttgagttgggcataccagattataggaagtactggaagaggtttcttacacgagacgagagattcatggatgagtgcaatgtaagtccatagtgcacttgagcttgagagccggatcatttttgacagtagatttcagtctacactgctgtaatatatactaagaggaccaacacttccattgagaaaagacttgggaagcagtcactagccatcaattttgacagagtagatccagcgccatctgttgagtgaacttgtgagctcgatggatggttttttctgcagttagaggactttagtgttaagtttgaaggataatgcagtagacaacgttggtggtgtgtggtggtgaggctccacgtaagagggagcatcacactacgtaacaggaatgatctttggtggattggggcgtcttaattcaaattggtgccttccatctcatcgattcaggttaattcttttctttgttgattgatttgttgacccctcttgctttgtccttctgtcaataaggacatacacaggttaaaattcaatttctttgctcgtagttgttgcacattgattgttctatcattattatgttgatgcaaagtatattatgatgtcagactcatctgttacaaaaatgagattaacaactgttctatttggatgtcttctgagcactcaaactttatctcatgatccagtaaatttgaatctccatatatggtcgtgactgggtttaactgccgacataggtttcctctgtgtgctccactgtggcctagaaagaattaaaaagtgcagtgcggttcatagcaatacatatacttgacattgcagaagtaaaaacgtgttccgggcacttggtgaatggagaaccttgtcactgtaaattggttcttaaaccttgttgcgatgtaataatcatgtaaacactgtaaaacatgcgaattttccaaggcagcaataagcttcagagttgaagaaaccgttaacctggatgaacatgcgaggacgcttcttatctttgagtaaaaggtggcttagggtttgtttggatgacgtgtggattttgaaaaagtgaaaaaaccgttgtaaggtatagaccatgagaattcaaataattctacgtctcctttgatgacttcacaaagaatcagatctctttcgatccttttctcaagcgatcaccaagatcgagcttcagttctcttatcaaatcaaatggtgagtgcaatctctcccacaaggtactccacaaaaagtcggaagctcttgtttgctttacaatttggagcagcaactctatacaagaatgatagtaaatcttctctcttttctcggagtcaaaactcaacacaagtgttctagccactcttttgctaccttaggctcttgcaagatgctatgctaagcacacgatggttttgtaagcacttaagatggtttggatgctatggagatgatcctctaacttgtatatgatgtttgtttgttaatggattgagttgtttttggttggaggggtatatataggttgtccatctcaaaatagctgttggaaccccactttagcttctgcgtacccattagacatgtcca

SEQ ID NO: 3637 - DNA, 3425 bp, Zea Mays
tgattccttcacacacccgcacacatacacacactcgtcccttccctccccctccatctccattctccaatctccccttcgacgctctcccctcgcttctcgcgcacactaaccaatccgagcgcccgacgctgccccccgatcgaatccaccggagccgcccacctagggctcgcccgcgccattgtcgaaccaggagggttcgtccgcccgcgcctgctgccccgcactcccgcgccgtggcggtggcgttggcggtatgtatgatcgctagagggagaggaggaggtggcagcaccggtggggattagggtggcggcagtgctggtgccgggaggaggaggaggaggaggaggaggaggaggcgtagcccatgaaggcgacggcgccgccggcaaagcggcggaggggcccgcggctggcggtgctggcgctcgtgttctgttcgctgctcgtgccgatcgccttcctcttcaaccgcttccccgccgtgtatgtgacggatgagcgccctcagcaggagattgacttgccttcattcgatcgcgtggcatttgaaagtggtggatctgtaaatgaagatgtgttcaagaagacttctgggagcagtagtgtgtcgcaccatgttctcccgcctccaaaaattgaactagtcctcccccctccaaaagttgaacccaaaccagaagtgaagccagtaccagtatcagttccagttcatcataacaaaaaaattaacgttgacaagattaggcctcctagagttcaaagtgctgatgaggtggaaaaggctaaggcttgtcaacttgagtttgggagttactgtctctggtccatagagcacaaagaagttatgatagataccattgtgaaaaggctgaaagatcagctgtttgtagcccgatcttactacccaagcattgcgaaacttaaaggaaaggagacattgactcgtgaactgaagcaaaatattcaagagcacgagagggtccttagtgaatccatcgttgatgctgatctaccatcctttataaaaacgaaggtcgagaggatggaccaatcaatagcaagagccaaatcatgcactgtggattgcaacaatgttgacagaaagcttcgtcaaattcttcatatgacagaggatgaagctcattttcatatgaagcagagcgcatacctgtacaaccttggtgttcacaccatgcctaaaagtcatcattgtcttaatatgagattgacagtagagtacttcaaatccatgccattggatccaaatgactcttctgcccatacgtttaacattccagacaataggcactatgttatattgtctaaaaatgtccttgctgcttctgttgtcatcaactcaactgttagtagctctgaggatactgaaaatatagtctttcatgtactaactgatgctcaaaatttttatgccatgaagcactggtttgcaagaaactcctacagggaatcagctgtgaatgtcataaattatgaacaaattattttcgagaatttccctgagtttggaacccagcagttatatttgcctgaggaatttcgtgttttcatcagtagccttgagcggcctactgagaagagtagaatggagtatttatcagtgttcagtcactcacatttctttcttgccgaaatattcaaagatttaaagaaggtaattgtgttggatgatgatttggtcgttcaacatgatctctctttcttgtggaatcttgatatgggagataaggtccatggtgctgtcagattttgtggtttgaaacttggccaactgaggaaccttctgggtaggacaatgtacgatcaacagtcatgtgcatggatgtcgggggttaatgtgattgatttggaaaaatggagagatcataatgttacagagaattacctgcaactcctgagaaagtttgggaacaatggtgatgaggcctcattgcgatcttcagctttgcctataagtttgttgttgttccagcatcttctttatccccttgatgagagattgactttatctggacttggatatgactatggaattaaagaaaaacttgttcagagttctgcatcattgcattacaatggaaatatgaaaccttggcttgagttgggcataccagattataggaagtactggaagaggtttcttacacgagacgagagattcatggatgagtgcaatgtaagtccatagtgcacttgagcttgagagccggatcatttttgacagtagatttcagtctacactgctgtaatatatactaagaggaccaacacttccattgagaaaagacttgggaagcagtcactagccatcaattttgacagagtagatccagcgccatctgttgagtgaacttgtgagctcgatggatggttttttctgcagttagaggactttagtgttaagtttgaaggataatgcagtagacaacgttggtggtgtgtggtggtgaggctccacgtaagagggagcatcacactacgtaacaggaatgatctttggtggattggggcgtcttaattcaaattggtgccttccatctcatcgattcaggtttcctctgtgtgctccactgtggcctagaaagaattaaaaagtgcagtgcggttcatagcaatacatatacttgacattgcagaagtaaaaacgtgttccgggcacttggtgaatggagaaccttgtcactgtaaattggttcttaaaccttgttgcgatgtaataatcatgtaaacactgtaaaacatgcgaattttccaaggcagcaataagcttcagagttgaagaaaccgttaacctggatgaacatgcgaggacgcttcttatctttgagtaaaaggtggcttagggtttgtttggatgacgtgtggattttgaaaaagtgaaaaaaccgttgtaaggtatagaccatgagaattcaaataattctacgtctcctttgatgacttcacaaagaatcagatctctttcgatccttttctcaagcgatcaccaagatcgagcttcagttctcttatcaaatcaaatggtgagtgcaatctctcccacaaggtactccacaaaaagtcggaagctcttgtttgctttacaatttggagcagcaactctatacaagaatgatagtaaatcttctctcttttctcggagtcaaaactcaacacaagtgttctagccactcttttgctaccttaggctcttgcaagatgctatgctaagcacacgatggttttgtaagcacttaagatggtttggatgctatggagatgatcctctaacttgtatatgatgtttgtttgttaatggattgagttgtttttggttggaggggtatatataggttgtccatctcaaaatagctgttggaaccccactttagcttctgcgtacccattagacatgtcca

SEQ ID NO: 3638 - DNA, 1604 bp, Zea Mays
cgtctcctctcttcttctccccttccacccaaagccttgacctcacgtctgagagcaaaccagacgaaacaaaccctcctgggctgcttccccttttcgatccccatggcgcaggacgacatcccggagtcctccgcctccggatcccccacctcctccaccccggcggctcgcctcaacgccgccgcgcccgagtttaccccccgatccgccgcccagcaccacggcaacaacgcccatcgccgcggcccgcaccaccaccatcagccgcaccaccacccccactaccaccctcaccagcactaccagccgcggcaccagcaccatcaggcccaggccgaggatgaggggagcgccgccgcgacggcggaggatagggagggccccgctggtgcggtgcagccgcagcaccggctgcccgaacccgaggcccgcaagctcgtcaagcaggttgaattttacttcagcgatatcaatttggccacaactgaacatctgatgaagttcatcgctaaggatccagatggatttggttgtttcagaggatgggaaacatgttaaacgcttacagcccttcaatgccgaagaagttcagtctcgtattgttgttgctgaaaatttacctgaggatcaaaagcatcagactctgatgaagattttctcagctgttgggaatgtgaaatctatacgtacctgttatccacaagatatttctccagcagcagctaacagaacatcaaggattgagatgatttttgctaataagcttcattcttttgtggagtattcaactgttgaagatgctgaaaaagcagttgctgaattcggtggtgggggaaactggagagaggggattagagttcgttcactgcttggatgtctgaaacatgggttaggtcaaggaagaaaaggtggggatgaggagtatgctgcagatgaagatggccctgacacaactgatcatccacgagactttggaacagatgttactgcccaaatctcagaagcacatttcgatcaccaggccgaagatggcacccatgacaagggtggaatgaggcagcaggggagagggagaggccgtggaggtagaggcagaggccgtggtcagcattatggccacaacagccgagatggccaccatccaattggcactcccccgtcagagcatccagctgtgccgaagccgcccccgggcccccgcatgccggatggcacaaaagggttcaccatgggccgagggaagccgctcagcattaccattgatgctgcggctaaccctaccaccacggatgctgcttagccgcagcgtctatgctggtaccggcctattgccctgatcatcagtcttttgcaaaccgattgcagtggtcatttactcatgttctaaaccgtttactgtggcgtgttggttcattttgtctgggatttaaaaggaaaggagatggctggtactatgatacatgagtgtatactaacacccgaagtttagacatgtggacatgtactgtgatatgtagctcttaaattagaaaaatgcatacttttgatgagaaagaggggtggttttatgatctgtctccaagggcttgtttgaatgcttg

SEQ ID NO: 3639 - DNA, 1926 bp, Zea Mays
atcctgttctcgaagccgtctgaccttgcccctaccccgctcattatcgttgcgacgttggcccgtccgacatgtccgatctcgctcgtcgtgacaacgcgacccatcctcgacggccagtgagcccatgcactcaaccaatgagatgatattggaaaaaaggaacctatcttgtgagattcagattcctgttgcatgttctgctgtcgatgccctcaaattactggatcacattattgaagctgctagagtagtgtacatggacgagctagaactttattttgcaggagatgatgtcggtccattctctgcgaggaatgaacttgaatctctaaatcttttgttgaaaacaatgaaaaaattgcttctaacttccaacacggctgccaaggaagtactgcagatactacatgatgagatagttgttaagctcaaatctgttggaaagtctgacaatgcttggatggttgttcaaacacagaaccatgatgctgaggattctcttctgaaatggggggagcatcttggtattaaatctagattgcagatagcctattttcagggagctggaagaggaatgatagcttctgaaagtataggtgtgggggatattgctcttgaaattccagagtccctcattatatctgatgaacttctttgtcaatctgaagtgtttctttcattaaaagattttaataacatcacatctgagactatgttattattgtggagcatgagagagcggtataatctaggttcaaagtttaaaccatattttgatacgctcccggcaaattttaatacaggtttgagttttggaatcgatgcacttgctgcattagaaggaacccttctttttgatgagataatacaggctaggcagcacttgcgccagcagtatgatgaattatttcccttgctatgcacaaatttccctgagatattccggaaggatgtgtgcacatgggacgattttctgtgggcatgtgaactatggtattcgaacagtatgatgattgttctaagcagtgggaaattatcgacttgcctggttcctgtcgctggacttctgaaccactcggtctgtagttctgcccccctggaagttttcttttattagtcttcaggggagcaatgctttctcagttatgggaaacatccagggtcgcatcttcttacgttctatggattcctaccaagaggagacaacccttatgatgttatacctttagatcttgacacatccgcggatgacgaggacatcacagctcagtcttcggcgactacaagccaaacaactcatatggttcgtgggacatggctgtcgacatccggaggattccccacatgaaggaaagcgacaaggtggtgctggagacaatcctgtccatattcagtcccatgcttgaagcgttgttgcctgagcaagatgatcccaaccgggagagcgccagttgggatgtgaagcttgcatcggactacaaagacctgcagaggaagatagtatcgtccatcgtcacttcctgtacctcagccttggaaaatctgtagctcttgctggatggaagtgcttcactgatgaattgcaagagcacacgccctgggggccctgttggaatgcctctgctggcgtgtagatggccaagctattgcagcaactgcaatctgtgaccatctctacaaaccgaagctgctcgtcgtgagttgcttcatccgaggaatgcggagacacggggtcgtgctcccgaggctggcttgtgtgattttatccgcacctgattgttaccgcatactgtagttgcgtttggtgaaagaaagctacttttgagctagttcattgggagccaaacttgctttttggtgaacgaaagctactttggaactaatttcgtcgcaatgtggttgtggtccatgtgctcctgaaat

SEQ ID NO: 3640 - DNA, 2039 bp, Zea Mays
atcctgttctcgaagccgtctgaccttgcccctaccccgctcattatcgttgcgacgttggcccgtccgacatgtccgatctcgctcgtcgtgacaacgcgacccatcctcgacggccagtgagcccatgcactcaaccaatgagatgatattggaaaaaaggaacctatcttgtgagattcagattcctgttgcatgttctgctgtcgatgccctcaaattactggatcacattattgaagctgctagagtagtgtacatggacgagctagaactttattttgcaggagatgatgtcggtccattctctgcgaggaatgaacttgaatctctaaatcttttgttgaaaacaatgaaaaaattgcttctaacttccaacacggctgccaaggaagtactgcagatactacatgatgagatagttgttaagctcaaatctgttggaaagtctgacaatgcttggatggttgttcaaacacagaaccatgatgctgaggattctcttctgaaatggggggagcatcttggtattaaatctagattgcagatagcctggagctggaagaggaatgatagcttctgaaagtataggtgtgggggatattgctcttgaaattccagagtccctcattatatctgatgaacttctttgtcaatctgaagtgtttctttcattaaaagattttaataacatcacatctgagactatgttattattgtggagcatgagagagcggtataatctaggttcaaagtttaaaccatattttgatacgctcccggcaaattttaatacaggtttgagttttggaatcgatgcacttgctgcattagaaggaacccttctttttgatgagataatacaggctaggcagcacttgcgccagcagtatgatgaattatttcccttgctatgcacaaatttccctgagatattccggaaggatgtgtgcacatgggacgattttctgtgggcatgtgaactatggtattcgaacagtatgatgattgttctaagcagtgggaaattatcgacttgcctggttcctgtcgctggacttctgaaccactcggtatcccctcatatcttgaactatggtcgagtagatgaagctacaaaatcgttgaagtttcccttgtctcgaccctgtgatgcaggggagcaatgctttctcagttatgggaaacatccagggtcgcatcttcttacgttctatggattcctaccaagaggagacaacccttatgatgttatacctttagatcttgacacatccgcggatgacgaggacatcacagctcagtcttcggcgactacaagccaaacaactcatatggttcgtgggacatggctgtcgacatccggaggattccccacgtatggcctgccccagcccttgctgacctatctccgtgctgctctaggctgtgaggtagacgaacccgctgcagaggctgatatgaaggaaagcgacaaggtggtgctggagacaatcctgtccatattcagtcccatgcttgaagcgttgttgcctgagcaagatgatcccaaccgggagagcgccagttgggatgtgaagcttgcatcggactacaaagacctgcagaggaagatagtatcgtccatcgtcacttcctgtacctcagccttggaaaatctgtagctcttgctggatggaagtgcttcactgatgaattgcaagagcacacgccctgggggccctgttggaatgcctctgctggcgtgtagatggccaagctattgcagcaactgcaatctgtgaccatctctacaaaccgaagctgctcgtcgtgagttgcttcatccgaggaatgcggagacacggggtcgtgctcccgaggctggcttgtgtgattttatccgcacctgattgttaccgcatactgtagttgcgtttggtgaaagaaagctacttttgagctagttcattgggagccaaacttgctttttggtgaacgaaagctactttggaactaatttcgtcgcaatgtggttgtggtccatgtgctcctgaaat

SEQ ID NO: 3641 - DNA, 391 bp, Zea Mays
ggcgggagagggggagcaggactcaccaagtcactaggttcctgcagattgatgagggcggcgtgcagactgcagaggaggggcggcgtgagaggaggggcggccggcggcgtgaggactgagggacgaccgtgggttcgggaggaagatttggctaaagcattgaagctccactcgaaacagctgcgtcgcattctccgtttctttgaagaggagaaactagtcacgagggatcatcgaaaggagtcagcaaaaaacgcaaaagcacataatgctgcagctgctaatgatggtcaaccaattgctaaggagggagaagagaaagtaaagctgcacacacattcatactgttgcttggattatgctcagtagtgccaaagccacatctcat

SEQ ID NO: 3642 - DNA, 715 bp, Zea Mays
ggcgggagagggggagcaggactcaccaagtcactaggttcctgcagattgatgagggcggcgtgcagactgcagaggaggggcggcgtgagaggaggggcggccggcggcgtgaggactgagggacgaccgtgggttcgggaggaagatttggctaaagcattgaagctccactcgaaacagctgcgtcgcattctccgtttctttgaagaggagaaactagtcacgagggatcatcgaaaggagtcagcaaaaaacgcaaaagcacataatgctgcagctgctaatgatggtcaaccaattgctaaggagggagaagagaaagtaaagctgcacacacattcatactgttgcttggattatgctcagatctgtgatgttgtaaggtaccggattcaccgcatgaagaaaaaattgaaggatgaattggacagcagaaatacaattcaacactatatatgtcctagctgcaataaaagatactcagccttcgatgcactacaactggtaagctacacggatgagtacttccattgtgaaacttgcaatggtgaactggttgcagagagtgacaagcttgcttctgaggaaatgggagatggcgatgacaatgttagaaagcgcaggcgtgagaaattaaaggacatgcagcaaagaatagaaattatacatagtctgtttgcccagagtcaagaaaaaaattgactgataccag

SEQ ID NO: 3643 - DNA, 1028 bp, Zea Mays
tgcgagggcgggagagggggagcaggactcaccaagtcactaggttcctgcagattgatgagggcggcgtgcagactgcagaggaggggcggcgtgagaggaggggcggccggcggcgtgaggactgagggacgaccgtgggttcgggaggaagatttggctaaagcattgaagctccactcgaaacagctgcgtcgcattctccgtttctttgaagaggagaaactagtcacgagggatcatcgaaaggagtcagcaaaaaacgcaaaagcacataatgctgcagctgctaatgatggtcaaccaattgctaaggagggagaagagaaagtaaagctgcacacacattcatactgttgcttggattatgctcagatctgtgatgttgtaaggtaccggattcaccgcatgaagaaaaaattgaaggatgaattggacagcagaaatacaattcaacactatatatgtcctagctgcaataaaagatactcagccttcgatgcactacaactggtaagctacacggatgagtacttccattgtgaaacttgcaatggtgaactggttgcagagagtgacaagcttgcttctgaggaaatgggagatggcgatgacaatgttagaaagcgcaggcgtgagaaattaaaggacatgcagcaaagaatagaagagcaattgaagccattggttgcacaacttgatagagtgaagaatattcctgcaccagagtttgggagtctacaaacatgggaaagagcaaatattggtgcttttgcaattggtgaccctgctgcagctgattcttctaggaattcacaagggcagtatggtacaccaatgccatacattggagagacaaaggttgaagttgatctgttgagtgatggtgtgaaagaaggtgctgaatcaggaacaaagaggagagataattgcgccacaaaaacttgagaaatctgatgccggagatgacaagaagcatgacttgaaagatgatgattgttttcgctcagctcaggaatgaacacata

SEQ ID NO: 3644 - DNA, 1549 bp, Zea Mays
gagaatccaaatccaaacctcaccggccgcgacgcggcccgcagccacggccttccgtaatgtcataactccccttctcgagtccatctccaacctcatccctcccaccccaataatacatccagccggcgccatcaggcccggcaacgcgcaagcggggctgaccatcgaaccctagtccccggccgagccgccctccgccgagccttgcggccgctctgcgtcatccctcttagtctccctccgttcgacacggcttggatccgagatggaatcaccgcccctcacagctgaagcaattgcttatacagagaaaaagatggacatggctttggaggatataattaaaatgtcaaagaaaaagaatcctggaggcaagaaacccccgaggcagccgataaaaaagcatccattccagaatggcaactctaataaagggaatggcaaggttcaaagttttatggagtctagatcaaccattagacaaggtgttcttgcacagagaaggtcaaatcttggtggaaatcagttccctgctacaaagcaggctgcgaagaaggctgctgttatgccaatgcacaagggggctatccgttggaacaagccaagtgcaagtaccttagtgcagaggaggcctgtaggtggtgcttttcagaatgccaaggtatggagtatggactttgtcaaatcttgaccttaatgctgagtaaataggacaaactggccgaaaaggtcaaggagtccaaccaggcagcaccaaggacgatggatgcactctttgcacagatgaaggcgcaacgcttgaggacggtacctcaacagcaggcaaattcttccccctggagtcatttcaaccagcatcgacgtgttcagcagcagcagaggcgaggcagagggtatggtggccgtaatgttggcaaccaatgaatccaactagacatatctactgcatcggagccctttctcttcactggtcttttggaccttggaagaaaggacgccccttggaaaatcaaacttggctttgtttattggaggggtgacaatgggctctaacttggctttgtttattggaggggtgacatcgggctctaaattttacactaagatttaaggatctgattaagatcaggccctatttctattcatttttaaactaaaatttatttagtgtcctactattttgtgaagcgtttggatcgtgatccattaccacctcacctttggacgtggacaggatatgaagcgaagtttgtttgagttttctagttgtgtgcagtctgcttccgtttcagcatgtataatgacatggaaattatttggtcagagattatgatgtcttgtttcttggcttgattagcttcatccccaactaagagtaattcaccttacctagggatgacaacaggtcaggtttagatagggtagaataaatatccgtccgctataatatttgcgaagattatttatatctgtctatgactatactcgcggataacttgtaccggtatccgtagctattcgtttgattggttatctgtactatttc

SEQ ID NO: 3645 - DNA, 2632 bp, Zea Mays
ccggccgcgacgcggcccgcagccacggccttccgtaatgtcataactccccttctcgagtccatctccaacctcatccctcccaccccaataatacatccagccggcgccatcaggcccggcaacgcgcaagcggggctgaccatcgaaccctagtccccggccgagccgccctccgccgagccttgcggccgctctgcgtcatccctcttagtctccctccgttcgacacggcttggatccgagatggaatcaccgcccctcacagctgaagcaattgcttatacagagaaaaagatggacatggctttggaggatataattaaaatgtcaaagaaaaagaatcctggaggcaagaaacccccgaggcagccgataaaaaagcatccattccagaatggcaactctaataaagggaatggcaaggttcaaagttttatggagtctagatcaaccattagacaaggtgttcttgcacagagaaggtcaaatcttggtggaaatcagttccctgctacaaagcaggctgcgaagaaggctgctgttatgccaatgcacaagggggctatccgttggaacaagccaaggtaaacaatgatgttcttttattgcttatgagaaagtttactgcattcaaggggttgttcaatttattgagtcatgcaccttggattatattggctgagaatgattgtgatgctggtgtttacatggaactgccttaacttctctggttatacacacacaagcttataaagaacaatcgatttcatattcttgtggcacaaggcctgttttcttggttgaactgctacaaatatatggtgaatatagcatatgagccttgaagcttcattgaaagttatggccttctcctttatctgctgttgcctgacatttttctatgcagtttcatggtgtaatttatagctgctggatgagtgttattttggacaccagcattaactgtctgtgagggtttcattagtgttatttgtcaactattgttggaaggactgaaggagatgtgataatggttagcgtctcatgccactggtgacggatcatccatatacagggacgttacatgcctgagtttgaattggttttgactactggctccttggcagtgttcagtgtttatttgttgaatgatgaatgcagtgtaaatctagggtagtgctgctaattggacaattgttgtatgcctccaagggagtatattttgctactgcctcatattcaagttggctgtatccgtaacatcatgccagttttgagcatcctatcataatctgctatatgctccccttgttcactgcgtcccacagagataatgcttgcctgcatttctactggataagagtaaatcatggtatcttacgatttatctcagtatgctgggctgtatggatgctatcttttcaaggtcaactgttgggatttattttcatgattccttatgtgaccttgtttgttctggatcagtggtcactatttacatggcttgagttttatcagtttaatcaatcaataagttgtgtcaacttgggacattgttgaaccatgtgcattgaaatttgggtggaactaaacagtctagactccaaaatgtgagggccttggaaaccaagaggatgcactagatattttcaatgaacactttattgtttctgtttcattttatttcaaaacatggtatgtactccctgacttcacttgagaagcgagaattgtatccttgttttgatgggggtatgtgcaagtaccttagtgcagaggaggcctgtaggtggtgcttttcagaatgccaaggtcaaggagtccaaccaggcagcaccaaggacgatggatgcactctttgcacagatgaaggcgcaacgcttgaggacggtacctcaacagcaggcaaattcttccccctggagtcatttcaaccagcatcgacgtgttcagcagcagcagaggcgaggcagagggtatggtggccgtaatgttggcaaccaatgaatccaactagacatatctactgcatcggagccctttctcttcactggtcttttggaccttggaagaaaggacgccccttggaaaatcaaacttggctttgtttattggaggggtgacaatgggctctaacttggctttgtttattggaggggtgacatcgggctctaaattttacactaagatttaaggatctgattaagatcaggccctatttctattcatttttaaactaaaatttatttagtgtcctactattttgtgaagcgtttggatcgtgatccattaccacctcacctttggacgtggacaggatatgaagcgaagtttgtttgagttttctagttgtgtgcagtctgcttccgtttcagcatgtataatgacatggaaattatttggtcagagattatgatgtcttgtttcttggcttgattagcttcatccccaactaagagtaattcaccttacctagggatgacaacaggtcaggtttagatagggtagaataaatatccgtccgctataatatttgcgaagattatttatatctgtctatgactatactcgcggataacttgtaccggtatccgtagctattcgtttgattggttatctgtactatttc

SEQ ID NO: 3646 - DNA, 2036 bp, Zea Mays
acaacctgctccattcttggcgagcgttcaggcgaaagaggaaaaagagaggagtgcaccgcgagtgtacagctcgaagatccacttccaagtgcttccttttagatggaaattactccaatatcacaactacgtccaggaaagttaaattatgctttacatgtgcgaatatctagaatgtgggagtttagaggcacaaatgaacagaacgacatcaaacaccttgaccttgttctcatcgatcaaaagggaaattcaatatatgcagagattccaccagatgcaattgctgtcttaaaaagccacatctacacgaaaaaaagattgtatacatatccaaaataacaattgaacgagctaaactgggattcagagttgttgacaatccttatatggtaaagctcaacaagagaaccattgtgcttgaagataaggatcaaattcaaggttttcctaaatatacattctcactaacacccttagataagttggaccaatacaaaaacaagaccgatcgttttatagatgtcattgctaagatcagtggagtatcaaatgtagcaaaggttcctacaacctcaggagatcagcaaatgaggagagttgtattattagaagaccttaagggaaacatgattgagctatcactatcaggaaaaagagctttggaatttgacggagatcaagttttagatgtgggtcagcaacatcatgttattgcaatatttgtaggaaccttagtcaaactttacaaaggtgaatatacattcttgagtggaacatcagcatgccggtggtacatcaacgaaaatgacattgctgaaatcaaggctttccagaaaagtttgccaagtgaacctgtacctatcaaaaagacctatctccaaaatgatgatgcaactcacaaatttgaggagaaaagtctggaacagctcaagcatgtagaccctttccttgacatgggacaaagatatcagtgcacagctactataattggtatcacagaaaaccaaacatggtgttacaaagcatgcaagatctgtaactcagcaatcattcaaaaggaaaatggttataaatgcacaaaggaaggatgtccatctacacaatttgaatggaagtacaagataccattcattgcaagtgaccacacctataatctagagtttatgttctttgaaaaaaagggaatggagcttataggaaagagtgcatcgactcttcgaaaacaatatgaaccaaaggagataccaccggatataacatcttggataggttataaattcacttttgttgttagagtcctatcaaagaaaagtgtcaagactattgatccatcctttgaagtgcttatgataaaagaaaaataccagaaggaacctattatatcatttatcagctcaagtggagttgtaccagcagaatcatcttcctctacaatggcagaatacaaggaattaccattgctagtgccaattacctccaaagacatagaaaaaaaggagcgatccacttcacaaccagaacacaccgaagaaactcaagatatggacattgaaccatctggcatttgggaagaatctcagatttcaaacaaaagaagctttggagacccaaactatgacaaacaagaaacaactgatgacaaagatgaccttccacaattcaagaaaatcaggagtacccactctcaaggaaaaagcaaaaaatgatgcatgatagactaagaagacaaagtaaagtagtagactttaaaagatcttgactaaagtaatatatctatattttctgtttcgataaacaacgatagcgctagtgctacatcttttaatgtatataaccatgtagtatcaatagcgctacatcttaagcgtgtagcaccagcagcgctacatattttgatgtatataagcatgtagcatcaatagcgctacatcttttgttaaatataagcacatcttttgatatatataagcatgtagcatcaatagtgctagctatggtgctaatcttacattatatggcgtatatgttag

SEQ ID NO: 3647 - DNA, 2261 bp, Zea Mays
taaaaatataaaggagccgcttctctacagccggatgtatttgcttctcccgtacacaacctgctccattcttggcgagcgttcaggcgaaagaggaaaaagagaggagtgcaccgcgagtgtacagctcgaagatccacttccaagtgcttccttttaggataatcttatataccttcaagcaaatagacaatcggaggaacttcacaaaggggaaacatgattgagctatcactatcaggaaaaagagctttggaatttgacggagatcaagttttagatgtgggtcagcaacatcatgttattgcaatatttgtaggaaccttagtcaaactttacaaaggtgaatatacattcttgagtggaacatcagcatgccggtggtacatcaacgaaaatgacattgctgaaatcaaggctttccagaaaaggtgacatacaaacaaaaaactataatcccttttattttaccacaaatagtactaaaatttataaaatgttaatagtttgccaagtgaacctgtacctatcaaaaagacctatctccaaaatgatgatgcaactcacaaatttgaggagaaaagtctggaacagctcaagcatgtagaccctttccttgacatgggacaaagatatcagtgcacagctactataattggtatcacagaaaaccaaacatggtgttacaaagcatgcaagatctgtaactcagcaatcattcaaaaggaaaatggttataaatgcacaaaggaaggatgtccatctacacaatttgaatggaagtacaagataccattcattgcaagtgaccacacctataatctagagtttatgttctttgaaaaaaagggaatggagcttataggaaagagtgcatcgactcttcgaaaacaatatgaaccaaaggagataccaccggatataacatcttggataggttataaattcacttttgttgttagagtcctatcaaagaaaagtgtcaagactattgatccatcctttgaagtgcttatgataaaagaaaaataccagaaggaacctattatatcatttatcagctcaagtggagttgtaccagcagaatcatcttcctctacaatggcagaatacaaggaattaccattgctagtgccaattacctccaaagacatagaaaaaaaggagcgatccacttcacaaccagaacacaccgaagaaactcaagatatggacattgaaccatctgggtatgattaagataagcttcgttcttaccttctatattaaatcttaatatctttcctataataccatttcatatttattttccatgatgaactatatatatgtgtctacatacaagaaaagattatacttatttgtttgatctgcaattaaaaaaaatatctagtccattcaaatactgcatattagttcaacgttttttataaacaacttcaataccttatgtcataaattcccaatgaaaccatagtttagagaccatgagctatgtagcacaatttccagaaaatctaaacacttaaatcttcatttaaagtgacatggcagttcattatgtattgtttgccattctatctatttacttttccatgtgggcacaaagtcaagaacaacaatgtggttttgtgcagttttgtgcacacatcctagactccatattatctgcatttcaacatttcgaaagaatctaggcattaatggtctatgtcatgttgttataataattttaaaatcttacgtcttgtcattctaaataatccttcacactatattatcttcatttcagcatttgggaagaatctcagatttcaaacaaaagaagctttggagacccaaactatgacaaacaagaaacaactgatgacaaagatgaccttccacaattcaagaaaatcaggagtacccactctcaaggaaaaagcaaaaaatgatgcatgatagactaagaagacaaagtaaagtagtagactttaaaagatcttgactaaagtaatatatctatattttctgtttcgataaacaacgatagcgctagtgctacatcttttaatgtatataaccatgtagtatcaatagcgctacatcttaagcgtgtagcaccagcagcgctacatattttgatgtatataagcatgtagcatcaatagcgctacatcttttgttaaatataagcacatcttttgatatatataagcatgtagcatcaatagtgctagctatggtgctaatcttacattatatggcgtatatgttag

SEQ ID NO: 3648 - DNA, 2979 bp, Zea Mays
ttttcttcccaatcctcctctctttcttacgccctccggattcgttgcctcgctcgcgtcgccccttcccaccccgggcctgcgtggttcaaggaattggaggcaacctaatcggcggtcaggaatgcttcaagagttcgtcgacaacgtcatcgccgtcacaaaggaatctgtgaagacatttacatatgagtcactgaacaacattgcaaggttcataaatggaatgtcagcactcctattgacactattacctggaaaaggcaacattttagaagggataaatggctgggaacttaagccagcactccgtgggccgcgtcttcctcgttggatggaaaggtaacatagttttactctgttctgacaacttcattccttcttttgaacatagtggggtatcttcgtttaatgagttcatccatgaactttctgttgattctgatgctgattcaattgctgactctgtcgctggggacgatgatcatgaagagtttgtctgccctccgtctccattgtcccaaagttcacggttatcacatgcaagcagctttggtagacatgatcgtcgactcaggagacatatcagatatgcagtttcttggatactatggccattgagattctttgtttctttaatattcattttgttcaatgccattaaatttcggatggtaagatcaactgctaaaggtgctgaaactcctcacctctcaagaactggtcttgccaagaaatcatttcatataagggaccagtttctccaacgcacaactgataggaggcgtggagtttttgaggatctgcatctggcaattgagattttcatcgaatcagtctttgacatcgttcacaaagcagcacattatattctttctccttcagaagtgtggcagaacctgttttgctggattcaaggaagtggtcatgatactagttctgtcgttgatgtattgactgctaatgttggcagtgataatcctgttccaacagagaggaagactgtgtatcgtcattctctgaacacagattcccggacatgtgaagatgttattactgagcttgggtatccttttgaggctataaaggttgttacttcagatgggtatgtcgtgttactggagagaattccaaggcgtgattcgcagaaggttgttttgttgcaacatggaatattggactcatctatgggctgggtgtcaaatggtgttgttggctcaccagcatttgcagcttatgatcaaggttatgatgttttccttggaaatcttcgtggcttggtctcaagggagcatatagataaaagtatttcctcctacaaatactggaaatattctgttaatgagcatgggactaaagatatgccagcaattattgaggaaattcacaagatcaaaatatcggaacttggcaaaagtcagcctcaatcagcagaggggacaggagatcaaaatgataagttaaaaagtttggaagtacaggcttcacaggaagacagtatagaagaccaaccctacaagctttgtgctgtatgtcacagcctgggtggtgcagttatgctgatgtatgtggttacttcaaggatcacacaaaagccccacagattgtctagactggtcctgctatctcctgcaggttttcatgaggattccaatgtggtattcagtatggtagagaagctcatcttgtttgttggtccagtgcttgcaccacttattcctggactttacataccaactcggttctttaggatgcttctgaacaaattagcaagggatttccacaattatccagctttgggtggacttgtccagacccttatgggctatgtcgttggcggtgacagttcaaattgggtaggagtgctcggtttgccccactacaacatggatgacatgcctggtgtgtcatttcatgttgcgcttcaccttgcccagataaagagggcaaagaagttccaaatgtatgactacggtagctctgcagcaaatattgaagcgtacggaacaccggaaccattggacttgggagctcattatggtctcattgacattcctgtggacttagtcgctgggcagagggacagagttatctcaccatccatggtaaagaagcactacaagctgatgcggaagtcaggggtggaggtttcatacaatgagtttgagtatgctcatttggatttcacattctcgcatagggaggagcttttgtcctatgttatgtcccgcctacttttagtgactgatccaggtaaaggccgtatcaagcagaccaccgtgcgactcaggaggcagaagaaagttcagtcagagattgaggagagcattgagtgcagagccaaggaggaatctgatgaactagctggacatttggagtgatgtggagcctgcaggttaagagtgtgttgtaagtttgtgaataggatactcgtgtcgtctctcatatgttatacaccatgtggaagatcaggggagaataggtctctgtttctagtatcatgttcatggggatcgctttttttaacccctgtaagtaacagtagaggtatatgcatcgactccgttgagcattaggtgtcctgctcttttaagtatcgagaacgaggagaatggtcaggaaccggatgtttacctggcaaatatccagtgttcttgcgacttcttttgtagaatgtcacagccattcaaaggatgtgatgtcaggcgtgcaagcgatggacagtatgttttctgcatatgttatggacagtatgtttcaactaaaacgtttttggtttggaaccaattgttactgttgcatgagtgttattgagcatggataattagcatagaaatgtaattctagtttcactggaatggaagaaagcttgttcactagaacgtaaaattggatctggacgctcctgaagaccggatcttgtaaaattagggtctgtgatccgttcttttgttttctccagcccccatgaacactgcg

SEQ ID NO: 3649 - DNA, 1002 bp, Zea Mays
agcacctaccttgcacgacttcttctttccggtaccttctccccttcctctccctccctagtccctagtcggcagtcccccgaccccgacctcgctaagcaaactcccagagcgatcgccgcagaagatcccgcatgcatgccccggcgccgccctcctccgtcgatctgccgttgtcggcgccgccgccgccggtgaaggcgccgtccccgcggcctccgccgccggcctcgctgcagcccgagtccccgggcgtctttttctccgccaccgcacccctgggcacctcccaccgccgcatcgccatcgccgtcgacctatccgacgagtccgccttcgccgtgcgctgggccgtcgccaactacctacgctccggggacgccgtcatcctgctccacgtgcgccccacctccgtgctctacggcgccgactggggcgccgtcgacgtctctctccccatccctagcgcctactccgaggatggctttggcggcggcgacgccgattccgaggccgccgctgcgcgcaggatggaggacgactacgacgccttcacggcctccaaggccgacgacatcgccaggccgctcaaggaggcgggcatcccctacaagatccacatcgtcagggaccacgacatgaaagagcgcctctgcctcgaggtcgagcgcctctcgctcagcgccgtcatcatggggagcaagggcttcggctccacgcggaggaccagcaaggggaggctcggcagcgtcagcgactactgcgtgcatcactgtatctgccccgttgtggtagtgcgcttccctgatgagtgatgacggctctgccgagtgtggggaggcaggtggtttgcccgccgcggttggtgctgaggatgtgctgcaccccgtgccggaggaggaggaggccgagtatcatgattcatgacgccgctgaggagcacaaggatacctgacctcgttgatgtattgtgaagtcctcttggattcagtgggcccacgt

SEQ ID NO: 3650 - DNA, 1397 bp, Zea Mays
aagtgaaaacggagttcttcggagtcctatatttgtaaataactgtactattgcaaagagcgaacgggggcgacctccaggaaaatcgcagagaatgagggggatcctcttcgggccccggcggcagccgccgccgctcccgctcttccccgccgccaagcgctcctcggcacccgcgaaccttcttttcgctcgcctctatcgcttcctcccggccagccccatcctccggctccttctcctcctcgcactcctctccctcatcccgccggccttcttccacctccgtctccgccgcttccaccaaatgcgcgagaggaagtgcgggtggatcgcgaggccacccatggtgtgcgcgcacggcggtgactccaccaacgccttccccaattcgatggacgcatttcggatggctctcgacgcgcgggtcgactgtgtggaggtggatgtttcgaggtcctatgatggtgtgctctttgctctgcatgacaggcagggatctacaaaagatgtctggtaattctacagcaaaagttggccactggaccacagatgagttttttgtagataaaagcactaaggacgaggtttcagttgtcaaaaagagtccaaaatgaggaagttcccatggcagaggaagctctggcgatgatatcacaatcatttaggcaggtcgttcttgatgtgaaagttggacccccttcatttgagaaaggtttagctgaggatattttgtctcttctcaggagaacaaattgcaagaattgtcttgtctgggcaaaaagtgatgatataggaagagagataattaaattgtctaaagatgttattgttggctatgttgtcatggtggataaatttaccaatagaagaacggagttagtgaggattgaaggggctaaagttgctggcatatatcatcctttgatccatgagaaggttatgaaggtcatgcgcaggcatgacaggagagtttttgcatggactgttgatgatagcagctccatgaagaagatgctgtatgagcatgttgatgccattgtgaccagtaacccttctcttctgcagcagcttatgcaggagaccagagctgagtgtatggaagatggttttgccttaccataggaatttctagctgtcagaacataagggtttaacttctcagcagagaggaccaactagcgagttgagtttgagggattattcataaattagatgataattactttagtttttggcacattccgcacttctgtcatataattgaaataagaaaatatggttagcttgtcatgaaatatgttgtttccttttacagcttgatcagatcaggtcagtgagaagatcgcaacaataatatcattgattaacagaatcatgctttagttaccattgat

SEQ ID NO: 3651 - DNA, 3174 bp, Zea Mays
gctctcgcacgagacacgcacgcccgcgcgcgtgaaggtacgcggaagcaggggcgaggattctccgaagcggagggcgaggcggcggcagcgaccttgagggagatggcggcgggcggtagggtttcaatcccggcaggggcgcggcgcacgatcgcggacatcaaggagatcgccggcggccacaccgacgaggaggtctacgctatgctccgcgagtgcaacatggatcccaacgagaccgttcagaggctcctcctcgaagatacctttcatgaggtgaaaaggaagcgtgacaagaaaaaggaggttagtaaagagccatcagattctcggtggagacctgccgtgcaggggcaaggtggaaagaattgtcggaattgtgcttcacgcagtttgtccagctctaatgattctgctggacgaagtgctatttctggaaaggagaatggaataagtttgatcatgggaaaaggtagtggttctactccgataaccaatatgaatatggatgtcaaagcttccactttcatgccaagtaacagtttgttgagtggtctttgcaacggtccatatcaatcagttgatcctgctgctgtgctggtgtctagttctagtgctgttggtgataagtctggttcaacagccttggctgatcttacaggtggtcttccattcaaagatgtagtcgctactatagatccaaattcactgcaaccattgaaaccagcaccaccatcagatcctgtggttgtatcttttctcaactctcacagccttggtgacgttggtgcttccagacaaactattggaatcaagaagacatcagtagaacataaggtggggcgtgatgtatcaacagacaaaggctcctccgaacaatctgtgcaatcttcatttcgacgatcctctgctagtagaccatcttccagctacaacagtcattcagaacaatcccaaaaagctccagtaccgaattcagctggtacagaggattcgttgaaggtggacatatgtttaaatgatctacagttatcagataagcagcatgtgataattccagatcatcttcaagtttctgagtctgaaaagtatgttctaagctttggaagcttcgacgtcagttttcagcaaactaagggctcttcagatcctgattatgtgaagagctctttaccgaaattcagttcgtctcatgagttggatggcaacattgatgaacttcagtccatgcaaagagatcagaattcaacatctgttgtccaagaggaagctggtcatgttcctcaaccttctgcaaagctagaaaaatgtgcaccctcagcaatggagatttcatctattgcccttatggaatcaaaagactgtgatgacgattcagccacttcaggggatccccaatctacaggaactcatagtgcaccatcttatgtgacatatggatttgcaccacaatcacatgttaatcagattgagaagtccgaatctcattctcagtcgtaccatcccacaactgatgctgatgaacggctgtccccttctcttgctactcaagctgctcacaagtatgggaatatcccagttgttcccacacaaactggccaggatcaagaggggaacgactcacctgtgattatttcatctgtttctgcttccgttgctacccctgctgctggagttctgtcggcttcagttgctatccctcaacagtctgttcctgtatttcgccagcctttaggtgttcatataccacatctcccgatgaattatgtcccttacaatcagtacatttcaccattttttattccaccccctacccttcacccttttatgggtaatgctacattttctcagccaccttcaacaggggtcatgtacccaactcctggaaccgcaagagttcttccacctgtcaaattcccagttccttcattcaagcctggtgctaacattgggagccaggcatctattggagttcctggttgctatggaacatatggttctagtccatcggtttacactaataacgcacccgtgtcatctggaaatctagcagaaaatgacaatgttacttcatctcagttcaaggaaaataacatctattttgctgggctccagaccgacggcttgactctgtgggttcctacacctggacgtgatatttctgctctccaggtcaattccttctatggtctcccccctccgggacaccaggtaacatatgcgcctcaggctggacatggtccttatggagggatctaccacccagcacattctgtggcaggagctactgttactccactgctccagccatctcacacaatggctggagctgttgaaatagttggggcacctggtggtgtttaccagcatccccaagctcacatgaattggggaagttactgataggccatgattattgtttctttgactttgggtgtccatgacaacacatttggcagaggtgttcaagttttaacaaaggtgaacttgatcaggagtgtatatatgttctcagcatggctgatctgcagggcgggttattgcttccagaagcttccagattgttgtggttgtatttgtagcagataatggccatgaaattggttgagtttatctgctcaggttccttaatacaattttagcctcctgcgcccatcctgaaacttctgcaaggagcgtgatttcgctatcttgtctgattgagggtatggagtacttgaaactgaaattgagcaagtggattttcgttctttccgctgctttacatgtaaattaaattttggttcgatgtgtgacagctgttgtacttggtatcagttgtggacttgcagctaaccagagtcaaagtgctttgaaggacttactgagcacgtttctgttcctgtaggctgtagctcagagcctagtgcttcgttatattgcttattactcattattactatttattgttcctatgaactcgtattgtttggggttaaagggccagacatttgttagtgcccctttggtataagaaaaaatggcatgcaggctacgtgccgactcacgaggttggcgtgtgggagtgatgatcggccgaatggccttggatgactctggtttggtctcgggtgggcgaatgatgtgatatgttattatttgagtaattacatttattggacaatgcacgtg

SEQ ID NO: 3652 - DNA, 1834 bp, Zea Mays
cctactcagcctctcctgcacgccgccgcccatggtaccaaactcgaccgccaaagcccctggccgagctcccccatggcgtctcccccaaccatggtgctctctgctcctccacggcgctgagctccaccagccgctgctcttgaacgctagcgccaacctcatctttgctcctctctcccgcatctctgcaggtcgcccaggtcgtggcctcgccggatcccgcgcgctcctgtgtcgtggcgttgtccccatgttttctccgcgccagcgcgccaccggctctacttgagctcctccctcgccgtagctcacaggtcgccaccccatggctgctgctcctctctccctcatctctgcaactcggcgcctcctctactcctccacctgcagttcgccccatgttctggacgccaaccctccatccccctaccctccagccatggacgccctagctcccttttgttgctcgctagggaccagctcggtgccctctcctcacttgaagccggcaacaacgccttggtagtggtcgagcagcacgtcgtcggctccgtgggttttttgggcagcccggttgcggtgtcgtcaaaccccggtgagacctcactgtccctgcatgcctggtgtttgatgtaatgtcaaaccgcttaattttatagataagtttaacattggattgttctgacttcttgcactgatctgccatgaatcctgaaatgtagtcccatgtgtgccatatttcctccatgcatgattattaagtctgtgttcttgaagtttccaatctcacacgcatgattaatgtgttcttgaaataccgatgaagttgtgtaaaaagtctttactacgattgagttacacccttagttaaatagggactttattttggagcaatgaatattgatcagcacattcccttagtatgttgctacctgcaatttttttcttacaacctgagaagcggcatgtttactacaaggtatcatcttcacttgtttgcattacacgcccattttcattatccctcttttctcttttctgtgataataatggaattaatggcactctttctcagcttgcagttcaacagttgaatttcatcgagtcccagccagtttgattatatgaaccagaggcaagccaggatgccctaggtacataaatgtgtttctggtggaggtaaagttctaattccaacgtttgctctgggaagagctcagggttctgcaaaacatccttttgtgaaatgatcctcgaccgtcaattctttgaaatgttccctagtaaaatgatttattcttgatggttcaaaagtttccctattccttggatgtatcatatgcatcggggatgtcatattgaagaatcagtataataatatggactatttggaggggtctttaaatgagcttggaagttggtgcataaggctgcaacaccgtctagtgagggtgttttggacaaagaaaacttgtaccttaaaacaggaggatacaagaagctggagtggttgtctgaaggcttttgaactgcttgaagcattagtgtagctttggtgcttttgtgactgatcaactctggagcagctagagtgatgtagttgtgggcttttgaacaatagctggagtgatatgaaatattagtgatgtagttgtgggcttttgaactgcttcaagctggagtgatgtcgttgtggtgcttttgtgactgatcatctctggagcttttgtgaatgatctagctagctatctgtaaatgatctagtcgtgaatgatattataattgtgatgcttttgtgaatatataattgtggtgcttttgtgtttatgtg

SEQ ID NO: 3653 - DNA, 1931 bp, Zea Mays
tttgtaattttgtatagtggtttattttcacatagtgttcacagttcacatattcatgtagatctctagacaactgcaaatactaatggatgattactcagactgacatgggggttaacatcagtaattggggcccttcataagcaacatctcttttgtggtcacattatgacttccgtttgctctttgatagtgtattctccccaaattgccatccaattatatgcagaatattttccccagaagaggattgcgaggttatagaatcagagaaacactcccatgttttttaccaagccgaaacggatatttggatggttctggttgtggaaaaaaacaaggaaaatgaattgacttggcgttgtggtgcactacaagggattcttaaagaggctcattctctctttgcaatgtttcatggaccaatccgaactttgcttcacaaacaacccagtgcagagcttgctcgtggtcacctccgcacatttcttacagattatttgagcgattttaatgttggaaagaagttacaatttccaacctaccgtgacagcctaaaggagaggggaacagtccaaatgcttacggtatcacgagaagtggcacttgacgttcagtcactcgccacagtacttggatcatgtcttggaaatgttacctgccaatcacttgtactatttgaagacctcttggtgtcaacgacactgcccccggatgatactttaaacctatatacatatgctgttctgaggttaactccgcgtgctttatattccaatgcaagttcttggtcctatttgcggaaaggaacttctgttagtgctggccaaacatcaagttcatcaaatggaacaactgcaggagaaaggcctctcctacgtgagaaattgtcaaagggaaaggatggctttgttgctgctgatttcacagctacagaagctcgttgtgctgtaccctcgactccaatactttggttccagcaggcagatgagtgcatgcacctatgcatttatcagcacaaaagtctcactatcttactgctggttcctgcttcctcagtgataaatggagaagagggcattactcatgtgaagaaggcgatgcttgaaaatgcatcacagaagattgtcactgttgagcagaaattgacacgaggatggggaggagaaaatgcgtatcatgttagtggatatcgttatttgcttgttgatccggagagaagagtatcaagagcctccccacctgggaaagtcaccaccctagcaaaggattctctacttgccctcaacatgctaagacaagaagtagatctagagaagtcaagatacaagagaggcgacccttgtcatgataaggatttcgaagtatgtatcagaacaaaaaacaatgcgtgggttattgctaaaatcagtcaaggaagggagctttacatggctctagagaagggtggtgaaacgcttctatatgcatccacagctgtagagaaattcagcaacaggtactgtgagggagcattctctacagattagaagcaccagagggagatcttagcttttccatacattacctattatgtacatcctgtttttttcccagctgtatcgttgccccctattgttgagagactcggaccactctttgcgaagggaataaggagttcgtatcagttgtacagctgctctgctgtcgtgtgctatctgcaaaagaatagcctagtctgggaataacgcagagcgggatagagtttgtttgttcacttatgcccttccttaacgcagagcattgtgcgtgttttcattttgctgtaacagccggcgatttacctgcagactgggaaagtaacttagcgtttaatttggtattctgcattttgatggtctcatatcatatggttcgagttgacgggttcgttctgcctccggagaggagag

SEQ ID NO: 3654 - DNA, 2068 bp, Zea Mays
gcccggcgtgcccgaacagcgcctcaccgcgccgcacgcctgcgtcggtcgccgaccccagtcaccggtccacgcccgcctccccctttctcctccgccctttcttgtgaccgccgccgcgggccctagcccgccgttccctctccggcgccccgctcccgcacccgcaccggatcagtccgggccgcgtggtcgcccccacctaccgcctcgggtccactcgctcgcggttgcgtgtcccgcggggtggcccctcgggcctcggcagctccggtttcgaatggggctctcgtcggccgccactggcgacggggtgcagctctgcgtgttcgacctccagagggggcaacaggagggccaggagctcgacaagatcctctacttctaccccgccgactgccccatcctgctccagctctctgtcatcggcctctgcgaggggatcgtcactttcactagaatattttccccagaagaggattgcgaggttatagaatcagagaaacactcccatgttttttaccaagccgaaacggatatttggatggttctggttgtggaaaaaaacaaggaaaatgaattgacttggcgttgtggtgcactacaagggattcttaaagaggctcattctctctttgcaatgtttcatggaccaatccgaactttgcttcacaaacaacccagtgcagagcttgctcgtggtcacctccgcacatttcttacagattatttgagcgattttaatgttggaaagaagttacaatttccaacctaccgtgacagcctaaaggagaggggaacagtccaaatgcttacggtatcacgagaagtggcacttgacgttcagtcactcgccacagtacttggatcatgtcttggaaatgttacctgccaatcacttgtactatttgaagacctcttggtgtcaacgacactgcccccggatgatactttaaacctatatacatatgctgttctgaggttaactccgcgtgctttatattccaatgcaagttcttggtcctatttgcggaaaggaacttctgttagtgctggccaaacatcaagttcatcaaatggaacaactgcaggagaaaggtaccgtagtcgatctcgtgatacttctccaggtggacaaaatcagatgaatcgtaatttcaggcctctcctacgtgagaaattgtcaaagggaaaggatggctttgttgctgctgatttcacagctacagaagctcgttgtgctgtaccctcgactccaatactttggttccagcaggcagatgagtgcatgcacctatgcatttatcagcacaaaagtctcactatcttactgctggttcctgcttcctcagtgataaatggagaagagggcattactcatgtgaagaaggcgatgcttgaaaatgattctctacttgccctcaacatgctaagacaagaagtagatctagagaagtcaagatacaagagaggcgacccttgtcatgataaggatttcgaagtatgtatcagaacaaaaaacaatgcgtgggttattgctaaaatcagtcaaggaagggagctttacatggctctagagaagggtggtgaaacgcttctatatgcatccacagctgtagagaaattcagcaacaggtactgtgagggagcattctctacagattagaagcaccagagggagatcttagcttttccatacattacctattatgtacatcctgtttttttcccagctgtatcgttgccccctattgttgagagactcggaccactctttgcgaagggaataaggagttcgtatcagttgtacagctgctctgctgtcgtgtgctatctgcaaaagaatagcctagtctgggaataacgcagagcgggatagagtttgtttgttcacttatgcccttccttaacgcagagcattgtgcgtgttttcattttgctgtaacagccggcgatttacctgcagactgggaaagtaacttagcgtttaatttggtattctgcattttgatggtctcatatcatatggttcgagttgacgggttcgttctgcctccggagaggagag

SEQ ID NO: 3655 - DNA, 1845 bp, Zea Mays
cgaacccatttcttgcagtgccacaggaaggagcaagacgatccatatttggagaggccatttggcatccagagcatccagataaacttgaaagagcaagaaaaacgaggcctcgtttcttgcagtgcctgtgcgtgcggcggcagcgcatgcgcattctctcccctccccgttctcctctccccgggcaacccggccgcgccgcccccctttcttccaccctcgttggtagagtaccgatatagttcccccatcggccaggaatcctcgcatcgcatcacgacacccggttcctctccctcccttcccttcctctgcttccggggaggaggagaggaaagagacagacgaagggcgcaccgggaaggaggacctggaggaggaggcacacaacacaatccttcctcttgcacgcggagtcctcaagcgggcctcctcctcggccttggctcaaattccgggtgccataacacgacctccgccggcggccaccggcagccatgtcgcccttctacctcgctcgcggtgcttccaagctagtgagaaggattacctcggagacatcggtcgagctcaagattctatctgataaatggcggcttctcctcgctggcctcattttccagtacatacatggtttggccgctcatggggttcattatctgcaccggccgggccctacccttcaagatcttggcttcatgattcttccggagcttgggaaagaaaggggttacatcagtgagacattgtttacattcgtcttcctcaccttcgttttgtggacatttcatcctttcatccttcagactaaacgcttctacactgttctgatatggcgcagggtacttgccttcttatgtgcttctcagtttcttcgaataataacattctatgcaacacagcttccaggacctaattatcattgtcgcgagggctcgcctctggctagattaccacctccccagaatgcagctgaggtctttctgattaatttcccaacaggagtgatttatggatgtggtgacttgatattttcatcccacatgattttcaccctagttttcgtcataacataccagaaatatggaagcataaggttttgtaagatgcttgcttggtgcatagctgttgctcagagtcttcttattatatgttctcgcaagcattacagtgttgacgtcgttgttgcatggtatactgtgaatttggtcgttttctttgtggataagaagcttacagaacttcctgatcgatcagtgggatccacatcagtacttcctgtgagtgcaagggataaagataccaagttgaaagaagaaaataccagattgctgaatggtaactctatggattcagctgatcgaggccacggacacaaatgaatggaaagcaaattgagaatgaaagccatgttgatagtgaaactgtgaaaacatgatcaactatcaaggaggggattttgttagctaagagacgtttcagacgactaaagaaatatgggatgccatccgctttggtgcctactgcctagctccttgacgacttcatgaaatatagctacgaaggaaatagttttacatctcgctgttctaggcagcagaagttttgtttgcaaaactgtacatcttcctcggctctctcatttgtaaccctttttctttctggtttctttcatttatttaccagcttggaattcagattatttatactagttgtgtatagttagcacaggttctttgcatgtgaacagtaatcatatggacaatataagattgttcttgttataagcaccactttttattattcaactttttattcaagtgaaacagccgtagtgtaaaa

SEQ ID NO: 3656 - DNA, 1479 bp, Zea Mays
cggacagcgaagaggcaacacgcgaacgagaacgacgaagccaaagcaacacaccagcgcgcacgcacgcgcagcgtccggcgggcatcaccacctcctgtcctcctccctcctgccccgatccgccctccccgccgctcgccgcacccgatgtcggccgccgacccttccgcggctccggccgcggccgccgacccggacggccctgactccgtgcggctcacctggaatacctggccacggtcaaaggtcgaggccagccgctgcgtcgtgccgctcgccgccaccatctcgcccactcgcgtcccggatccctccgcggcatccccgccgccgctcccttaccctccgctccgctgcaagcctccctgttccgcgctcctcaaccccttcgcgcgcgtagacttcgctgccaagatctggatctgcccgctctgcttctcccggaaccactttcccccgcactatgctgccatatctgagtccaacgtccccgccgagctcttcccgcagtgctccaccgtcgactacatcgtcggcggagccggcatccctggggtaggcggcgcgccgccgcccccgccgcccgtatttctcttcgtcatcgacacctgcgtcatcgaggaggagctggagtacgttaagatggccatgcggaaggccgtcgcgctcctgccggagcacgcactcgtgggcctcgtcaccttcggcacgcaggtgcacctgcacgagctcggattctccgatctcagcaagatctacgtcttccgggggaccaaggagatctctaaggaccagattttggatcagcttggcctggcgggtgctgggcggccgggcttccccaagatgccacagcaaccgggcgggccacaggtgaatgggatgcatccgccgtccacggccggggtcaacaggttcctgctcccggtgtcagattgtgagattgctctcagcacgttgctggacgagttgcagcctgaccaatggccagtcgaggctgggaaccgtgcgatccgttgcactggtgttgcgctcagtgtagctgctgggttacttggtgcttgcatgcctggaacaggtgcaaggatcatcgcattgctaggtggtccgtgtactgagggacctggaatgattgtttcaaaagatttgtcagaaccagttagatcacataaggatcttgacaaggatgcagctcctcacttccagaaagcagttaaattttatgatggtcttgctaagcagttggtcagtcaaggtcacgtgttagatgtttttgcttctgctctcgatcaggttgggctagctgagatgaaggttgctattgagagaacaggtggccttgttgtcttgtctgaaagttttgggcattccgtattcaaggattctttcaaacgcatttttgagggaggtgaacagtctctaggactttctttcaatactggacagtgtgttatgttttgggtttattataaccat

SEQ ID NO: 3657 - DNA, 3290 bp, Zea Mays
gtcggttaaatttgttgtcaaaaaacttaaacgacaatcttagggagtaccaaaaaaatcaacacacgtgcatatggaatgtaattcttgaattaaaattttgtcaggtttgagcctcagttactgcccacagtcgccacagatagacctccagtaccagtcacacacgtgacactcgcaatcgcaaagtcgcaagcggatcgcaaactcgcaatcaaggctgctcccctccgtctccgtgttcgccactcggttcaccgcccgccgccgccgagacctcctcctcgccggctactcctgaccccacaaaggcagcgctcggaggtggccctctgtcgggtggagtggtggacacatccgcgcccatggccaacggcggcgctgcggccggcaagctcaccgtcgccgagaccttctccaacctcagggagcaaggcaagggttggattgctggcgccgtggtggccgatacccaatgttggtcccggttggttgcagggaatacctaattttggtcccatttagttgcaaggaaatggattagggctttggaacaatctgtgtattccttgcatgaattgtccaaatctagtggttttatgtcgagtacacatcgtgctggtttaatttccgtaaaaatctagcctgatcttgcacaatagtggctgctggcttgatgtgcacattgatccgtctttgtctttaaaagcagtgtttatattttaggtgccacagtgttcattctcaacaaaggtaactgcattaagaaatttgtatccagagtagcgataacatgctaagcagagaccaatctttagttgcagggatcttgcattgtactccattccaaattctgtgttattttgtcttttctagatgcataccttattagcttttgttatgcactttgatatatggtatgtctagatatatagcaaaaactatgtacctaataaagcaaaaacgacttacaatttgcaattgaaagagtatggtgcagatctgccttaaatcgtatccagcagttcactcatatggttacccaaaatactgttttacactgttcgcagagtgaagttttaatatgggtgtgagcatgggtaaaagtcttagttggcaaatagtcttttggtgtaaggatttagaaaatactccagtgaacacgtgggaaaatcacttgtcagagagggagggtggagccacaaaccaaggagccgcacagatgccgacatcaatacacttatgttgtggagaggagccgcatctcgtaatgtctgattttgtttagatgccacacagtagtatcccagccatgggcgcatggatgggggatttggacccagggtcaatggaatttaattcccagatttagggggtgtatggtacggatccaggttccagctttaatttaaaggtgtagtttataatagaaatttaaatagttttaaaaatatttttaatctaaataataaataaaatgacttatctaaatgacttacgggggttcacaacttcaaaactatacgattttatggaacacctaatggcctgctctatcaattccactaagaccccgtttggttccaattagtcctaggactaaagtttagttctaggactaaactttagtcccttcctgtttaattctagggactaaacaaattctaaagtaattaaatatagtgtccaaagactcaaatacccctggaatctatagcaacatggacgtgggataagggcaatggaggaaaaaaatatggtttagtcccctttagccaccacttgagggactagggactaaactgatttagtctctcctttagtccttatgtatggcaaattagagactaaaagagactaaaacgaagagactaaaaattatcccttgcaaccaaacaccccctaaattttctggagctggatcaatcccagacagcaccttaatttaagttgacagtctaacctgggaaattttcagagtgcattcatcccgttcataactgctggtgatcctgacctggtaaccacatcgaaagcattgaagattctcaattcctgcggttcggatgttatagaggttggcgtaccatactcggatccactggctgatgggccagttattcaggcttctgcaacacgggcgcttaagaaaggcactacacttgattctgtcatagagatgctgaagggggttacacctgagctttcttgccccattgttcttttcacatactataatccaattctgaaacgtggtgtgggaaacttcatgtctactatcaaacaagctggcatacatggacttgtagtgcctgatcttcctttggaggagacagcgttgctgaggagcgaggccattatgcacaacatagagctggtgctgcttacaacgccaaccacgccgacagatcggatgaagggaattgcacaagcttcagaaggatttctctatcttgtgagcgctgtaggggttacaggtgcacgctcaaatgtaaacttacgtgtagaacaccttcttagggagatcaagaaggttacagacaaaccggtagctgttggtttcggtgtatcgactccagagcatgtgaaacagatcgtgggctggggagcggacggtgtgattgttggcagtgcgattgtgaagcagttgtgtgaggctgctactcctgaagagggtctggaaaggctcgaggagtacgccaggagtatgaaggctgctatgccgtgagctgatctcactccccgtcacaggcaagctggtgtccatggatgcgggcagagcagtgtctgattggctgcactgaaaatgacattaccttcagacaattcgccttgctctcttctggttctggagtactactttcgaggtccgtcagactgggtcacaagatgatcccaaacggccccagatgctggatttttggacaacggaaagtcgattctgacctctgttaatgtcggcactcatgggtcatgaccaagccatgtttatggtcaaatcagtcccggatgctaacacgcttctctaatctctacctacggagacgactttttccggtgcttatcgtatcattatcatgcatgttactggtagtaacatgttgtctgaacagattctttagctctgtcatggcagcatgaagtgtatctggatgcgaagaagcagtgttggtattgaactgtccatgtacgagttgtttgttgctgtgctttggcggggtgaacagctaggattggataggctctagtgccagccgagccgccagggcccatgaaaagtcaattgtttg

SEQ ID NO: 3658 - DNA, 1108 bp, Zea Mays
ctctcgtaccaaaaaaaaaaaaaatcgtgctcggcacacgcaggcggctctcagcgacggaggggcagacgccagacgggcagtcccaggttcggcgtcgtcgtcagcggctccccctcctgccagtcgcctcgcgccttcgcctccggtcctccgcacacctgctggctgccggcgactctgcctcgctacatcaacatgaggctcaataaggtggaagtgaaccttataaggctgttggaggctgctccacggcagcaaaatcaggctaaacttgtctattatgtaaccacagcgcgggagctgttggagcagctaggagctgagacaacaccagaagggatatcaagcatttcaaaagctaagctttctgagtattcagaaaagattgaagcacttgcttccaggcttgctgcttcagtgcctgaaaatgaaaagccgattattgaaagcaaagatgaaatctcttatgaagaagcaaagccagaaagtccaatatctttatcatcaggactgcgaaggagatcaacagcccatgctgtggttggaacaagccatcaggaaaataaagaagatatcggagcaccgataaaattggatgcagaagctcaggctcacattgagaagcataggaagctccaagaagatttgactgatgaaatggtcgagttagcacgtcaactgaaggaaagtagcctaatgatgaaccaatccgtgcaggagacagagaagatccttgattctaccgagagggccgtggagcacagcctggcaagcacaggccacgcaacctcgcgagctgcggaggtctactcgctggcttccaagactacgtgcttccagtggctgctaatgtttgtgatgacctgcatgtttgtaatggtggttctgctgataaggatcacttgaatgatgaggctgtagcaggcactcaaatcgtagtcacccttgtctttgtttcatgggaattctttgtggtcaggtcatggtatttttccgagcaagtgtccccaaccaaacaagcctgctgtatgagagagaaactggaacagctgcctgtacagaggcttggtggtcgctgttttattggtcaggcctgagagactcc

SEQ ID NO: 3659 - DNA, 1652 bp, Zea Mays
gcaggcctcctccttgtttatatatgggagatgctctcaccctctaaggtaaggaaggagaagaagacgagtgtcaagtgaacctgaaacttgcggtgtcactggctggtagcctgagtgtgagtgagtgatcgagctagctgagctccgatcctcgctagctaggataccgccataccacaagtcttcttcacaagtttaggagtgacagcaacaagagatcgatggcctctgccaccgtgctcaagtcctccttccttcccaagaagtccgaatggggcgccaccaggcaggccgccgcgcccaggccgcccaccgtctccatggtcgtccgcgcctccgcctacgccgatgagctcgtgaagaccgcgaaaacgatcgcgtcgccggggcggggcatcctggcgatggacgagtcgaacgcgacgtgcgggaagcggctggcgtccatcgggctggagaacacggaggccaaccggcaggcgtaccgcacgctgctggtcacggcgccgggcctgggccagtacatctccggcgccatcctcttcgaggagacgctgtaccagtccgccgtcgacggccgcaagatcgtggacatcctggcggagcagggcatcgtgccggggatcaaggtggacaagggccttgtcccgctcgccggctccaacaacgagtcgtggtgccagggcctggacggcctggcgtcccgcgaggccgcctactaccagcagggcgcgcggttcgccaagtggcgcaccgtcgtcagcatccctaacggcccctccgagctcgccgtcaaggaggccgcgtgggggctcgcacgctacgccgccatctcacaggacaacgggcttgtgccgatcgtggagccggagatcctgctggacggcgagcacggcatcgagcgcacgttcgaggtggcgcagaaggtgtgggccgaaaccttctacgccatggcggagaacaacgtcatgttcgagggcatcctgctgaagccgtccatggtgacgcccggcgcggaggccaaggacagggccaccccggagcaggcgacgcagaacctcaacgccatgaaccaggggcccaacccgtggcacgtgtccttctcctacgcgcgggcgctgcagaacacctgcctcaagacctggggcggccagccggacaaggtcaaggcggcgcaggacgcgctgctgctgcgcgccaaggccaactccctggcgcagctcggcaagtacacctccgacggcgaggccgccgaggccaaggagggaatgttcgtcaagaactacagctactaattaatcgcccggccatcacccgggataccgccgcccctccgagagatacgtgtgtactgatcatggttaagcacgtactccgatccattcccatcccatgaagccatgataatgatgatatgatccatggaccatgcatggtgctctggtcgatgccgtacgtgtgtccctgatacaatactattttagtactgatgctagtcatcatatatatcgatcgagctcgccactgcgaagtctgagataatgcatgtatgcttgacggcgagatctgaggaaaaataatttctatatatgcatgtttcgagatggctctcccttaattaattattacataccgtgtgttactagctt

SEQ ID NO: 3660 - DNA, 1037 bp, Zea Mays
gtgagatagctggaaatcgctgcaagttcttgaggtccccaggctggataaattttctgcatacgatcaaatagttcattggatgaaatgtaggctgtagggataactttaacacacccattgacgcatcaaccagattttggaaaggaagaaggccacatatgagcttataagaaaagctgtagctgtgaaggaccatctagctcaattatctgatttccataaatatcagagaaatgtgtacctagagtctggaagtggtcatcaactgagaaaaccaatgaggaagtacatccaaaatcttcttaaggttaacatggaggaaccttatggaccagaatggcttttagaagagaaagttaagcgtcgggagatggtggtcccagaagcacgatatatatttgtgaagcaatattctaatgggtttattactgaaagttccatgaaggaaacggaggtggaacatatgtgtgcagtgtgtcctgaaagctgcttgcttggttttgtacactatagatttgttgtggaagaggagcttcctgttctttatgtgtatgagctacaaatggagccttctgctcagggtaaggggctggggaagtttatgatgcagttgattgaacagatcgcttgcaagaaccaaatgggagctgtgatgctaacagttcagaaagctaacactcaagcgatggctttctataccaagttgagatatgtgatatctagtacctcgccatcgcgagtggaccctcagataggacttgaaaaaagctatgagattctatgcaagacatttgactctgaagctaaatcaaaattagaggatggggactattaagagtttagaatgcgtgatgacggtggtccttttagtatgatctgtagtcctgtgtcactgtaatttattattgacagcgtgatgccttgtccaacttgcattctatttgtctgtagcttcttttggaaactgacacatttgttcttgcgactaatgtcttgctggatgcttaaaagttaaaagttaacaactctgctcg

SEQ ID NO: 3661 - DNA, 1175 bp, Zea Mays
accgatccgacgcaaacgaacaatccctcagtcaatcacgcccgacggagacggaagcctcagtcaatcacgcccgacggagacggaggagtcgcggaggaggactgagacgcggacgggaacatcgccgccgaggtctaactccaagtgcgccggacgggagtggacgaggaggaggtgactggtgagcgatttggggtgggcggtgacgggcgtcgcaggtgcgcctcacatggtgcgcgatggcgaaatgggacgctcctgtccgtttgatctgggagaatcgatccgtcccgtttctgacgacggggaagcggtcatggcgacggcggagaacaagaggcccaggctcagcagtggagcagagaagaagccaatgtacctagagtctggaagtggtcatcaactgagaaaaccaatgaggaagtacatccaaaatcttcttaaggttaacatggaggaaccttatggaccagaatggcttttagaagagaaagttaagcgtcgggagatggtggtcccagaagcacgatatatatttgtgaagcaatattctaatgggtttattactgaaagttccatgaaggaaacggaggtggaacatatgtgtgcagtgtgtcctgaaagctgcttgcttggttttgtacactatagatttgttgtggaagaggagcttcctgttctttatgtgtatgagctacaaatggagccttctgctcagggtaaggggctggggaagtttatgatgcagttgattgaacagatcgcttgcaagaaccaaatgggagctgtgatgctaacagttcagaaagctaacactcaagcgatggctttctataccaagttgagatatgtgatatctagtacctcgccatcgcgagtggaccctcagataggacttgaaaaaagctatgagattctatgcaagacatttgactctgaagctaaatcaaaattagaggatggggactattaagagtttagaatgcgtgatgacggtggtccttttagtatgatctgtagtcctgtgtcactgtaatttattattgacagcgtgatgccttgtccaacttgcattctatttgtctgtagcttcttttggaaactgacacatttgttcttgcgactaatgtcttgctggatgcttaaaagttaaaagttaacaactctgctcg

SEQ ID NO: 3662 - DNA, 427 bp, Zea Mays
tgcaagtttcttctgctaacgcttttgtcaagggtgaagttgaagatgagaagacccgaaagaaaagggagaagatggagaagaaggcatctagggggaagatgatcaaaactaggactcgctgatgtgacatctgtggcctgttgcttgaaagttaggttaggttggtttatcatagctgtccgaccgagttccaaactgtttgtcaatatttatatcgtgaatttgttatagcgttcagcgacaacttgtttgaacttttaaacagctagtattatgtaggaaaaatgccagctaatctccaacatgtccgatcaataagaatttcatgtgtaatttctgacttttttacccataattcaaacatcaacattgtggcatagcaaatgggaaatcgtgacacacaatagtgtacttttcacagaaa

SEQ ID NO: 3663 - DNA, 2419 bp, Zea Mays
tttctctttgggtcgtggagagggacacgcctcttaccccacgactgaaaaaattctggaaatcgaaacccaccctcgagcgacgccaagcggccaagacggagaggagaacaattggggacggggaaagtccagggggaagccacggccaccggcgcgatgaaaccgtcgctttcgaagaagaagggcaagaagaagaagaagtcctcgctgccggccgccgcaccggcccctccgccggcggagggcgctgcggatacggaggcatgtcccccgctgcccggaaccataaccctaaccgctgccaccgctgctgcggcggtggtttcggagacggagtccagcagcagcggcgaggcctcgacgtgcccatccgcctgcttcaccgcaagctcgtctgggaccgcgtcctcgcactccttctctgccttgtcctcgtcggcgtccacagcttcgtcgtcggccgccggcgaggagcggcgggacctcacctggctgctcgacgcattcgccagcgccaccttcgaccagatcgactccgcctaccgcgaggccggaggggaccctttcgtggccgccggtatcctgtcctccacgcaggacactcacccgccgcagcccccgcagccggcgccgcagcccccgccgccaccagacctctcgccgcgcagtggatctggtggaaggaaggctggtcggaggcccaagcgggttgccgtggccgctacgggcatggtcgcggacgtgattggcaaggagtacacgcgacccgcggctaattctgtagtaagcatgccaaatgcttggaagggtcgggacggggagagcgatggcagcgggtctggtggccgcaaggacagtgttgaagaggcagagcagttcctgtgctccatgctcggggataattccgagcttggcatgggtgttgtcagagacgtgctaggccagtatgggtacgatgttgagaaggaacaactcgctgctttgtgttctgaatggatatactgttggtttgtacagttgtgctaatcaagtgctttcaggctttggatgcattgcttgatatatctggtgtgtcttcagttgaaaacatggaaacaaaccatcaaagtgccagaaggaatgacacatgtcatctagatatgttttctggaaatgggctatcagtggagaatctgactgcagggaatagaagaagtctacgccagttgacagatgagatatccaacactgggctccagtctgaattaggacacgagtttttatggggtgaacctcagatcagctatgcggaggctgttaaggaggcaccacgctcatcaacattgccgtcaagatcaactgtaatgaaagctggtccacaacaagtcctggattcactgtttaaaattcctgaaacacgcacgtatgagccaagttctatggactggaaaaaggtagtaaagaaactgcaaacaatcaattataccgctgcatcaaacaatcacgaaaggcctaaggatgggggtggctatcgtgagctccgtggtgttgctgcaaggcattacgataaaatgaaagaatactatcagaaagctgcctttgcatattcgaagggtgacaggtcatatgcttcttaccttgctgaggaggggaaacattatcgagaactaggtcgcatagaagacgagaaggccagcaggaatatatttgaagccagaaataagcatataacgaacacagtaaccatcgacttgcatggccaacatgtccaacatgctatgaaccttctcaaaattcacatgatgatttgtatttgcattccatctgtcttactgagggtaattaccggttgtggttcagaaggtacagggaagggaaaaataaagcgctcggttatagagcttgcggagaaggaacatattgagtggcgcgaagagaactctggaactgtagcccttcgacttggtgggccaagagagtatcggttccttgagcatgaaagcgattctgacctagtggggaactttaacatagattaacttctgatctaatctatgtattcccgtatttatgtgttatagctatggatgctgcctaggttgcgatgtaggctgtagttctgacacagaagctcggtattgtagttgggtaaattatggtgtaatgttgaccccaggctgctaactgtgcaatcacagaagctctgactgtacaaccgtagcccttctgtgagcaatgcaacacaggaaccgtaatcatcgtgagttgaagaatatcatactatggccgattgccacgggaaccaattttggcctgtaccaactggaacttacgatttgtatgaaaatatattcaacacttaggccacaaatattacttatcatgttcaactgaatacttttgaaatgtactaatattataatgtgttataaagtat

SEQ ID NO: 3664 - DNA, 684 bp, Zea Mays
gaagacccctgtgctgtccagccaacttttccacctcagtcttggatgccgcccgtccgccgtctagatctccccaactcctccgtccccttgcttcctgtcgtcgacctcggtggccgccgcgagctgcgggtggttcatcgccgtcgacctcgcctctccgctccttctgcactgcctgttaccggcttcctgttgctctaccggtgcggcgcgggtcgtcagtgaagctccgactatccggattgactcggatcgacctctgctctcgtggggtcttcagcgcctcaagcatggttgcggccatgccattttggagtccgtctggcgatattagctggcaaggtttagggagggttttgtgctgtgctgtggaaagtttgatgagcggctgcgtggacatgtgacaagtacttggaaatagacagtgaagagaatttagcttaaaattggtacaggccatgaaccagggagcataagggaaaaaagggagataaggcagacagagcttgtatttcgtattatccctaataacttaagttcatttatggtagaaactggcaagttccaggtaaaaagtcaagtgtcctgctttattttgtaacctagaacgacttgtagaatctcctacttgttaactagagcattggtttgattaaaatgtgtagttgttttacatttttg

SEQ ID NO: 3665 - DNA, 1096 bp, Zea Mays
ataaaaactaccgctctacttggcctttccgcgatggctgagactagggtttcagtggcggcggttgcacgacatgagggagcgcagcgaagccagcacaaccgcggtggacaagcgtccccatagacgagatccatggcggagcgctggaagagcgtctcctccgtgccgaaggccgagaacgcgcggccgacgggacgatggccggcggcgaagcccaaggcgtcggacctgctcgcccatagccttgactgcagcctcgaccgcaaggactccatcctcgccgccatccacctcctccgccgctctatggccttcgactccacgacatctctctcgtcgtccgacccagccgctccagacctctacgcgtcctctgacaccgacatcgtctcctctggtagcaactcggtagccagtgatccgccgcgtcagggcatcagcgtgccggcgaggttctggcagaaaaccaatagccgcatgctacatgcaagctcaagaattgcaataaggtctgattttggaagcaggagtcgttgcatcacattggatgcacctggctcatcgtcattactcttcacctggcacagtggcacctaacacttgtgcattatgttgagtcttcaagaagaacgtcatcagcaccgaggtggatgtcctgcaagtgcagtgcaacatggcgctctggactattcaagattcaagtcaaattaggctaagatgtttacaatgccgagacgattggaagctgaaatttgtgaatctatggtccataacttctatagttgtttacaagcacaaaagagcaaataatttattgttcccttatgccatatcacactttgatgtttccatgtcacagggggagttctgcttacttcaaaagaacactgacaagctagatttaagacgacgagttcacatggctatagacattatgagtactgtttatctttctataaagttctttgaaattgcaggccaaatcaatgattgatattgttttttgtaattaacaatgattagcagagaattggataaacattctgtgttgtcaagaagcataatgaataaaacagagaagcattaccgtgtc

SEQ ID NO: 3666 - DNA, 855 bp, Zea Mays
  misc_feature (855)..(855): n is a, c, g, or t
gtgtccagtcatattttcaccaaaaagcaggtgttgtagttctgaaagtggtaactcaagggaattattatgtaattacaaagacagaattagcacaaactgtatgccagagcaaccttaaggccatattacaccattatgtgtaaaatgttcgttttctcgaaccacgcaggagagtagcatgtcatttcattaagaaaattatgtgtagaatgtgacctaaataaccagtattttagtactgtttcagggtgtaaagtcatgcacgagtgttttgtatgcatattggttaatgtctattagaaaccacaccacatgattatgagttatgactacagatttttttccagctatttgcactatgggttgcttgctgctagagcagaggtcttaaaatctggcaatggcaatggttacaacaactgtatgttagaaggatatcaagggcaatataaatatggctctgaaacatttgaagcctcagcttcaccttctggtgcaagttattcaaaatgcaagaatgatgttgtgaaatctcttaaagtggatgaagcatgtacccacctgaaatgttcttttggtggcatttggaatggtggcggtggtgctggacagaaaaaactttttgtggcatcgtttttctttgacatggctgatgaggaaaatggaagtcatgcgactaagaggggcacgtacgacgagaacctggtgaacggacagattgcgcagcaattgacagggactcatctggttgccatctttctgtgagctcttgatgttgaacctctacgagtcatgcacgcaacatgtttcatactgttgttagtcttggtcatgggctcattgcacttgatn

SEQ ID NO: 3667 - DNA, 1063 bp, Zea Mays
  misc_feature (1063)..(1063): n is a, c, g, or t
cgcaggcaagcgctccgatggcaagcagtggcgctgcagcgtgccctccatgcccgacaagaccgtctgcgagaagcactacgtccaggccaagaagcgctccgcctcctccgcgctccgtgcctcgctccgccgctcctcagcctcctccctcgcgcccgccttcccattctcctcctcctccgccgctcgcctccgcgccgccgatgacgaccctcccatggcggtcgcgaggcccctctacggcagggtcaccggggaggcggtgtacgtggctgaaccggtgccggtgcccgcgtggaaggggtcgcctacgaagggctgcctcggtgcaatgcggatggtggcaggaccacggcgtgctagtcggcagaggcccactatggtttcctggtggcagcgctgaagggataaggagttgccactagtgccggaaggctgggggtgtcatctggtgtactagctgtgacaggagaggctactgtgccagatgcatctccagatggtctcaactctcaagtcagtaccagtagcagagttgaatgtttggtaatttggctatttgcactatgggttgcttgctgctagagcagaggtcttaaaatctggcaatggcaatggttacaacaactgtatgttagaaggatatcaagggcaatataaatatggctctgaaacatttgaagcctcagcttcaccttctggtgcaagttattcaaaatgcaagaatgatgttgtgaaatctcttaaagtggatgaagcatgtacccacctgaaatgttcttttggtggcatttggaatggtggcggtggtgctggacagaaaaaactttttgtggcatcgtttttctttgacatggctgatgaggaaaatggaagtcatgcgactaagaggggcacgtacgacgagaacctggtgaacggacagattgcgcagcaattgacagggactcatctggttgccatctttctgtgagctcttgatgttgaacctctacgagtcatgcacgcaacatgtttcatactgttgttagtcttggtcatgggctcattgcacttgatn

SEQ ID NO: 3668 - DNA, 1291 bp, Zea Mays
gttcatagatgccagtcctcccctccccaaaacccagcacaagcaagggaagggagggcacctctaggctccagccatggcgcagcagctgctgctcctcctccccgccccttccagaactttcttgaaggccctcccctctccctttctctcctacctcccccggcgccaccttgtccccgttaccgccgttcccgtagcacccggcatccggcggggcctgctccggcttggtcgaagaactggagattgccaaggagaagcagccgcatagcaggcgcgccaatggcatcttctggatcttgctgctcaatttcggcatctacatggccgaccacttgttccagattcggcaaataaaatcactatacctgtatcatgcattcccttcatggttccagtttgtgacatcaacattttgccatgccaactggaatcatctttcaagcaatttattctttgtgtatatctttggaaagcttgtcgaggaggaagagggtaactttgctctctggatgtcttacattttgactggtgctggggcaaacttgatttcatggctagctcttccaacatcctctgtgtcacttggagcatctggtgctgtttttggccttttcaccattagtgttctagttaagatgtcatgggactggagaaagattcttgaagtgcttatccttggacaatttgttgttgacaaggtcttggaagcagcacgtgcaacaacaatcacgggccagtcatttcaagtgaacaacgtcgctcatgtgtcaggtgctttgattggtgccgcgttggtgtttctggttagcagaatccctttttcatccaatgatgataatccaaaggcaacaaaaagagtaaatagaaaataaagatttgtcaacaacattatcaacctaacgtattactatcaatttttcattcattatcattccttcatatgatagctaccttttgaaaattcagttgtaacatttctgatttaaatgaaagatacatctgaaagttcagtgccggagtataaagttcgtttgtagaccaatgaccaagtcgattttaggttggacgacgcccaaaatttgttcgcacacgaatcttgtgccttcatcgatgagtgtgatactcaagatatggtggagtagtagagatgaaaatggatggaaaaaaatgggtttcgtttggtattgtatcccgttttaaccaatctgtttttgtatttgtcgaaaaatgtgaactggatggtatattgcaggaacaggaatgagaacaattaaatgttttttca

SEQ ID NO: 3669 - DNA, 407 bp, Zea Mays
aaatcacactccgatagcaaaaaaccaatgttgaacggattataataataaaactccaattacaatgttcaggatactattttttagaagcccagtcttgtcttgatgatacctggttcaaaaagctcgtcgggaagaggagcaaaacaaaccctatctaaaccgcggcggactcttcgtccagcaaggtttcccatccagatccggccacgccacttgctcctcttctccgccacaccgatggtgtacgtggattcctgggacgagttcgtggagcggtccgtgcagctcttccgcggcgaccccaacgccacccgctacgtgatgaagtaccggcactgcgaggggaagctcgtgctcaaggtcaccgacgaccgcgaggggcaagcatcttatgtagagggggt

SEQ ID NO: 3670 - DNA, 886 bp, Zea Mays
tttctttctttgtaaaatgtggtgctggaactgttcagggctagccatggctggacctgctgttctcaatgagcgtatcctttcttccatgtcccagaaacatgttgctgctcacccatggcatgatttggagataggaccaggggctcctgaattcttcaattgtgtggttgagattcctagaggcagcaaggttaagtacgagttggacaaggcatctggtctgatcaaggaacaagttgtccctgggtgtttcctgcgagctcgtgctattgggctcatgcctatgatcgatcagggcgagaaagatgataagattatagcagtctgtgctgatgaccctgaattccgtcactacacggacatcacggacctcccaccgcatcgccttcaagagatccgccgcttttttgaagattataaaaagaatgaaaacaaagaggtcgcagtgaatgagttcctgccagcgaaagatgccatcaacgcaatcaagtactcgatggacctgtatggctcatacgtcatcgaaagcctgaggaagtgatctccagctgcttgattgtggttgtggatgctacaccattttctcaacagctcatccagagtaccgtagtacagacttaacacgaacgaactgtaatcgtgaccaagggatgctattaccttctgctcatgttgaaacaatcagcagtgcctttctttccattatatgccatgtcgaatcaaggcaacttggccctgaaatctttgtggtcaagttaaaccagcactttgacagaacaaggattgctggatgcctggattactgttacataaatgaccattactgaacttcatttcttgctcttatcttttggtgagatgcccagttctcatccgatgcata

SEQ ID NO: 3671 - DNA, 1036 bp, Zea Mays
tgtttctttgtactaccactactgcactacaatcgtgtatggtttctttctttgtaaaatgtggtgctggaactgttcagggctagccatggctggacctgctgttctcaatgagcgtatcctttcttccatgtcccagaaacatgttgctgctcacccatggcatgatttggagataggaccaggggctcctgaattcttcaattgtgtggttgagattcctagaggcagcaaggttaagtacgagttggacaaggcatctggtctgatcaaggtggaccgtgttctttattcctctgttgtttacccacataactatggcttcattccacgcacactctgtgaggataacgaccccctggatgtcctcatactgatgcaggaacaagttgtccctgggtgtttcctgcgagctcgtgctattgggctcatgcctatgatcgatcagggcgagaaagatgataagattatagcagtctgtgctgatgaccctgaattccgtcactacacggacatcacggacctcccaccgcatcgccttcaagagatccgccgcttttttgaagattataaaaagaatgaaaacaaagaggtcgcagtgaatgagttcctgccagcgaaagatgccatcaacgcaatcaagtactcgatggacctgtatggctcatacgtcatcgaaagcctgaggaagtgatctccagctgcttgattgtggttgtggatgctacaccattttctcaacagctcatccagagtaccgtagtacagacttaacacgaacgaactgtaatcgtgaccaagggatgctattaccttctgctcatgttgaaacaatcagcagtgcctttctttccattatatgccatgtcgaatcaaggcaacttggccctgaaatctttgtggtcaagttaaaccagcactttgacagaacaaggattgctggatgcctggattactgttacataaatgaccattactgaacttcatttcttgctcttatcttttggtgagatgcccagttctcatccgatgcata

SEQ ID NO: 3672 - DNA, 1229 bp, Zea Mays
ttgtatacttgcgatatcgtacatatattcgcacaccaggcaccacacacgctagcaagctcgcgcagttgcgcttcccacaaccatggcggccgtcacgttctcaccgccgctcctcctggccatccttctcatcctcaccaccgccagcacaactcaatgccacggtcacaagagccagcgccaccacaccggcggaactagagtggcccaaaagaccgccgcggcgggagccagcccgccggccgacactgtccaccacgccatctgccacacgacgccgcatccggtctcctgcctgttggccgtggcctcgcacctcggcgccgtcgccggcgcgaaggcggccgaggcgtccgctgtctctgtgcagctcctcccgccgaacgtgctgtccgtcgcgctggcgtccctcaacggggcggagtcggcgctgtcctcgctctcgccggcgctctccgccctctccgcgccggccgcctccccggcgggcgcctcgctccgccgcggcgcggcgcaggactgccaggacctccacgccgccacgctgtggtcgctgtcgcgctccgcctcgctgctcgcggcgcccggcgagagcctcccggccgtgcgcgcgcacctcgcggccgcgctcgccaacaaggccacctgcctcgacgggctcgccggcgcgtccggcccgcgggtcggcggcctcctcgcgtccctcgacgacgcctacgagcacgtgtccaactcgctcgccctcgtcgccaggcgcggcggcggcgtgtctgctgctggcttcgtggacgtcgtggcgaagacaattcacaaccggcggctgctccaggacgacgacgacgacgacggcaacggaggagacgacgacaacgacaacggaggagacgacaacgatggcggggctgacaacggtggcaacactgggcagccggcggcggctacggtgatcactgtggcgaaggatgggacggggaacttccggaccgtgggggaggcggtggctgcggcgccgaacaacagcgaggcgaggacggtgatccgcgtgaaggccgggacgtacgaggagaacgtggaggttctgccgtacaagaaaaacatcgccctggtcggcgaagggcgcgacacgacggtcatcaccggcagccgcagcgccgccgacggctggaccacctttcgctcggccactttcgttttctgagttcaggaggtaagggacacaacacgcc

SEQ ID NO: 3673 - DNA, 1329 bp, Zea Mays
ccgaccgttttcattgctcacactgctgtctccgttccatcccctacgagatctgccccctcgccctcgccctgctccaatccccatctccttgcggcccgatccaccctgctccaatcccccggcgatggtcgtgtgcaaatgccgaaaggcgacgagggtttactgcttcgtccatcaggtccccgtctgtggcgtgtgcatatgcttcccggaacatcagctatgtgtggtgaagaactatgctgaatgggttgttaattctgagtatgactggccacaacactgttcgtcttgcaattctgttctcgaaggtggaactgaagaaacaacacgattgggttgcttgcatgtggtacacaccaaatgcttgatatcacatatccaaagttttcctacccaaacagcaccagatggatacgtctgcccctcctgttctgcacccatatggccaccttctagcattaaagatacaggttcgcgccttcacactgaactgaaagaagcgatagtccagactggaatggagaaaaatgtatttggaaatcattatgtgacaatagctaaagctgatactcagacacctcctgcttttgcatcagatcctctcaaaactttatccaatcgtgatgatagagaatttaatagtgcaaatgcagctaaagatgctgctttgccatcaacattacattctgggatgtactcttctgctgtaggatctgagacaactattcatgttgatccagaaattgttgaaatagagggttctagtcctgtatcgacccaattttcagtgcaggactccaacttcatcaggagtccaagcccacatggggtacatttcgtcacaaatttctaaggatgctgctgccgttctggtccagtgcactgccaacgctaccagtcacagcaccatcaaaaaaagagagtgatgctctagaggggagtcgatcacgccatcagagatcatcaagaatggatcccactaagatcttacttgcaatggctatcatttcactagtataatcataagatatggtgttggggcgaaggcgaagacgccacccttcgctcatgccttcgccgacgccacccttcgctcgatgccttcgccgtcctcgctgcatcaacggagacaagacaacgggcagactcacccttcgtcccgtacgtcaccggacgaagacctgtgacgaggtcgtctcatcttgcgacctcgtccagcacggaggcccacgtgtgatccggcccattgtaacaggccctgtgtggccgctgcgcattacgggcttaatttgtaaaggcatccctgtaattacggtctgtaac

SEQ ID NO: 3674 - DNA, 1405 bp, Zea Mays
ccgaccgttttcattgctcacactgctgtctccgttccatcccctacgagatctgccccctcgccctcgccctgctccaatccccatctccttgcggcccgatccaccctgctccaatcccccggcgatggtcgtgtgcaaatgccgaaaggcgacgagggtttactgcttcgtccatcaggtccccgtctgtggcgtgtgcatatgcttcccggaacatcagctatgtgtggtgaagaactatgctgaatgggttgttaattctgagtatgactggccacaacactgttcgtcttgcaattctgttctcgaaggtggaactgaagaaacaacacgattgggttgcttgcatgtggtacacaccaaatgcttgatatcacatatccaaagttttcctacccaaacagcaccagatggatacgtctgcccctcctgttctgcacccatatggccaccttctagcattaaagatacaggttcgcgccttcacactgaactgaaagaagcgatagtccagactggaatggagaaaaatgtatttggaaatcattatgtgacaatagctaaagctgatactcagacacctcctgcttttgcatcagatcctctcaaaactttatccaatcgtgatgatagagaatttaatagtgcaaatgcagctaaagatgctgctttgccatcaacattacattctgggatgtactcttctgctgtaggatctgagacaactattcatgttgatccagaaattgttgaaatagagggttctagtcctgtatcgacccaattttcagtgcaggactccaacttcatcaggagtccaagcccacatggggtacatttcgtcacaaatttctaaggatgctgctgccgttctggtccagtgcactgccaacgctaccagtcacagcaccatcaaaaaaagagagtgatgctctagaggggagtcgatcacgccatcagagatcatcaagaatggatcccactaagatcttacttgcaatggctatcatggcatgtatagcaactatgggaatactctattaccggttgtcacagcgaggtctttctgaaaccttcttagaggacgagactcagtaatcttgccttcctgtattgcgttgttgctgattcaaaggattttaccctctgtattttttttcgtttaccctttgtgggcctttttggtggtttgaaggtggggtagtggttagtagactctttctatattccgattcatgctcatgtttatgtgactactataatggtatatacaatattgtattatctacagctgagatcatagaaaatttaacccatggacagtttaaacctggttagctcatctaatgtagtatttcctagtttctgtttattcttgtgcaagttcagattaagtttaaat

SEQ ID NO: 3675 - DNA, 954 bp, Zea Mays
ctttgatttcctttgtcgcgggagggtggtgactggtctggtgtccctttagaggctctcaggaccagcaaacgtgaaatggcggtcgccacgcggggagttgagagagagattggttccctgcaaatggaggagaaaaagctggttgcagagataaagaagactgccaagactggaaatgaggctgcaaccaaaatattagctcggcaacttgtcaggctgaggcaacaaatcctcaatttgcaaggcacacgggcacagattcgtggagtagctactcacacacaggcaatgtatgctggcacttcaatctctgctggaatgaaaggtgcaagcaaagctatgtcagcaatgaacaagcaaatggaaccggcgaaacagataaaggtcatgaaagaattccagaaacaatcaacacagttggacatgacgcttgagatgatgtctgatgctattgatgaaacacttgacaaagatgaggcggaggaggaaacagaagagcttacaaaccaggtccttgacgagattggcgtcgatgtggcttctcagctctcttcggctcctaaagggcgcatcggagctactaacaagaaagtcgataatggtcaagcacgtcctgcaaggaacgtggcggctcctgctctagaaccctcctctgctgaagttgaggatctggagaggcgactggcatctctgcgccgtacctgagtctgagctgttgaagaaagaacttgtttgtaatactagcagttattcatctatatatgtaaagttggtttatatgtgtagggaaaacagcgagctgcacatgatacggttgaacctacttaatgttttatttaatttggaagttgactgcacagtgaccctagtcgctagtcccataagccgacggaactaggcgaagccagggcttagggtcacgaagggtttagggtcacgaaggattttaat

SEQ ID NO: 3676 - DNA, 2508 bp, Zea Mays
cgcatccgctacgcgcacacgagctgtgcggtactgctcgctcatgcagccactgccacgctaccaccgcttcctttcctcttcggctgctccgcctcgcctcccagttcacagcccctcccaggctccgaatcggcggccacttctcattcctcacttccgtcctcgcgcaccaccccctccatccgttccggatggtgccttcgaaatcccgtccggcgccctagcgtagctcgggctcggccaggctccgggcccgccgcgccgttccgcagtccagctccacctccagatcttttcttgagtttaaggaagatgcttgcctttatttagaaggccctttttggtacgtcagcagtgttctttcctataggagtaaatgccattccgtagcatcgtgcgtgatgtaagggatggtttcgggagcttgtctaggaggggatttgaggtcaggtttctgagtcatcgcagagggaaatctcatggtgctgtccatgagctgcacgacccagtgcttgtggtacagagtagctgctgggctagcttgcctcctgaattacttcgagatgtgattgagaggttggagaccagtgaggatacatggccttctaggaaacatgtagttgcttgtgcagctgtctgcagaacatggagagagatgtgtagagagattgtcaagagcccagagttttctggaaaaatcacttttcctgtttccttgaagcagcctgggcctcgagatggaactattcagtgttttattaagagggatacatctacccaaatctacagtctgtaccttagttttagctctgaatatataatatcaataaattctggtgatacatctaggtgtacaagtaacaacacatacattgggaaattaaggtcaaatttccttggcacaaaatttgtaatatacgatactcatccgccatacaatggaactagtcaaacagtggcagggaaaacaagtcagagattctactccaagaagggatcaaccaaggtttcttgcaggtggtacagtattgcacaaatctcatacgagctgaatgtcttgggaactcgaggcccaaggcggatgaactgtgtaatgcactccatcccagcttcatgccttgaggctggtggcagtgtcccttgccagccggacagcattgcagcccactctgttggcggatcattcagcagtgtgtccttgtcaaagtcatcgactatggaccactctatgcatttcaccagttcccggctctctgatgccataacaggagatggcattgtgaacagaggccaggcattgaatgatgctgacgatgaagagtgcaaggacatgcctttgatcctccgcaacaaggccccaaggtggcacgagcagcttcagtgctggtgcctcaacttccggggccgggtgactgtcgcctcggtcaagaacttccagctagtcgcggcgacacagcctgccgccggagccctgaccccatcacaggcagccccgcagccagctccgcctcctccgccggaccaagagaaggtcatactgcagtttgggaaggtcggcaaggacatcttcaccatggactactgctacccgctgtcagccttccaggccttcgccatctgcctgagcagcttcgacaccaagttggcctgcgaataaatcctacctacaattctggtacctaccaaataatcaaaaacactgattgtcgtggtgttcgtccaagaaccgagtttagctgagacgccattgggcaccatgtgctggtgccttgttaactcagaaacgcgtgggggctgaatctgtttcagcagcttccttgtgataatctgtagctgctgcttcgctgctgttgtatcctatgctttcatttctttccggttccgctgtagcttcttaccccccggtgacattagttcggtacccgtatctggatatttttttagccttcttcgttggattgttcaccggtgatggcatgtattaacagagatagttacatacagatgtaatgaattcaggtctggataattttgctttcggttgctattggaaaaggatgtgatggctgctgtcatctttggactgctgatgtttcttttgctgtcaccttcagcagggtcatcagggaggtgactgatgaggtgtttatttgtttgttttgcttcaaagcgaggcctttagcacggacttttcgcgacgagtaaataaagctacacagataattgcaggcggagagagtaaccaaaatcttggggcgcaggtcgggagaaagatccgaaaggccaatgcaaatgcgatacagacgcacgctagttgctaatgctagctaccctcctcggtgctccccttgctcctgtggcgtgcgggaaaaaggcaacttaacaccagcatcgtccgaggcagcagcaacggacgactccacaagatcaaggttttcgtgtcttctttatcaacaactcacagcagccaacaacttccatttacatcaaagcaacagtgcccag

SEQ ID NO: 3677 - DNA, 1420 bp, Zea Mays
atggcctattgtaagcctctcattttactctacagctattcatcgttggggcctttcaatttccagaaccgcaggcagcaggataccgtagctcctctgcatggcggctaccggatacccaaatgccgccgcatggacacggccagccggaacacccgacaacccggaccagaacagccgcgtcgaggcggccctcgagacccccggccccgacccatcccaccaccacccccacccccacctcgcctcccggatccgcacccgatgggcagcctcggcggcgacgcggagccgcagggcgcgaggcggcggccgcggttcctgtgcctgcacgggttccgcaccagcggcgagatcatgcgcaagcaggtgctcgggaagtggcccgccgacgtcacggcgcgcctcgacctcgtcttcgccgacgcgccgttccccgccgagggcaagtccgacgtcgagggcatcttcgaccctccctactacgagtggttccagttcgacaaggtccgccgccgcgtacgcgcacgcgcatccgcccgcccattacccgcccccctctcctccccgatctcgtcgtcctgctgatttcgtcaaactaattgtggtttccctagtttttttttgtggtgcgcgtgtcgctggctcgtgcgacgcacttaccaacttgacctttataagcacttattactaccaaattccttatgtactgtacaacgcaaaacagagttttatggagtacaggaatttcgacaagtgcctggcctacatcgaagagctgatgataaaagacggccccttcgacggactgatgggtttctcccagggttccattctgtcggcggcgcttccggggctccaagaacaagggctggccctgactagagtcccgaaggtcaagtacctcatcatcatcggtggcgctaagttccagtcacccacggtggccggcaaggcgtacgccaacaagatcgcatgcccctcgcttcacttcatcggtgaaaacgacttcctgaaagtccatggtgaaaagctgatagaatcatgcgtggacccattcgtaatccgtcacccaaagggccacacagttccgaggctcgatgacgagagtttagtggtcatgcaccgtttccttgagaagattgagggggaggtacttgagtattcgtccaaagatgtcaacgaaaccgaagtgggcatgtgataaagactttagaccattagtacttgatgttggcgaaaaggctatacttgtactatttatttacagaatgaacatgtgatgtaacctcgattttcatgaggcatgattatgaaaaatacagaataattgttttatattctatattacttgaatcagaatatctatgtacctttggttcatgacgctgctctaggttgctcagacagtacgtgttgt

SEQ ID NO: 3678 - DNA, 1653 bp, Zea Mays
aaaaaaaacccggccaataaatacagcggataataaaacccgcagcaaaaatcgcgcaccttcccctcccctacccctcgtctgcccctgttacctcgcgcggttggctgcgccagcgaggctcgtatcgccctcctcctcggctcctcgcgccgcttacttctattctattttgcccggtcccataaattcgaatccaaacgcgcgaccatcgccgctgcggccgtgggaaaggaaacacagaaaaaggacaacgccgtcgtctcttcctcgcaccagcctcccgctagggtttcccctcttctcggtggaggcgccgcgcctccgggacctggatcctatcaggtccacgctgatgccagcgaggtgcagccgtctttgattcccctcctgtagctgcatcctcatgccgaccatcacgcactacgtgctggatcccttcctcgagacagggtcgcctgcgcaggccgagaaagccacgcccaagccgccgccctcgcctccagacaaggccacacctgtaccggtggctcctattagggcacagacgtcgccggcatcactctatgccacgcctgagagcaccaccttgcccgactcaccttcctcgttccccgggacctggtcgccgtacattatcaaccataagaggcggggggcctcccttgccaagaccgttcctcagggtgacgttggaagtgagggcagccagccaaagctcccagtgatactgcctgctctgcctaaagggggtgaacccactgcagtggaggagcctgagtttgcgtttcagcaatcagggaatgatcaagctgaaggtgacagtggtgtggacgaggcccccatcaatgggaaaaatgaaatgctgctgaagggcaagggacctgtgacagccaaaaatgagcacgagcagcctgagtttgagtttcaccgtggaaatcttgaagcactagtgaggcctgttaatgttggaaggcctttgattggcggagcacccaaaaatgatgagagtgacaccttccttgaacttcaggattccatgagtgtggctagcaatactgaaactgatgatgctggcacccaagagtggtggtggaaaccgagttcccctcttgggatctctgttggcacaccctgtgctgaattctatgatgcatttgaagaaatatcaagtgatggtggaactcgatcttcacgggccatggatgatgacctccgtgaaatgaggttaagcctgttgaccgaaattgagaggaggaagcaagcagaagaaacacttgagatatggcagaaggaatggaagaagctgagtcaccacctatcacatgttgccttatcacttccatctccaagtatagctgaggatactgatgattcaagcgtcgatcctggtgctgagttgtgccagcaaataactgtttcacaacttgtagctgctgctatttcccaggattttgctcgtgctgaagttgcttcagagatggaagccgtgattgccacaaagaacttcgagattgcaaggctgtcggatagggtccagtactatgaagctgcaaacagggaaatgtcccaaagaaaccaagaagctatcgggcgcgctccagcctccaggccgccgctgctccaaccctcctgcaccgcccgtccggcgcc

SEQ ID NO: 3679 - DNA, 2614 bp, Zea Mays
cttggctttccttcctgctgtgcaaaaccgagcacccaacaaaccctaacttaccatttctatttggatctgatctaggttcctaccatttttaagaaaaaagatcaatggaggcagctttgtcattctccaaggacagcccaccaatttcgataatttgtgctgcaaagattgtgggtctacccctaaccatcaatcatagcctcgctgctggctcggcacccaccctacagtttgcttctggagaatcactccatggtgtcaacccaatcatcctctacattgctagaggtgcatcaattgcctccttatctggaaagaatgatattgagtttgggcatgttgttgaatggcttgaatatgcccccaccttcctttcaggctctgaatttgaaaatgcatgcttatttgttgatggattcttggcctcccggacctttctggttggtcatggcctgacaattgctgacattgcagtttggtcaaatcttgctggaattggtcagcggtgggagagtctaaggaaatcaaagaaataccaaaatcttgttcgctggttcaacagcatagattcagaatacaaagaggcactgaacgaagttgtggctgcatttgttgggaaacgaggtattggaaaatctcctgcacctagccttaaggagaaggtacatgactcaaaggacccatcagctccagaagttgatctccctggtgcaaaagttgggaaagtctgcgttcgttttgccccagagcctagtggttacctccatattgggcatgcaaaggctgcactattgaacaaatactttgctgaaagatatcaagggcgcttaatagttcgatttgatgacacaaacccttcaaaagaaagcaatgagtttgttgagaatcttttgaaagatattgagacgttggggatcaaatatgatgctgtcacatacacatctgattatttcccaaagctaatggaaatggctgagagtttgataaagcagggtaaagcatatattgatgacacaccaaaggagcaaatgaggaaagagaggatggacggtattgagtcaaggtgcagaaataataccgtggaggaaaatctctcattatggaaagagatggttaatggaactgaaaggggcatgcagtgctgtgtacggggtaaacttgacatgcaggatcctaacaagtcactcagggatcctgtttactaccgctgtaatactgatccacaccatcgtgttggttcgaagtacaaggtctatccaacatatgactttgcgtgcccatttgtcgatgcattggagggggtaacccatgctcttcgttccagtgaatatcatgacagaaatgcacaatattatcgaattcttcaagacatggggttgaggagagtggaaatttatgaattcagccgattgaatatggtttacactcttctaagcaagcgaaagcttctttggtttgtacaaaacaagaaggtcgaagattggacagacccacgttttcccactgtccaaggcatagtacgtcggggcttgaaggttgatgcattgatacagtttatactccaacagggtgcttcaaaaaatctgaatctcatggaatgggataaactctggacaatcaacaagaagataattgatccagtgtgcgcaaggcatactgctgtgctaaaagaccagcgtgtcatctttactcttacaaatggtccagaggagccatttgttcgaattttaccaagacataagaaatttgagggtgctggaaagaaggctacaacctttgccaacagaatttggctcgattatgctgatgcggcagctattagcaagggtgaggaagtaacccttatggattgggggaatgctattgttaaagagatcaaggtggagagtggagtaattactgaactagttggagaactgcatcttgaggggtctgtgaaaacaacaaaattgaagatcacatggctagcagatatagaggagctagttcccctttcattggttgaatttgattacctcatcagcaagaaaaagctagaggaagacgaggacttcctcgacaatctcaacccttgcactcgacgggaaatcccagcccttggagatgcgaacatgaggaacatcaagcgtggagaggtcatacagctcgagaggaaaggctactataggtgtgatgccccttttatcagatcgtccaaaccggtggtcctgtttgcgatcccagatggcaggcagcaggcctcgcttagctaggcatggtgaccaccttttgggcacatggaattcctgagttggcgatgagtattgttgcattgtacactttaatattgtactgtgattaggctttactcgcggtggatgtctttcaccgctagatggccagaggcatatcctgccaaccaagcagagcagccattttgattttggtctatgatacttttacctgcgcttgaatattcctatacttctctagcagggccttcgttattttgccgttagattatttttactgcgtcggctgctattttcttttgcccaggtattaatcaatcatggacgggcatggtatgtagctgtgatgagtaaatgcatgtggggaccctaaggttggg

SEQ ID NO: 3680 - DNA, 1282 bp, Zea Mays
tgcaaaatgtaactggatgtcgaaacaaaaaccagcagagtactcctatataaaacgccgtactggccacatcgtcgatctcccccaacatgttgttcaggctccacacttgacagggcacagggcagggcgccaggagacggggagaatctttcgccctgaaaaaagagcaaagtgtcagccctttccccccggttcctagttttggtactactacaggctcccgctgcatcatccccaacgaaccagcagagctcgcaagcaacaaaagagaaggacgaagcaggcgcagccgccacacggacacgcagcagagcatcgccgcagcggtccagaggcatgggggccgccgccgccgcaaagcacgccgtgagtccctcgccccgcgtacggcgtacgtgtacgtaacgtaacctcgtgagagccagccaaccgtctctggccgccgcaccgtgacgttttcactgcgaggaattggctgaattctcttgtgtactccaagtttggttccgttttggttgagttctccagcgctctgttcttgaagatggaaacggcaacacactgacaggaacttttctggtttctcttacttgcagttgcttttctggtttctcttacttgcagttgcaggttgtcgcggcgggaggagatgctgggcaatcgagcttcagcgccaactcaccccccaccaccggcgccgggttcgtcgccctcgacgtcggtgagctctcgtctctggccggcgacgccggccctccgggcacgcccatcgcgccgccccggacacccagggtggtgaggtcgctgtcgaggaagggcgacaggaagccggccgacgccgacgccaacgccaccgccggtggcggtagagagcggccgcagctgttcgtacacgtggctgccggcgacctcggggacgcgcccggcagcgcccggctggtcgtccacacgccgctggccggcacgcccggaagcaagtcccggcggttcggaaggcgggcggcgccgtggctcgatccccgcagggtggtcttcctcttcgccacgctccccaaggacacgttcgtttcgttgcggcagaacgatggcgatggcgatggccatgctcgcagtggcagggttgcagagcgcaggacggactgcccgcgtcgcaggttttgtcggccccagcctccgtcgggttgccgttgcagagctagctcgggggctctggcctctcggccgtcgtcgtcgccttcgcaacagcgacagcagtgataaataaggacggagaccgacg

SEQ ID NO: 3681 - DNA, 2102 bp, Zea Mays
attatacaataccaaattgtggatttgatgaaagttattgatgtggtacatgtctgtgaatttcttttgaacgtggtcaaacatagaaaaaattaacttaggacagaactaaaacaccttacatttgggtctgagggagtatattttagttgttcatacatttaatgttcatttttgtatgatatatggttcaacaacaccttttactgacataaggtactacaaacagttacattcatgacatcaattcagaatgagatgttaaaacatcgtgattgaatgccaaatccttcattgtgtggaacaaagcaagcagtacatatgtgtcttcttgtcagaaattatcttcacactacagctgaatgtaaggctctttctttcagaggattccccttctcaagctggattaagaccacaggacaatctccaagcaaaaggctcatggttaatgcatgcagctggcccaagctcagatgattctctgccacctggcttcgaatcattgcagccaaccagcgatctcaaaattgacatgtcccaaatcgctcttattaggtggagatgcccaccacagatattgtataatcctgattggtgtgtcgctgctggagaagaaagtgaggaggttgccttgcagaatgagaggatgtttggagcactggaggctatatatccacgaccatcgaacattcctccaaacccattggttactcctgatgtgaaagactcccagtatgatgattcccgaacccaattggttcctttgctcccagttgaagaggatgatgcctctgaccagttcgaagaaccacctgttggtctaccaagtagttaccaccagtcagataagtatgatgatgcaatatccagggtcccacaagcctcagatgctctctttaccactgcacaacagcagccgaatggttccatcaacacaacaaggtctggtgtccccgccgaagcagacgtagtggctgctgcatctgctgcttacactgcaataatgcaaagcaaccaaatgggaaacatgattgaccaagatctgctcatcaaaatactaagtgatcctgcccaaattcagaggctaatgaaagaatatggtgcgcttaaacatgaacagtcaaccaacagttctgtggcgtcaatggtgcaaggtccaccaccccagatgacagctagtgtccccgtctctatcccagaccgttccaatgcatttcacaacataaaccctaagctgccgcctccacctgttccgaatcgtctacctccagcttcagttaccatgaatgcaccagcgagttcaagtcaagcaattagctttccaagtggcccaaccaggggtttgaactattaccagaacctgatccatcagcatggaggggagaggcaggagccacttcagcagcatggaatgcagtttgcaatgcatcaccagcctcttgcctcgcaggccagtgccgctgatgttgtcagcagtggtgctatgccagctagggataccaagcaaaggcctacgaagccttgtgcttacttcaacagcgcgagaggatgccggaacggtgcgaactgcacgtttctgcacgatgtgtctgccgcgaggaaagaacagtcaaagggttccaaaaggattaagcttgacagcagaatagccgggcggtattgaggggctgctgccgccggttgatttttgactgttcatttcgccttttttccccttcaaaaacgtttcagtaaatattgcgccccagctccttgtttctttcacttagccaatttctctttgttgactaaatgaggtgttttagaagaaagaaaaatatcccacgatttattggagctatgtcgtggtagctacgccgtggtcatttgtgttggttctgctttttttttttgtcaagaccgagaaatgcatagttgcatactttaacatatagaccttaaataaaaagaacataaaacgcgaaaacagagtcgtttgtcttgtgtcttggtccatgggagccgataagctgttggaaacttggaatatcgttttgcttggtgcatctctattttgcccgacttggtgcttgtaagagcaactccaacaactcctaagaaaa

SEQ ID NO: 3682 - DNA, 1682 bp, Zea Mays
gtcgggccactatccctctggcctcgtctcgtcttctcttctcgcgaatggcggcgctgtgcgatctccgtcgctgccccctccgccagtgatttctgggacgcgcgacgaacacgagttggaaggaggtggtcgtgctttgggcggcgaaggacctgggcgctagcagcctcagaccctgacagatcacaacctgacagatcacagataatgggttcttgggaggagaatgttaggcaatttttgttggaggaggaggaagatgatgatgaactattctttgttattctccctgctataatcccatacctctcggaagagaaaagacccatccacacatcctccctcaccggtgctaaaaaggttaaagaaattcttgaagggcatgagagctggtgcaaatctgagtttagaatggaaaaggaaatattcaaagccacgtcaaattttcttagaagggagaatttactacgtgacacacgaggagttagtgttgagaagcaacttgggatgttcatgtatatgatctcccacaacgccagtaaccaaatgctacaaaaggcttttcaacacagtggagagactatccatcgaaaaatatctgaagtttttgagatagttcccatactaactcaacgatttgtgaagcttcctagctcagttcaaactcatgctaggattgcaacagattctaggttcatgcccttttttcagaattgccttggtgccattgacggcacacatgtatccatcactatcgcagaagatagggcccctccatatagaaatagaaaaggaactctttcacacaatgttatggtagtctgcgactttgatctcaattttacatttgtctcgtgtggatgggaagggtcggcatcagacgcaggggtgcttcgatctgctattagcaaaagatttagtgtgccagaaggaaagttttatcttgtagatggtgggtatgcaaatacaccatcatacattgcaccatacagaggtgttcgataccatctcagtcaatttaggaggagtcgttcatcacaaagtggttatgcaaactacaaagagttattcaatcatcgccatgcaattctccgcaaccatatagagagggccattggtgttcttaagaaaaggttcccaattctaaaagtagacacattccatcccatagaaaatcaaatcaagatcgcagctgcagccattacatttcacaacataattagagggcaaaatggtgatgaaggatggctggacaaccaactagattatatatctccaagccattacattggtgttacttggtacttgcagagtgctgagtggaagcaacatatgaagctgacacggaaaaggaaaatggatgatctccttggttatgtttccctgtcttgtgcatgctgcatttcctgctaccgtgaagaccggggtccaggagagtaggagactgaaagcactgtcgagaagactgaaattatcacattgacatgaagaccaaagccatctcttacctacttatctttgtagcttacgtttctattttattctgtcatgaaaactaaagtcttatgtatggtcattatgtactattttggttctgaaaatatttgtttatgttatgaaaactattggttgaaagaatggtgattacggttttggcttgaaggttcagaaaaaaacat

SEQ ID NO: 3683 - DNA, 1794 bp, Zea Mays
gtcgggccactatccctctggcctcgtctcgtcttctcttctcgcgaatggcggcgctgtgcgatctccgtcgctgccccctccgccagtgatttctgggacgcgcgacgaacacgagttggaaggaggtggtcgtgctttgggcggcgaaggacctgggcgctagcagcctcagaccctgacagatcacaacctgacagatcacagttggagtgacgggcgctaccaaaagcgatcacaggcgctaccaaaagcgacgggcggccgacggcggcattgcagttggagcgagcgagcgcggtgcctttcggacgacactgagcacagataatgggttcttgggaggagaatgttaggcaatttttgttggaggaggaggaagatgatgatgaactattctttgttattctccctgctataatcccatacctctcggaagagaaaagacccatccacacatcctccctcaccggtgctaaaaaggttaaagaaattcttgaagggcatgagagctggtgcaaatctgagtttagaatggaaaaggaaatattcaaagccacgtcaaattttcttagaagggagaatttactacgtgacacacgaggagttagtgttgagaagcaacttgggatgttcatgtatatgatctcccacaacgccagtaaccaaatgctacaaaaggcttttcaacacagtggagagactatccatcgaaaaatatctgaagtttttgagatagttcccatactaactcaacgatttgtgaagcttcctagctcagttcaaactcatgctaggattgcaacagattctaggttcatgcccttttttcagaattgccttggtgccattgacggcacacatgtatccatcactatcgcagaagatagggcccctccatatagaaatagaaaaggaactctttcacacaatgttatggtagtctgcgactttgatctcaattttacatttgtctcgtgtggatgggaagggtcggcatcagacgcaggggtgcttcgatctgctattagcaaaagatttagtgtgccagaaggaaagttttatcttgtagatggtgggtatgcaaatacaccatcatacattgcaccatacagaggtgttcgataccatctcagtcaatttaggaggagtcgttcatcacaaagtggttatgcaaactacaaagagttattcaatcatcgccatgcaattctccgcaaccatatagagagggccattggtgttcttaagaaaaggttcccaattctaaaagtagacacattccatcccatagaaaatcaaatcaagatcgcagctgcagccattacatttcacaacataattagagggcaaaatggtgatgaaggatggctggacaaccaactagattatatatctccaagccattacattggtgttacttggtacttgcagagtgctgagtggaagcaacatatgaagctgacacggaaaaggaaaatggatgatctccttggttatgtttccctgtcttgtgcatgctgcatttcctgctaccgtgaagaccggggtccaggagagtaggagactgaaagcactgtcgagaagactgaaattatcacattgacatgaagaccaaagccatctcttacctacttatctttgtagcttacgtttctattttattctgtcatgaaaactaaagtcttatgtatggtcattatgtactattttggttctgaaaatatttgtttatgttatgaaaactattggttgaaagaatggtgattacggttttggcttgaaggttcagaa

SEQ ID NO: 3684 - DNA, 3017 bp, Zea Mays
ggagcctccgtcactgggcacagatgagggacttgtctggctttgttgagactaggcaacaacttttgtcgttaaagccaaatcaccgcatgaactggattggttttgcggttgctcatcatttgaattctaattcttccaaggcagtagaagtattggaggcatacgagggaacactggaagatgattatcctccagagaatgagcgatatgaacacaatgaaatgctgctgtataagatatcattgtttgaagaatgtgggatgctagacagagcccttgaggaaatgcagaagaaggagagcaaaattgttgacaagctatcattcaaagaacaaatggcatccgtcttgttcaaacttggccgctttgatgaatctgagagcatatacagatccctgctttttatgaatcctgataactacaatgccttggcttatactctgataatggtcaatattctgctgctgatgttgagcgcttaagtgcattgtacaactcacttaaagagaagtatgcttggtcatctgctgtgaagcgtatccctcttgattttctggaaggtgagaagttccaggaggcagcagacaactatgtcagacctctattaacaaagggtgtgccctcactattttccgatttaagcccactgtatgaacatcctggcaaggcaaacatactggagcagttatttcttaaactagaagattcaattagggattctggatgctttcctggatgtccacagaaggagcctccttccacactgttgtggaccctgtttttgatttctcagcactacgacagaagagggcaatatgacattgctttgaataaaatcgatgaggctatctcacatacaccgactgtcatcgatctatattcagtaaagggaaagatattgcaacatgctggaaatttcacagcagcagccgcattagcagatgaagctaggtccatggatcttgctgatcgttatttaaacagcgagtgtgttatgcagatgcttcaggctgaccaggttggccttgccgagaagactgctgtcttgtttacaaaagatggtgatcaacacaataatcttcatgacatgcagtgcatgtggtatgagcttgcttctggggagagctattaccgtcaaggtgatcttggccgggccctaaaaaatttcttggcagttgaaaagcattacgctgatatgactgaagatcaatttgacttccattcatattgcttgcggaaaatgacacttcgagcatatgtttctatgctgaagtttcaggatcgtttgcatgctcatgaatacttccacaaggctgctgctggagctatcaggtgctatatgaaactacatgattctccaacaaaatcttctaaggaagagaatgatgagatatcaaaactgccacctgctcagaggaagaagttgaggcaaaagcagaagaaagcagaagcgcgtgctaaaagggaggctgaagagaaacaagaggatgaaacagcttcatctaacagttcaaaatctggcaagaaacaacatgcaagaccagttgatctggatccacatggtgaaaaattaatccagattgaagacccgcttgcagaagccacaaaatacttgaagcttctgcagaataactcgtcagactcattagagacccatatactttcatttgagctaagcatgagaaagcaaaaggttttacttgctttccaggcagttaaacagctcattaaattggatgaagataatccagacagtcaccgttgtttgataaagttcttccacaagataaacagtcttcctggacctgtgactgattctgagaagctaatttggaatgttctggaagctgaacgacctgacatgaggcaattacatggaaagtccctcgttgaagtaaacagaagtttccttgaaaaacacaatgcttccttgatgcaccgagcagctggtgctgaaatgatgtatctcttagagccaaataagaagatggaggcaattaatttaattgaagattcaacaaatattacatcatcagggcatagtttgcttggtcctgtaaaaacatggcaaattcaagattgtattgatgttcataaattgctggagacagtctttggtgatcagaatgttgcaaataggtggaaggcacggtgcgcggaatattttccgtactcgacgtactttgaaggcatcaagagcgctatttcaacctatgccattgaccatagtctcgagagcccaccagaaaatggaattgcttcaaaccctcatctgaaatcaaaagatggagaacaagggagtttgaatgggactctgcatattgtagatgatttgagcagcctaagcattcggtaatgcacgaacaagttgctgaatggtcacaactggaacacaacattttagaactggagccagtacccaattaaccaaagcgtacacgaacaaggggaacaaagtgctctggtgcaagtagttgtcggcacatcacatatgaagagtatattattgattgggagctgaggtgtccagtcaggttattgtcttggttccagcctgtacctttttgttgccattttgtagacagggaaagaaaaaaaatcttccgtctcaattacggtgaagttgtgacagcgtttgttgcctagcgatatcagggtgtgaccattcgtttgaaacagtgctccctctctttttggactacaaaattttggcacaaagcaggtgtacaaggttaaaccttttaaaactttcatctatttgtttcgggatagtttggtgtgtgggggggtttgtcttgatcctttgtgctactgcaacatttggtcctcgacattgtaaattagttaatcttaaacatagaaactgtattccagttgtcatgacaaataatgatcaatgttaaccctgggtgtttgatctattccatttgggatgcgttgaaaagcatgcattgtcggatttgaagataaaaatccataatgttacatttattaatcatacttgtatagtgacc

SEQ ID NO: 3685 - DNA, 3535 bp, Zea Mays
caacacctcgcatgcctctacggctctacgcctcccgctacacacccacacccaccacggcccaccttccgccttgcgactccaaaaccctccctccttccccttccttgccccgccctagggttcgcgccgccgcgctgaccctgtcgtagccatggggtcctcgctcccgcccaaggaagccaacctcttcaaagtcatcgtcaaatcctacgagactaagcaatataagaaagggcttaaggctgcagattccatattaaaaaagtttccagagcatggtgaaacactatcaatgaaaggtttgacgctaaactgcatggaccgaaaatctgaagcgtacgagcttgttcgacgaggcctgaagaatgatctgaagagtcatgtctgttggcatgtttatggtttgctttatcggtcagatagagaatacagagaagctataaaatgttacagaaatgcattgaggattgatccagataacatagaaattcttcgtgacttgtcccttctccaggcacagatgagggacttgtctggctttgttgagactaggcaacaacttttgtcgttaaagccaaatcaccgcatgaactggattggttttgcggttgctcatcatttgaattctaattcttccaaggcagtagaagtattggaggcatacgagggaacactggaagatgattatcctccagagaatgagcgatatgaacacaatgaaatgctgctgtataagatatcattgtttgaagaatgtgggatgctagacagagcccttgaggaaatgcagaagaaggagagcaaaattgttgacaagctatcattcaaagaacaaatggcatccgtcttgttcaaacttggccgctttgatgaatctgagagcatatacagatccctgctttttatgaatcctgataactacaaatacttcattgctgtgcaaaagtgccttggcttatactctgataatggtcaatattctgctgctgatgttgagcgcttaagtgcattgtacaactcacttaaagagaagtatgcttggtcatctgctgtgaagcgtatccctcttgattttctggaaggtgagaagttccaggaggcagcagacaactatgtcagacctctattaacaaagggtgtgccctcactattttccgatttaagcccactgtatgaacatcctggcaaggcaaacatactggagcagttatttcttaaactagaagattcaattagggattctggatgctttcctggatgtccacagaaggagcctccttccacactgttgtggaccctgtttttgatttctcagcactacgacagaagagggcaatatgacattgctttgaataaaatcgatgaggctatctcacatacaccgactgtcatcgatctatattcagtaaagggaaagatattgcaacatgctggaaatttcacagcagcagccgcattagcagatgaagctaggtccatggatcttgctgatcgttatttaaacagcgagtgtgttatgcagatgcttcaggctgaccaggttggccttgccgagaagactgctgtcttgtttacaaaagatggtgatcaacacaataatcttcatgacatgcagtgcatgtggtatgagcttgcttctggggagagctattaccgtcaaggtgatcttggccgggccctaaaaaatttcttggcagttgaaaagcattacgctgatatgactgaagatcaatttgacttccattcatattgcttgcggaaaatgacacttcgagcatatgtttctatgctgaagtttcaggatcgtttgcatgctcatgaatacttccacaaggctgctgctggagctatcaggtgctatatgaaactacatgattctccaacaaaatcttctaaggaagagaatgatgagatatcaaaactgccacctgctcagaggaagaagttgaggcaaaagcagaagaaagcagaagcgcgtgctaaaagggaggctgaagagaaacaagaggatgaaacagcttcatctaacagttcaaaatctggcaagaaacaacatgcaagaccagttgatctggatccacatggtgaaaaattaatccagattgaagacccgcttgcagaagccacaaaatacttgaagcttctgcagaataactcgtcagactcattagagacccatatactttcatttgagctaagcatgagaaagcaaaaggttttacttgctttccagttaaacagctcattaaattggatgaagataatccagacagtcaccgttgtttgataaagttcttccacaagataaacagtcttcctggacctgtgactgattctgagaagctaatttggaatgttctggaagctgaacgacctgacatgaggcaattacatggaaagtccctcgttgaagtaaacagaagtttccttgaaaaacacaatgcttccttgatgcaccgagcagctggtgctgaaatgatgtatctcttagagccaaataagaagatggaggcaattaatttaattgaagattcaacaaatattacatcatcagggcatagtttgcttggtcctgtaaaaacatggcaaattcaagattgtattgatgttcataaattgctggagacagtctttggtgatcagaatgttgcaaataggtggaaggcacggtgcgcggaatattttccgtactcgacgtactttgaaggcatcaagagcgctatttcaacctatgccattgaccatagtctcgagagcccaccagaaaatggaattgcttcaaaccctcatctgaaatcaaaagatggagaacaagggagtttgaatgggactctgcatattgtagatgatttgagcagcctaagcattcggtaatgcacgaacaagttgctgaatggtcacaactggaacacaacattttagaactggagccagtacccaattaaccaaagcgtacacgaacaaggggaacaaagtgctctggtgcaagtagttgtcggcacatcacatatgaagagtatattattgattgggagctgaggtgtccagtcaggttattgtcttggttccagcctgtacctttttgttgccattttgtagacagggaaagaaaaaaaatcttccgtctcaattacggtgaagttgtgacagcgtttgttgcctagcgatatcagggtgtgaccattcgtttgaaacagtgctccctctctttttggactacaaaattttggcacaaagcaggtgtacaaggttaaaccttttaaaactttcatctatttgtttcgggatagtttggtgtgtgggggggtttgtcttgatcctttgtgctactgcaacatttggtcctcgacattgtaaattagttaatcttaaacatagaaactgtattccagttgtcatgacaaataatgatcaatgttaaccctgggtgtttgatctattccatttgggatgcgttgaaaagcatgcattgtcggatttgaagataaaaatccataatgttacatttattaatcatacttgtatagtgacc

SEQ ID NO: 3686 - DNA, 1928 bp, Zea Mays
tcttcgtcttctcgttcacgcaatcacgcccccgccaaacccaaaccgaccgaaagcggaaagcaaatagcagacggcagacaacagtcgaggggacacaggaaggcgcgaagaagaccgagatcctcgcccaacgccatcacgccactcccccaatactcaggtgtcaggacagcgagcaggcacaagcagatctcactccacgttgctccttccgcccttcctctccgccgctccccggatcatggagcgcgggattcttggctccaggggcgccgtccaaatcttggggtcgaagaccggggccgcgatgtcatgtggcaaaacaacctctacaagttttacttgttctaccaaacacgagctgaacttgcatgtgaatgttaagccgttgcaattgttttgctgaagaaaagatcggagtactgttattaaatcttggtggtccagaaaccctagacgatgttcaaccattcttgttcaacctatttgctgatccagatatcattcgactgcctaggctcttcaggttccttcaaagaccactggccaaacttatttctacttttagagctcctaagagtaaagaagggtatgcttcaatcggtggtgggtcaccattgaggaaaattactgatgagcaggcaaatgctttgaagattgctctggaaaagaaaaaattgaacgcaaatatatatgttgggatgcggtattggtatcctttcacagaagaagccattgatcagattaagaaggataatatttccaagctcgttgttcttccactctaccctcagtactccatatcaacaagtgggtcaagcattcgtgttctccaaaatgttgtcaaggaagattcatatttttctggcttgccaatctccattatcgaatcatggtaccaacgtgatggctatgtgaaatcaatggctgacctaattgaaaaagagctatctgccttttccaatcctgaagaggtaatgatattcttcagtgcacatggtgtgccacttacctatgttcaggatgctggagatccttacagagatcagatggaggattgtatttctttgatcatgggggagctgagatccagaggaatcttaaatggtcacactttggcgtatcagagtcgggtgggaccagttcaatggctgaagccatatactgatgaagttttagtagaacttggtcagaacggtgtgaagagcctcctggctgttccagtaagcttcgtgagcgagcacattgagacactggaagaaatagacatggagtacaaggagttggctctggaatcaggcattgagaactggggccgggtccctgctcttggatgcacttcgactttcatctccgaccttgcagatgcggttgtcgaagccctcccatctgcctcggcgctgggaaccagaaagcctgaagacaccgattccagcatggatctgatgcattacctgaccaagatgttcttcggctcaatcttggcatttatcctgctgttgtcaccaagactggtttctgctttccggaacaccatgctttaggtggttaggtaggtaagcaaaaagggaatggtgtgataggtaattcttaaaaatttgagattaataatggaaaaactggagagagcttggtgatagtaactagagatcctttaggctttgtttgggtactctagtattgaccctaatccgtgtgttgagatagattgaggtgtaaattagtttaagttatacctcaattcagctcagtacatatagattgagctcaatactagaatactcaaactaggccttagtgcacgaggtagcagcttgtaatttgctgtttttgatattgttcacaggaaacattggtctcataaatgaatctgtgaaagcacataacgttacaaatcaaaggtctctgtgggcccttctctcttt

SEQ ID NO: 3687 - DNA, 1704 bp, Zea Mays
ggggcgaatggatggacccagccgggcttatattagtatctgcaggaggagggcaagagggtagtagaagagagaatagcacaggctcagagcagcatatgaaaaataaaaagagagagagagaggatcgagtgatggagggtctggggcacctgctgctgttcgccttcctcttctggttctccaccttcatggtcgcaccggtgatgaccgacgtcaccatggcggcgctctgccccggccgcgacgagtgctccctcgccatctacctcaccgggctccagcaggcggtttcagggctgggggcgctggtcctgacgccggtggtcggcaacctgtccgacaggtacggccggaaggcactgctggcgctgcccgccacggcgtccatcgttcctctcggcatcctggcgtacggccggaccaagggttacttctacgcgtactacgtgaccaagacgctgacggcgatggtctgcgaaggcaccatgatgaccctctcgcttgcctacgtggccgacagggtgccggagacgaggcgcgcggcggccttcggcgtcttctccggcgtctgcagcgccggcttcgtcggcggcaccgtggcagcccgcttcctccccgtctcatccacgtttcaggtctcagcggtggcagccgtcgcgacggccgtctacatgaaggccttcctccaggagacggacggcggagcctccgtatcctcctcttcctcctcctcctccggcagcggcagcgacgaggaggcggcctgccgccggccgctctgcctcccctcctccagcagtagcgaggaggcggcgtcgctgccaaggctcccgccacttcggaaggcgccgtcgctgtcggagattgcagccgctcttaccagcagctcgaccttctgctgtgcggccgtcgtcacgtttttccacggcctcggtgagacgggcctactgagcgcactactgtacttcctcaaggcgaaattccactacagcaagaaccagtatgccaatctgctacttatcatcggcatcacaggaagcttctcgcagctaactgtgatgccactcctagtgcgaaagctaggtgagcagaagctacttgtcatatcactagtggcgagctgcgggcaggcattcctatacagcatctcatggtcgtcctgggtcccatatcttgccgcaagcagtgtaatattaagcatgctggtcacaccttgtataagaagcatcgtatcaaagaaagtgggaccttttgaacagggaatggtccaagggtgcatgactggaataagctcgaccgcaagtgtcgtatctcctctaatctttactcctctcacagcctggtgtctatcagaagctacgcctttctacttaaaaggtttcagcgttgcctgtgctgggtttgcaacgcgttggcgacgagcataagtatgaggccagctgaagtgcagccagataggaaatagatgagctattgacctctgtttttatgggtaaaagaaggtagatacatgcctgtaaatagtatttacatcctacacttagtcttctactaccatttactattcaatgtcaaatgtagtagtattatgtaatttccttgccgggccacattattagttgatcaacactggtcctaacattttggaggtctgagtgaaaactaatatagagacctctctcatctctttctctctctata

SEQ ID NO: 3688 - DNA, 1096 bp, Zea Mays
ctccatcggggaacacagaaaaatgaagtccggcacaaactaggcccgtgcgcgccatgcgtgagttgctgaggcaaccaatcacgtagactgtgaatgaacgctcactacagagtacagacgcaccatacaatagctccacaaaactctgcagcccactgttgacacttgacagcgccgacagaatctcttcttttattttaatccttttattttaattcatcatctcctttaatttgccttcttcaacaagcgtcttttggacttccattattacgtaccgtttgatttacatattggtaacgtaatggataatctatcgacgaaaccaattgtatattatttgatgaaatcactctcttatcaaggaacgaattatttgctcatccggtctgaaagtatctgacatccaatccaaaaaagaaaaagaaataaaatgttgtcccatgctaggatgcaagttgcaacccaaataatagaactccaatcattgatactcagtctgatagctcatatgtgtcttacctctacgctctgtaagttgttttaggggtggaacatgaaacaggacatttctccccccaaaccgtcctcttatcccatgtagattggatgagattgaaatagattataaatgattttgacttggctaggatttaaacatactaaatctcacccaatccatatggattgggaggaaaacgaacaaaccctacaaagggcactaccccaagtgtcttttaaacatcttgtttgattttaaacatacaaatgtaatatcctgcattgtttttaaatgttatctggatttaaataaaatgaaatggctttgctaacttttcactaaagcttctaactatgaaataattttaaaagcacaatatctgattcacacttgtttccgttcactattaggtgtgtttgattctcctcactaaagtttagtcaatgtcaaatcaggcatttgaatgacgattacaaatattaaatatagcctaatcataaaactaaatatatagatacaaggttaaatgatgagataaatttgttaaccatagttaattcatgattagtaaatatttaccaattaggctta

SEQ ID NO: 3689 - DNA, 1030 bp, Zea Mays
gacggcggaggtgcgccccggaccgtcgaggacatctacaaggactacgccgcccgccgcgccggcctcgtccgcgctctcacatctgatgtcgacgggttctacagcatgtgcgacccagagaaggagaacctgtgcctgtacggtctcccgaacggcggctgggaggtatcgctgccggtggaggaggtgccgccggagatgcccgaaccagcgctcgggatcaacttcgccagggacggcatgaggcgtcgcgactggctctcgctcgtcgccgtacactctgacgcttggctcgtctccgtcgcattcttcttcgccgccaaactcaacggcaacgacagggaagggagaataatcctggtgttgataacagcagcaaatccaggcactcaacgaagcgatcaaatgatggaaagataaagaactcaagagtggcagttggtgaatgtaggtatgagaatgatgaagaccacagcgaaaccctttgtggttcttgcagtggtctctacaactcaagtgagttctggattggatgcgacatttgtgagcggtggttccacggcaaatgtgtgaggataaccccagcaaaagcagaacagataaagcactacaagtgccctgattgcagctacaaaaagagcaggcaataaaatcttggagctgctggcctcctattactgactcagctgatcaaccaaacaatacttttcaatttggccgtagatgttaactaccctaggcatttctttgttgtggtacatgctggaaaaagacatacaggatagttgatcttacagtctggtcaattgcttttgtgcttgttttaatgacatctgtttacgggttatgtcttcaaggtggatggtaatcctttgcgttgtgggctctagcaacgtgatgagttatggccattatcgaaatttgagatttgcgcgagtgcgcatctgaaggtagtcaagttgatttgtttcctcaaaattagtaaattaagtaataaaacatagagaaataattaaagaatacaatc

SEQ ID NO: 3690 - DNA, 2977 bp, Zea Mays
gctctgcatgagaacaggagacagcgtctctcttgtgcttgccccgtggccggcgctagctccgatccttcgccccggttcggcctctcccggcgcctcgggtcatgcccacgagaccacgagctacgcgccgcagacggcaggtgcgctctcccgtctcctcgtcttcccgagctgcctcaccggccaccgcatccttctcctcgcggcgacctggctgttccctcgcgtgcgcccgcgttgttcaactcgtctatttttgttgttgttgttacaatcacttgatcgtgatgtcgtggttagggttccggagccaatgtatgctgctgaggcggcaggactctagcagctctcctatctcataccctattccaaacaacactctgtaaaaagtgtaatgtgacgcccgacgcgcctggatgccgaatcgcctggatcgagacgagtctgggatgagcacggcggcgcctcctcctggccagcggtgagcgtccgtgctgtgaggaagacgtcggcaacatgatgaaggcatgacgctcaacaggagactcaaagataagtctggtttgtgttggtattatttcatttcctctcctcttctgatagtgttttatacgctcctaatctgggcctaagtaccagatctattacaaagctgttaaccctaatctgggccagcccacaatcaccatgtaaaatcgctaagaattcaaaccaatccaagtacacaaatgaaacaaagctcattactactatttcctactgatgcacaccctgatccatgacatgtaatgacaggccaagggcctgcttgaatgcgctgcacctattagcgcctggcgcggtagcaattagttaattactagccacacattgcttccatttgctcctccgtggctgctgattgcagaagcacacttttgcagttccatgcggactgtccttgttgtcatatcatatcccaattgacgatctaatattacatagaacgccgttatgaaccctagagaacttcagcttttgtgtagcgggactgcaaacaacatatgttttgccaccgctaccaattccttatgctttacattcgatccctaactctgcgcatgcaactttgtaacttacagtcacacgatggcaaaacagcatcatctgcatccatgcatgggtcgttcgtcgtcgtcactgcctctcctgctggttccactcgagtattgccgaacgaagggccctgttcggcacgagaaggctgcgctcgaggtcgagattcgtcatgggtgatgtgctatgcccgctgtcaagccagcccctaatagcttcaccctcataagtgaatccatccgctgcaaccacagggaccccagatctagttgacttcaattgggatgatcttgggtttcaactgatcccaacggacttcatgtatttaatgagctgttcttcagatggggtgtttatgaatggtaaattagtgccatatgggtcaattgagctgaatccagcagccgccgtgctgaattatgggattgcttgaaggtctacgatcacatagaaaagaggatggatcaatccttctttttcgtccacatgaaaatgcacggcggatggaaattggtgcagaccggttatgcatgcctgcaccaagtgtagagcaattcctagaagctgtgaaactaactgttctggcaaacaagcattgggtgcctccttttggtaaaggttctttgtatatcagaccgcagctaattggaagtggggctatgcttggtgtggcacctgccccacagtacacattcattgtgtttgtttgcccagttgggcattatttcaagggtggtctagctccaatcagcttgttaactgaggaagaataccaccgtgctgcacctggtggaactggtgatataaaaactattgggaactatgcttcggttgtcagtgctcagagaagatccaaggaaaaaggccattctgatgttttatacttagatccactccataataagtttgttgaggaagtttcttcttgtaatatattcatggtgaaggacaatattatttctactccactgttaacggggacaattcttcctggaatcacaaggagaagtgtgattgaaatttctcagaatcttggatttcaggttgaggagcgtcttatcacaatagatgaactgcttggggctgatgaagtcttttgtacaggaacagctgttgtattgtcacctgttgggagcatcacttaccgtggaagaaggtaagtacttcagccaaactacttgttttccagtagttgtgctatttgagtgcatgaggaaatgctgacgctccacttaagtactagtctgagttataaatgactacaagcagcatttgacgagacataggaacatattggaccttcagtttcactaaatagttggtaaagacatatgtgttccaattatctgaccactgtgattattgttgatttattttcacataataactcggttgctagcccaccttcgacactaaagaaaaagaaatgtgctcctcaactcgatcaataattgttgcgctttcacgaaactagtaaatgttggctgtctatcgacttcttgtccactgcagagtggagtatgggaagaaccaggaggccggagtcgtgtcccaacaactctatgccgcactcacagctatccagaaaggtctcacggaggacagcatgggatggacgttgcagctaacttagcagcttttttcacatgatcgagctctacaactcttatttccgttttctcgataagtctcacttctatcaacttgttcttctgttgaaacagagtactttaaaagggatccccaataatgactttccctgtgtattgctgatatgttggcactagatatttttggaaactctatttaaagcacagtgttttgcaccacaagcattatactacatccgttcataaaaaaataattagttatcatttat

SEQ ID NO: 3691 - DNA, 3796 bp, Zea Mays
gctctgcatgagaacaggagacagcgtctctcttgtgcttgccccgtggccggcgctagctccgatccttcgccccggttcggcctctcccggcgcctcgggtcatgcccacgagaccacgagctacgcgccgcagacggcagggttccggagccaatgtatgctgctgaggcggcaggactctagcagctctcctatctcataccctattccaaacaacactctgtaaaaagtgtaatgtgacgcccgacgcgcctggatgccgaatcgcctggatcgagacgagtctgggatgagcacggcggcgcctcctcctggccagcggtgagcgtccgtgctgtgaggaagacgtcggcaacatgatgaaggcatgacgctcaacaggagactcaaagataagtctggtttgtgttggtattatttcatttcctctcctcttctgatagtgttttatacgctcctaatctgggcctaagtaccagatctattacaaagctgttaaccctaatctgggccagcccacaatcaccatgtaaaatcgctaagaattcaaaccaatccaagtacacaaatgaaacaaagctcattactactatttcctactgatgcacaccctgatccatgacatgtaatgacaggccaagggcctgcttgaatgcgctgcacctattagcgcctggcgcggtagcaattagttaattactagccacacattgcttccatttgctcctccgtggctgctgattgcagaagcacacttttgcagttccatgcggactgtccttgttgtcatatcatatcccaattgacgatctaatattacatagaacgccgttatgaaccctagagaacttcagcttttgtgtagcgggactgcaaacaacatatgttttgccaccgctaccaattccttatgctttacattcgatccctaactctgcgcatgcaactttgtaacttacagtcacacgatggcaaaacagcatcatctgcatccatgcatgggtcgttcgtcgtcgtcactgcctctcctgctggttccactcgagtattgccgaacgaagggccctgttcggcacgagaaggctgcgctcgaggtcgagattcgtcatgggtgatgtgctatgcccgctgtcaagccagcccctaatagcttcaccctcataagtgaatccatccgctgcaacagatactggctgccccatcatttggtggacaactggaatcagagttctgcgtctgcgatctgcctgagtcaacagtgaagtcctctaaactccgtagtctccttggcttgcctttgaaagtggactcaacatcttcaaatgattgaagcagtgtatcaccagcattttcatatagagagcaaggaacgtggacatgagcaatggcaatccgggagctggaggcgtccctggccaagttgtgcagcgcccacagcaagttgctcttgccgtgcttgagttcttcggggacagcaacgaaaatcttgtcgtcgacagccaaaggcgggctctccgcggcctccctggtgttgctcaccgccgttcttaaggtgtgctggaaagaacgaaagattgcagtcacgcggcgcgcagcatggattgtaatgctgccctccaggacccggaattaaaatgcgaaagacccgaacgttacaaacgaaggcgaggttgtagcatcatttaaaaaaacccgctgtcggaagaaatcactttggtatcttcgtgaatcgggaccggatattcatggcatttggtagacttttctggctgcgaggtgaaattactggagacctgcatagacgaagtaccgtctgttgctcgttactgctctgccagtcgtcgtctaacacgattgtttcgatgcatcgatgtgaaaatgctcagcaaacagcatattctgaggctgcatttgctcgctgccgcttcctctgcagaaaccttttgacttcttaacaatcacgagattcttcgccgtgtgtgtcttttgttatcacggtctgcctgaaattcatcaaaaaacaagtggcatcaaaattgccctatgccacatttctcttgctagcccggccccgatcagaactgaagcccatgatggatgagggcccagtcccctgcatggaccacttcctcggcgtcgggactcgggactgcgacccggcaacagaagcacggaagcaggagacgaccaataggcaatagcaacgcgccggcggctcggcggcgtcgaacgattcgggcaatcgacaagcagccccaccaaaccaggaaactgcaaacctacccccggtcgccgactcgccgacctcgactctccgcccagactacaaatggagctctgcacctgcgcggcccgcagttctgcgcccccctcttctagctgccgcgcggcgccattcccgcgagttctctcccatcgcatttggagccgatcgggatactgcactgtctgctttaccccgtcaagccctgttgctaggagtcgattctctactctaatgacgactgcacacaacacagggaccccagatctagttgacttcaattgggatgatcttgggtttcaactgatcccaacggacttcatgtatttaatgagctgttcttcagatggggtgtttatgaatggtaaattagtgccatatgggtcaattgagctgaatccagcagccgccgtgctgaattatggtcagggattgcttgaaggtctacgatcacatagaaaagaggatggatcaatccttctttttcgtccacatgaaaatgcacggcggatggaaattggtgcagaccggttatgcatgcctgcaccaagtgtagagcaattcctagaagctgtgaaactaactgttctggcaaacaagcattgggtgcctccttttggtaaaggttctttgtatatcagaccgcagctaattggaagtggggctatgcttggtgtggcacctgccccacagtacacattcattgtgtttgtttgcccagttgggcattatttcaagggtggtctagctccaatcagcttgttaactgaggaagaataccaccgtgctgcacctggtggaactggtgatataaaaactattgggaactatgcttcggttgtcagtgctcagagaagatccaaggaaaaaggccattctgatgttttatacttagatccactccataataagtttgttgaggaagtttcttcttgtaatatattcatggtgaaggacaatattatttctactccactgttaacggggacaattcttcctggaatcacaaggagaagtgtgattgaaatttctcagaatcttggatttcaggttgaggagcgtcttatcacaatagatgaactgcttggggctgatgaagtcttttgtacaggaacagctgttgtattgtcacctgttgggagcatcacttaccgtggaagaagagtggagtatgggaagaaccaggaggccggagtcgtgtcccaacaactctatgccgcactcacagctatccagaaaggtctcacggaggacagcatgggatggacgttgcagctaacttagcagcttttttcacatgatcgagctctacaactcttatttccgttttctcgataagtctcacttctatcaacttgttcttctgttgaaacagagtactttaaaagggatccccaataatgactttccctgtgtattgctgatatgttggcactagatatttttggaaactctatttaaagcacagtgttttgcaccacaagcattatactacatccgttcataaaaaaataattagttatcatttat

SEQ ID NO: 3692 - DNA, 4240 bp, Zea Mays
gctctgcatgagaacaggagacagcgtctctcttgtgcttgccccgtggccggcgctagctccgatccttcgccccggttcggcctctcccggcgcctcgggtcatgcccacgagaccacgagctacgcgccgcagacggcaggtgcgctctcccgtctcctcgtcttcccgagctgcctcaccggccaccgcatccttctcctcgcggcgacctggctgttccctcgcgtgcgcccgcgttgttcaactcgtctatttttgttgttgttgttacaatcacttgatcgtgatgtcgtggttagggttccggagccaatgtatgctgctgaggcggcaggactctagcagctctcctatctcataccctattccaaacaacactctgtaaaaagtgtaatgtgacgcccgacgcgcctggatgccgaatcgcctggatcgagacgagtctgggatgagcacggcggcgcctcctcctggccagcggtgagcgtccgtgctgtgaggaagacgtcggcaacatgatgaaggcatgacgctcaacaggagactcaaagataagtctggtttgtgttggtattatttcatttcctctcctcttctgatagtgttttatacgctcctaatctgggcctaagtaccagatctattacaaagctgttaaccctaatctgggccagcccacaatcaccatgtaaaatcgctaagaattcaaaccaatccaagtacacaaatgaaacaaagctcattactactatttcctactgatgcacaccctgatccatgacatgtaatgacaggccaagggcctgcttgaatgcgctgcacctattagcgcctggcgcggtagcaattagttaattactagccacacattgcttccatttgctcctccgtggctgctgattgcagaagcacacttttgcagttccatgcggactgtccttgttgtcatatcatatcccaattgacgatctaatattacatagaacgccgttatgaaccctagagaacttcagcttttgtgtagcgggactgcaaacaacatatgttttgccaccgctaccaattccttatgctttacattcgatccctaactctgcgcatgcaactttgtaacttacagtcacacgatggcaaaacagcatcatctgcatccatgcatgggtcgttcgtcgtcgtcactgcctctcctgctggttccactcgagtattgccgaacgaagggccctgttcggcacgagaaggctgcgctcgaggtcgagattcgtcatgggtgatgtgctatgcccgctgtcaagccagcccctaatagcttcaccctcataagtgaatccatccgctgcaacgaacgtggacatgagcaatggcaatccgggagctggaggcgtccctggccaagttgtgcagcgcccacagcaagttgctcttgccgtgcttgagttcttcggggacagcaacgaaaatcttgtcgtcgacagccaaaggcgggctctccgcggcctccctggtgttgctcaccgccgttcttaaggtgtgctggaaagaacgaaagattgcagtcacgcggcgcgcagcatggattgtaatgctgccctccaggacccggaattaaaatgcgaaagacccgaacgttacaaacgaaggcgaggttgtagcatcatttaaaaaaacccgctgtcggaagaaatcactttggtatcttcgtgaatcgggaccggatattcatggcatttggtagacttttctggctgcgaggtgaaattactggagacctgcatagacgaagtaccgtctgttgctcgttactgctctgccagtcgtcgtctaacacgattgtttcgatgcatcgatgtgaaaatgctcagcaaacagcatattctgaggctgcatttgctcgctgccgcttcctctgcagaaaccttttgacttcttaacaatcacgagattcttcgccgtgtgtgtcttttgttatcacggtctgcctgaaattcatcaaaaaacaagtggcatcaaaattgccctatgccacatttctcttgctagcccggccccgatcagaactgaagcccatgatggatgagggcccagtcccctgcatggaccacttcctcggcgtcgggactcgggactgcgacccggcaacagaagcacggaagcaggagacgaccaataggcaatagcaacgcgccggcggctcggcggcgtcgaacgattcgggcaatcgacaagcagccccaccaaaccaggaaactgcaaacctacccccggtcgccgactcgccgacctcgactctccgcccagactacaaatggagctctgcacctgcgcggcccgcagttctgcgcccccctcttctagctgccgcgcggcgccattcccgcgagttctctcccatcgcatttggagccgatcgggatactgcactgtctgctttaccccgtcaagccctgttgctaggagtcgattctctactctaatgacgactgcacacaagtatgatgcgacaagtctgtataactgaccctctgttttgctttgggaattgggacgatgcaccgccgctaagattaactagcaaaaaggcacagggaccccagatctagttgacttcaattgggatgatcttgggtttcaactgatcccaacggacttcatgtatttaatgagctgttcttcagatggggtgtttatgaatggtaaattagtgccatatgggtcaattgagctgaatccagcagccgccgtgctgaattatgggattgcttgaaggtctacgatcacatagaaaagaggatggatcaatccttctttttcgtccacatgaaaatgcacggcggatggaaattggtgcagaccggttatgcatgcctgcaccaagtgtagagcaattcctagaagctgtgaaactaactgttctggcaaacaagcattgggtgcctccttttggtaaaggttctttgtatatcagaccgcagctaattggaagtggggctatgcttggtgtggcacctgccccacagtacacattcattgtgtttgtttgcccagttgggcattatttcaagggtggtctagctccaatcagcttgttaactgaggaagaataccaccgtgctgcacctggtggaactggtgatataaaaactattgggaactatgcttcggtaatgcgcaaatgtgaattttcaaagttgtcagtgctcagagaagatccaaggaaaaaggccattctgatgttttatacttagatccactccataataagtttgttgaggaagtttcttcttgtaatatattcatggtgaaggacaatattatttctactccactgttaacggggacaattcttcctggaatcacaaggagaagtgtgattgaaatttctcagaatcttggatttcaggttgaggagcgtcttatcacaatagatgaactgcttggggctgatgaagtcttttgtacaggaacagctgttgtattgtcacctgttgggagcatcacttaccgtggaagaaggtaagtacttcagccaaactacttgttttccagtagttgtgctatttgagtgcatgaggaaatgctgacgctccacttaagtactagtctgagttataaatgactacaagcagcatttgacgagacataggaacatattggaccttcagtttcactaaatagttggtaaagacatatgtgttccaattatctgaccactgtgattattgttgatttattttcacataataactcggttgctagcccaccttcgacactaaagaaaaagaaatgtgctcctcaactcgatcaataattgttgcgctttcacgaaactagtaaatgttggctgtctatcgacttcttgtccactgcagagtggagtatgggaagaaccaggaggccggagtcgtgtcccaacaactctatgccgcactcacagctatccagaaaggtctcacggaggacagcatgggatggacgttgcagctaacttagcagcttttttcacatgatcgagctctacaactcttatttccgttttctcgataagtctcacttctatcaacttgttcttctgttgaaacagagtactttaaaagggatccccaataatgactttccctgtgtattgctgatatgttggcactagatatttttggaaactctatttaaagcacagtgttttgcaccacaagcattatactacatccgttcataaaaaaataattagttatcatttat

SEQ ID NO: 3693 - DNA, 686 bp, Zea Mays
ctgggagaccaaatgatgatttttgtcataaggaatgaagcactgttacttcttacttatttgactcgggatgcagaggaaattcaaaaaattgttgtatttgagggtgtgtttgagaagatatttagcattatcagagaggagggctattctgacggaggtgtagttgttcagcatctcactcctagtcttaattctacttcctttgatgactggtgggaggaaatgcttttgaaagagacaatgggctttgacccattgatatcaatactaaagattaggagaggcagtgcatttaattttacccaacagaagacagtaaatctcctcgctgctttaaatactgtggaattgcttttgatggtgggcccatccggtgaagcaggtaaagatgctaacaagaatgcaaatcaaactgcattggctcagaaaaacattctggaccatcttcttttgttgggtgttgagagtcagtgggcccctgtcgctctccgctgtatggcactgcgttgtattggcaatttggtgttaaggaatcctcagaatcttgattctcttgcaagaaagcaagttggagaagagcctcatgttcaacctgcactgaatgccatcttatctataatcttacggacatctatagcgcaggaatttgttgctgctgattatgtattcaagtgtttctgcga

SEQ ID NO: 3694 - DNA, 3454 bp, Zea Mays
gccaagctagcctgcccctagtccccttacccctgcggccctgcccctgcccccgctcccgattccgccgccgcatccgacccaacccgctgcgatcccctccgccgtggcgtcggcgactccctctcccgcgacgccctttcatcgctgcagttgatacgccacccgagcggttccttccctcctctcttcctccccttgtcgctctccgcatcgccgcaggccgtagggcgccaccgcgtcagaaggcgcgatccatggaccggtcgatcaacttccgcggcatcgccgggagcgccggcaacatcatgcagggaatggggaaattcgttttcggcaacgagggactcgactcaaaggaagatagctatgttgagagataccttgaccggataagcaatggcaccatacctgatgaccggagatctgccatgactgagctgcagtctctcgtggccgaaagtcgcttagcacagatgtcgtttggagcgatgggttttcctatcctcctcaatatttttaaagaagaccgcgaggatgtagagcttgtgagaggtgcactggagacctttgtgagcgcattgactcctattgagatgtcacaagggccaaagactgaggttcaaccagcatcagtgaattctgatctgctgtctcgagaaacggagaatatttctcttcttctgagcttattgtcagaggaagacttttatgtgagatactacacaatccaacttctaacagctctacttacaaactcgctgaaaaggtgcccagttacaggaagcaattctattgattccccgtggtataacagttctaatggacatgcttatggatcgtgaggtcataaggaatgaagcactgttacttcttacttatttgactcgggatgcagaggaaattcaaaaaattgttgtatttgagggtgtgtttgagaagatatttagcattatcagagaggagggctattctgacggaggtgtagttgttcagcatctcactcctagtcttaattctacttcctttgatgactggtgggaggaaatgcttttgaaagagacaatgggctttgacccattgatatcaatactaaagattaggagaggcagtgcatttaattttacccaacagaagacagtaaatctcctcgctgctttaaatactgtggaattgcttttgatggtgggcccatccggtgaagcaggtaaagatgctaacaagaatgcaaatcaaactgcattggctcagaaaaacattctggaccatcttcttttgttgggtgttgagagtcagtgggcccctgtcgctctccgctgtatggcactgcgttgtattggcaatttggtgttaaggaatcctcagaatcttgattctcttgcaagaaagcaagttggagaagagcctcatgttcaacctgcactgaatgccatcttatctataatcttacggacatctatagcgcaggaatttgttgctgctgattatgtattcaagtgtttctgcgagagaaatcctaatggccaggcattattagcatcaactattgctccacatccaaaccaaggagatattcatgaacctgctagtgacatgccttttggaagtgtacttctgcaagctctggtttctagtgatgtcaatggagatatggaggcatgctgcagagcatctagcgttctttctcacattatcaaggacaacttgcaaagcaaggatcgtgtattgcaaattcagcttgagacatctacagcatccttggggcgtactgagccggtattgcatcgtattgttacatgtttgtccatcgcagcttcaatggagggagaaaatgaccaaaacaaccaactagaggaaccgtacattcaaccttttattcttcggctactcatcatatggcttgttgattgttcaaatgctgtcaactgccttttggaatcagcggtgcatctgaacttcataatagagcttgcttcgaataaacgttacgccgcttgtgtccgtggattggctgctgttgttctaggtgcttgcatcctgtacaatgctagccgtgagaagggtcgtgatgcctttgccgtggcagatgctataagtcaaaagattggcctcacaacatacttcttgaggtttgatgaactgaggaaaagcttggcacatccgttgtcagagcagcatcaccgcaaggagctttcccgatcaagtgcgaatagcatgtcagatttccaagagattgaagaggatgaaacaaataagggcgatcaacaccctgtgctttcagaaatatttgattcacagtttgttaatttacttactaagcttgaggctgatattagagaaaacataatggatatatttagtcggacaaaaactgcaacagcagtccttcctactgaattggagcagaagaacggggaggtcgatgaagagtatatcaagcgactaaagtcatttgtagaaaaacagtgcaatgagatgcaggacttgctggcacggaatgcaatgttagcagaagagttactgagaactggtggtggtacgaccacagatacttcacagaaaccgagcagtggccgagaaagggtccagattgaagctctcagacaagaactggagggggcaaaacgacagataggggcactcaaaagtgagaagtcccagattgaagctgaagctaacaaccaaagaaacctttcagtaaaactggagtctgatctcaagagcttgtcagaagcttacaacagcatagagcaggccaactaccgcttggatgccgaggtaaaagccttgcggcagggaggcagcgtgccatatcctgacgtggaagcaataaaagcgcaagctaaggaagaggctgagaaggacagtgaggcagaactgaatgatctactcgtctgccttgggcaggagcaaacgaaggtcgagaagctgagcacaaggctggcagagctcggggaagatgtggatacccttctgcagggtattggcgatgacactgccattccggatgatgacgatgaagatgatgaagagtgattggtttatgtaacctgcaggtctgctggtgtaatctaccttcatgttgggtcatgatattgcgatggtaactggaaaatgtacagtggatgacaaatgcaccgttccaagtttaagttatttctagagaatgtgactaaatagcctcttgttaaatttgattgtctgaataactttttatattacctttgataaatagccccttgttgaatgggcctcagattcatcatcatatatactaaaaagaacgggtctgatctggtgtggaactcggcaacgtccgtagcccctagagtgctgctgataactgttcgacccacctccctgcatatggatgtgagcgatcgaagatcctaagcttcaaacccataagaataaggccattggccctttccatctggacattgctttggggatg

SEQ ID NO: 3695 - DNA, 2158 bp, Zea Mays
gagtggcgaatcaactagggacgcgcgttgccgccacgcacctcccttccttcacttgcctgccccccacttctccgatctccgccccatcggacttcccaagggtcggctaggtctaggtggtctccaagctttccgcctttccacgccaccattctccccacccgcgcgcctcagcaatccccatccagcatcgccgtttcgccgcggcaccgacacctcgccggccatgggcgcgtcctcctcgactggcaacccgtccccagaggcgcacgagcagcgggagcaggagactctcgcctccgccgccctctccctcccgctcctccgcgccgccttctcccgctccgccgccaacgcgctgccggatgccctcgcgccgccgcccgcctcctttcgtctgcccggatccccggcgccgccgccgccgcacttccacggcatcctcggggggctcggccccgccatcgcctcccaattcttcggccacggagctgccgcggtgacggacgggggcgccgggtgggtccagttcctcagggggttcaaccgctgctgcgcgcgcgtgacggcctcccgctcgctcgcactgctcctccgcgtgtacgctgccgcctgcgccggcgcgggggcaccctgcggcgtccagctccagccggacgagggcggtggtgacgaggatgggaaggtcgtgggggagctcgcgccggaggagatcgcagtgttcctctgggtgtgctgggtcatggcgtggagcgcttcggcctcgagggtggtcagtgacggaggagataaatcggagcccgtcacggtgctcctcccggacgtgacgcacctggtgctgtcggcgctcgtctcggcgggcgtcgtcacggatgatgcaggcgtttggggctgggacgtctccagcggtgggaagggggtgaaggtccaggagttcatgtcgtgggtgctgtccacgcctttcggccttgggaactgcctctcgcggtatgtgcgggacaaattccggtccctggctgctgactctgtggaggagagctctgtttcaactgttagcacaacctttgacacttctgatgtttatctgctaacacgggggagagcatgggcaattgccctcagcctaagaaacaagttgagtgaaaagctgctgtcagcttctgttattggaatggacacagaagacctcctttataggtcatctgttcatggaaaaggactgagccggttctggtcttgtgttgaggggtacaaagggccaatgctgattctactttcagcattctcaaaaggtggtggtgagaatgttgattctgatcgaagatgggtgattggtgtattgaccgaggagggatttgagaacaaagataccttttatggtagctctgggttcctttgtgccgcacatccaatattccgcatgctaccaccatctgataagagcttatgaagcgaatccaaagcccgttggcttagcatttggtggaacaattggaaatgagaggatctttcttgatgaagacttctcgggagttttagtacgacaccatgctgttgataaaacttatcaacatggctctctcatccccaatcagggttatttgcctgttgaggcttcagtgcttgatgttgaggtatgggggctgggtggagaagcaacgaaacgacagcagaatatgtacaagaagagggaggacatcttctcagagcagcgaagaaaggttgatctcaaaacttttgctagctgggaagactctccagagaagatgatgatggacatgatgtcggacccaaacacggttcgacgggaagaccggtgattttggtttgcagcctccggggatgtacagacgacagcgtttgttgcacataggagtattttgcttgcgcatttggctgggtcacacgctttatttaggttgaagtactaaaagaagatttgtacagaacgtaattcccaataaatgaaatggagattctggacaggtctatggtgtccaagcttgctgacatgtcttacggtaccccttttgctggggaggttcatgttgatgttggtgttgtgtggcacaatggctgccagatactgtaattgttatggctgaacgaactgatgaaacaatgctggatttttcatgagcggagcttaattata

SEQ ID NO: 3696 - DNA, 374 bp, Zea Mays
cctggaaccggataacacaccgcgatagcgaagcagaggtcttccaaaacccaacgcggcaaacggcttcctcaccccccctcccctcgccatggccgtccccacctccacctcctccccgctccccctcctcttcctccatcgctgcaccgcaaactctagcccctcggttctctccttcccgtcctccctccgcggcgcgtccctccgctcccgggccgcggccgcaccgcccgcagagaccctctctgacgacggcatccccgacgcgccaccggaaggggcaggaacgggaattccgttgccatcgtcgattggggatgatggggagcagattacctttgagtttccatctattccggattctccagtgc

SEQ ID NO: 3697 - DNA, 1751 bp, Zea Mays
cacagccacccagctacgtaccgcgtgcacctgcaccatcggccgccggcgaccgccaccgccaccgtacgtactagcagctagctgcgccatgggcactactgccgcgcatcgtcgtcgaccgggcagtatcgtcgtcctctcaccatccgccgtcgcgctcgcgctgctgttcttgtcgacgacccttcgcctcgccgccgccgtccagccgtacggcggcggcggaccctgcgcgctggccgtggcgccgctcggctacccttgtgaagagcaccaggtgacgacggcggacgggtacatcctgagcctgcaaaggatcccgagtggcgggcgtggcgggcacggcggcggtgccggtgccggtgcctcgtcctcgcgcgcggggcagccggtgctcctgcagcacggggtcctcgtggacagcaggacggcatgtcatggttgctggcctcgccggaggagtcgctgccgttcatcctcgccgaccgcggcttcgacgtctggatcgccaacaacaggggcacgcgctggagccgccgccacgtctcgctcgacccctccagccggctctactggaactggtcctgggatgacctggtagtcaacgacctgccggccatggtcgacttcgtcgtcaaacagaccggccagaagcctcactacgtcggacactccatggggacgctggtggcgctggcggccttctcggagggccgggtggtgagccagctgaaatccgcggcgctgctcacgccggtggcctacctcgcccacatcaccacccccatcggcatcctgctggccaaggcgttcgtcggcgaggtgctctcggacttcctcggcatggccgagttcgacccgctagcgccgccggtgacgaacctcatcagggcgttctgccgccgcccgggcatgagctgctacgacctcgtcggctccatcaccggcaagaactactgcctcaacagctccgccgtcgacgtcttcctcaagtacgagccccagccgacctccaccaaaaccatggtccacttcgctcaaaccgtgcgcgacggcgtgctgaccaagtacgactacgtgctgccggagcggaacatcgccagctacggccaggccgagccgccggtgtaccggatgtccggcatcccgccgagcttcccgctcttcctcagctacggcggccgggactcgctcgccgaccccgccgacgtgcgcctcctcctgcaggacctccggggccacgaccaggacaagctcacggtgcagtacctggacaagttcgcgcacctcgacttcatcatcggcgtctgcgccaaggactacgtctacaaggacatgatcgacttcctaaaccgcttcaactagtactagcatatatatttgcttcaatcggtgtcgtcttcagccccagcaggattagacaaaaaaagggggggacactgcagctcgtaaacgttgtccatacagattatcagaggtgaaaaccatacatgatgtaatttagcattagatagttaaaacatggagctgcctcagtatggaggattgtcaactactctccatcacagcagtaggtgtgatgtagaagagtgattgtcacactgtgtgtgttgcaaatttgcaacacagtgattactaatataaaaaatactcttgagttaacctttgacaaaaaactctctgtggctgaggtgctccgggcaaacttttcaaatttaaggtttcgaaggagattatttggagacaca

SEQ ID NO: 3698 - DNA, 1868 bp, Zea Mays
aaaagttagaaaattaattctgcgttagttactccaggcttaaggttaagcacctcccaaacacgcctatgagggccctcgtccggatccacctgcccacggccatctccaccggatccttcctccacacctcctcaaccgccgcctccaagaccctagtaccgaaccccaacctcgtcccgctccggctcgtccgccacttcccggccatggccgccaccgccgcagacgagttcgtgaagggccgcgtcttccccaacggcgtcgccgtcatcacgctcgaccgacccaaggccctcaacgccatgaacctcgaaatggatgttagatacaaggcacttcttgatgaatgggaaacaaatccaagtgtcaagtgtattcttgtggaaagcagctcttctcgtgccttctcagcagggatggatattaagggggttgccgtggaaatacaaaaagacaaaaaaacaccacttgtgcaaaaggtggggatgtgaagagacttgctaatgattgcaccatgccagaaataatagaggtattcacagtagagtactctttaatttgtaagatacatgagtatgcaaaaccttatatatgcttgatggatggagtgacaatgggatttggaattgggctatcagggcatggccgctaccgcattattacagagagaacactcctagccatgcctgaaaatggtattggcctgttcccagatgttggctttgcttacattggtgcaaaagcaccaggagggggtgcagttggagtttaccttgggattactggaaaaaggatatcatcacctgctgatgctatgttcataggccttggtactcactatgtaccttctgcaaatttgggttcactcaaggagtccctgctgagtgctaacttcaccaatgatcctcatagagacgttgagtcagttctgacaggatacaagaaagaaccagagtctgaaccacaactaaaaaagcttttgccatatatcatttcttctttcagtcctgataaatcagtggctgaatctgtggaagagctaaagaaatgtagccgaagtggtgatgctgcagtggcagaatgggccaatgaagctttagcaggaattgagaaaggcgctccattttctctttgtttaacacagaagcatttctctcaagttgcatcagcatatgggactagtgaacactatttatctaagctggctggtgttatgaaattggaatatcgcattgccttgaggtcgtcgattagaaacgattttgttgaaggtgtgcgtgctgttttagttgacaaggaccagaatccgaagtggaatccagccactctggaagaagtaaacatggccgaggtcgaatcagttttcgagccattaggggccgaggctgagttgagtgtgtgaaatatggcctgccacactcagttttcttatttgtgctgcaataataatgtatacaaaacagaaatgcgatgcccacagaaacaataaatgctgtgtcttcatgaactaactggagtggttccattttctcgaaaggggcgcgtgggaatctaaggtctgttgcttgctttcctgcctctgcctgcaatattccagccatggtaccaggtggatggccaaatactctagaagcgtttgccctgggcacttgcatgtagcttgatgtgagtagtgtaagaacaaccgggtacggaaaccgttgtctggccagcagatttcaaggcgtgtttagacaagtgtacaactgacgcgcacagatgtacggagtatatattatatgaaatatggcactaaaactcttttcccaggggctttgacgcaggcccggccgcggaaaaaagaaagaaaaaaatattacaactag

SEQ ID NO: 3699 - DNA, 1801 bp, Zea Mays
tgcaacgctccccacagaaactaagcaaagaaatagcgccaacaagttaaataatgccccctttgcacgtccccggtagtagtactcctcgcaagttctatcacctggtgctgttccatgtgcacccgttctggatccaagtcctgtacttccttttgatctccgttttgggtttcttgatgctgagagtcctgcccatgaagtccagctccgtgcctaggccctcggctctggacctactcttcacgtcggtgtcggcgacgacagtctccagcatgatcgccgtcgagatggaatccttctctaacgcgcagctcctcctcatgaccctccttatgctcctcgggggcgaggtgttcacaagcatgcttggtctccacttcacctgcaccaagctcagaaacaagagagaaacacctcataataatctccatggtaatagcttagagcagagtcgtcgtcgtcaccgtcccatggagatggaagcccaggccgccgccgtccaaatggagcttgcagggttcaacaaggacggccatggcgatttcgcatccatggctaggttgctaatgtttatcgtgctgggctacatcttggtcgtgcacatcgccggctacgcgctcattctaatctaccttagcgtggtcggcagcgcgagagcagtgcttgttaggaagaggatcagcctgagcaccttctccgtcttcacggtcgtctcgtcgttcgcaaactgtggcttcgtgccaaccaacgaggggatggtgtccttcaagtccttcccgggcatgctcctcctggtcatgccacacatcctgctcgggaacacgctcttccccatcttcctcaggctctccattacggcgctcgagagggtcacaaggtggcgagacctctgcgagctgctgagagacagaggacccggcggcgggccagctgcggctgccgccgccgccgctataggctacgaccacctgctcccgggaccgcgcacatggttccttgctctcaccgtggcggtgttcctggcggtgcagctggtgctctactgcgccatggagtggggctccggtggccttggagggctcaacgcgttccagaagctcgttgcagcggtcttcatgtccgtcaactccaggcactccggcgagatggtcgtcgacctcgccaccgtctcctccgccgtcgtcgtgctgtatgtgctcatgatgtatctaccgccttacactacatttttaccggtagcagtggaagacgaccagcagcagcaaaatgaggcacaaccccacgacaatagcacgagcaagagcagcacaagtattagcatctggcacaatctgctcatgtcgccgctctcgtgcctaaccatcttcatcgtcgtcatctgcatcaccgagaggcggcagattgctcgtgacccaatcaacttcagcgtcctcaacatcgtcgtcgaggtcatcaggctcaagaagttcagcatgcttgggggtcaggcatggaggctgaactgaaccgaagtactatttcgaaactcgctcgatcaacctgatctccaggactccaagactagtacttgaattctcagtctattcagacggaaccggatcatatgacaaatccatctgcgaggagtttggctgcattctgtaaagtcggtaggggcaaggggttgttcatatcctttttatttaaaaataaaaaatagttttatatctcgacttttgaaaattatattttgaggtgtctgtcacccaggggacggcagggagttaaatgtaatttttaataaataggttctcgtcgc

SEQ ID NO: 3700 - DNA, 2357 bp, Zea Mays
cgctcttcgccgtcagcccgtcactcctctcccccgtccggccgtcccaactcccaatcgtcgccgcgcttctccccgcacgattgccagaatctctaacgcccatggcccccgtctcccccgcggccgccgccgccgcggtctcggcctctcaccacggccgccacctcctcccgtcgtccccgcgccgcctccccaggccccgcccgcgctctcgtccgcaccttcgcctcgccgcctgccacgccgacaccctcctcccctcctcctcatcggaggcccgtgcggcgccaggccctgcggtggagccttcctccgaatctgccaccgactgcttcgtcgattggctgcgcgcgcgcggccttcccccgggcaaagtggacatccgggagcgcccggtgccctgcttgcgcgacggcaaggaccagccgctgcgctacgtctccgctgtcgtcgacctccaggcgggggatgtggcattcgaggtgtcaatgtccctcgtcgttacgcttgagcgggtgctcggggatgaatcaatcgctgagttgttaacaaataacaagttatctgagctggcatgcttggcattgtatctcatgtatgagaaaaaacaaggaaaggattcattttggtacccctacattaaggaacttgaccgacatcgaggaagggggcagctagctgttgaatcaccacttttatggactgaaagtgaactggattaccttactggaagccccttgaaggatgaagttgttgctagagatgaggcaataaggagagagtataatgagcttgacacattgtggtttatggcaggttcactatttcagcaatatccttttgacatacctactgaggcttttccgtttgaaatattcaagcaggcttttgttgcagtacagtcttgtgtggttcatttgcagaaagttagtctagctcgaaggttcgcgcttgttcccttgggaccgccactactgacttacaggagcaactgcaaagcgatgttgacagctgatggtgattctgttcgattggtggtggatcggccatataaagctggagagccaataatcatctggtgtgggccccaaacaaactccaggcttgttctgaattatggttttgttgatgaagataatccctttgatcgtgtagcaattgaggcatctttaaatacagaagatcctcaataccaagaaaagagaatggttgctcagaggaatggaaaacttgctatccaaaattttaatgtctatgtaggtaaagagaaacaaactgttgcagaaatgctgccttatttgagactaggttacatatcaaatcctgatgaaatgcagtctatactctcttctgaaggagatacatgtccagttagtccatgtacagagcgagctgtacttgatcaacttgttggttacctggaatctcgattggctggatatccaacaactttggatgaagatgaagctatgttggcagatggcaatttggaaccaaagaaggaagttgctactaggcttgtaaggttggagaagaagatgctccatgcctgtctgcaggccacaaatgagtttataaacgacttgccagaccacacagtgtcaccttgccctgctccatatgcccctgaattgaaatgaggaaatcgcatttcttgctgttcgttcaagttaataaggatatgattggtctccagcgggatatggctatggtctcgaaagggatgtggtcatgttgtagttagttgcgatgcacagaaggtatcacttttgttaatctagttggtgttgtattaacaacctccttttgctgataatcttgggcaggaatgccaatcaacaatcatgattcatgtacatgattgctgactgatcactttttttttcacgagatggtcagtagttattgttgtagttgtctttaggattacttacagaaaccgaatttgggcagaactggattcaatcggccatgctgctatgccagttttcattctagattgggcactactccttctgaggcattgtatggctacagctatttcgggttggaacttggaagcgaatacaaagtagcgtagagaagtttcttagcattgatttacccgatctgttagaggcttttgaggtgtctaaataggtatttgtaaaaaaattgtggagtcgtcttgtcgtaaagagacatctctagctcgtaactcaagtagtcaagtagtaacagatcacagatgtcttcacttctcttactaatacatcgtctgctatattgattcgatgctttatagacacatttacttctatatttattagtagactatatttatatacactattatataatagagtcctttgggg

SEQ ID NO: 3701 - DNA, 2401 bp, Zea Mays
acctacggcataaatatccgtccacctggcccaatccgcactctgctcatctacaccaccaaacctctgccgctcttcgccgtcagcccgtcactcctctcccccgtccggccgtcccaactcccaatcgtcgccgcgcttctccccgcacgattgccagaatctctaacgcccatggcccccgtctcccccgcggccgccgccgccgcggtctcggcctctcaccacggccgccacctcctcccgtcgtccccgcgccgcctccccaggccccgcccgcgctctcgtccgcaccttcgcctcgccgcctgccacgccgacaccctcctcccctcctcctcatcggaggcccgtgcggcgccaggccctgcggtggagccttcctccgaatctgccaccgactgcttcgtcgattggctgcgcgcgcgcggccttcccccgggcaaagtggacatccgggagcgcccggtgccctgcttgcgcgacggcaaggaccagccgctgcgctacgtctccgctgtcgtcgacctccaggcgggggatgtggcattcgaggtgtcaatgtccctcgtcgttacgcttgagcgggtgctcggggatgaatcaatcgctgagttgttaacaaataacaagttatctgagctggcatgcttggcattgtatctcatgtatgagaaaaaacaaggaaaggattcattttggtacccctacattaaggaacttgaccgacatcgaggaagggggcagctagctgttgaatcaccacttttatggactgaaagtgaactggattaccttactggaagccccttgaaggatgaagttgttgctagagatgaggcaataaggagagagtataatgagcttgacacattgtggtttatggcaggttcactatttcagcaatatccttttgacatacctactgaggcttttccgtttgaaatattcaagcaggcttttgttgcagtacagtcttgtgtggttcatttgcagaaagttagtctagctcgaaggttcgcgcttgttcccttgggaccgccactactgacttacaggagcaactgcaaagcgatgttgacagctgatggtgattctgttcgattggtggtggatcggccatataaagctggagagccaataatcatctggtgtgggccccaaacaaactccaggcttgttctgaattatggttttgttgatgaagataatccctttgatcgtgtagcaattgaggcatctttaaatacagaagatcctcaataccaagaaaagagaatggttgctcagaggaatggaaaacttgctatccaaaattttaatgtctatgtaggtaaagagaaacaaactgttgcagaaatgctgccttatttgagactaggttacatatcaaatcctgatgaaatgcagtctatactctcttctgaaggagatacatgtccagttagtccatgtacagagcgagctgtacttgatcaacttgttggttacctggaatctcgattggctggatatccaacaactttggatgaagatgaagctatgttggcagatggcaatttggaaccaaagaaggaagttgctactaggcttgtaaggttggagaagaagatgctccatgcctgtctgcaggccacaaatgagtttataaacgacttgccagaccacacagtgtcaccttgccctgctccatatgcccctgaattgaaatgagattgcatgttttcttttcccagatggtcataccattaagaatgtcaaaatttgatcaatttgcatatctatatgaagaccatatatgctgcaaggtggatatactatttgaaagaatctgctgcttgtttcctttagagattacagatcttaattgcatgctagaaggaaatcgcatttcttgctgttcgttcaagttaataaggatatgattggtctccagcgggatatggctatggtctcgaaagggatgtggtcatgttgtagttagttgcgatgcacagaagaactggattcaatcggccatgctgctatgccagttttcattctagattgggcactactccttctgaggcattgtatggctacagctatttcgggttggaacttggaagcgaatacaaagtagcgtagagaagtttcttagcattgatttacccgatctgttagaggcttttgaggtgtctaaataggtatttgtaaaaaaattgtggagtcgtcttgtcgtaaagagacatctctagctcgtaactcaagtagtcaagtagtaacagatcacagatgtcttcacttctcttactaatacatcgtctgctatattgattcgatgctttatagacacatttacttctatatttattagtagactatatttatatacactattatataatagagtcctttgggg

SEQ ID NO: 3702 - DNA, 2565 bp, Zea Mays
ctcatctacaccaccaaacctctgccgctcttcgccgtcagcccgtcactcctctcccccgtccggccgtcccaactcccaatcgtcgccgcgcttctccccgcacgattgccagaatctctaacgcccatggcccccgtctcccccgcggccgccgccgccgcggtctcggcctctcaccacggccgccacctcctcccgtcgtccccgcgccgcctccccaggccccgcccgcgctctcgtccgcaccttcgcctcgccgcctgccacgccgacaccctcctcccctcctcctcatcggaggcccgtgcggcgccaggccctgcggtggagccttcctccgaatctgccaccgactgcttcgtcgattggctgcgcgcgcgcggccttcccccgggcaaagtggacatccgggagcgcccggtgccctgcttgcgcgacggcaaggaccagccgctgcgctacgtctccgctgtcgtcgacctccaggcgggggatgtggcattcgaggtgtcaatgtccctcgtcgttacgcttgagcgggtgctcggggatgaatcaatcgctgagttgttaacaaataacaagttatctgagctggcatgcttggcattgtatctcatgtatgagaaaaaacaaggaaaggattcattttggtacccctacattaaggaacttgaccgacatcgaggaagggggcagctagctgttgaatcaccacttttatggactgaaagtgaactggattaccttactggaagccccttgaaggatgaagttgttgctagagatgaggcaataaggagagagtataatgagcttgacacattgtggtttatggcaggttcactatttcagcgatttttgttttcagcaatatccttttgacatacctactgaggcttttccgtttgaaatattcaagcaggcttttgttgcagtacagtcttgtgtggttcatttgcagaaagttagtctagctcgaaggttcgcgcttgttcccttgggaccgccactactgacttacaggagcaactgcaaagcgatgttgacagctgatggtgattctgttcgattggtggtggatcggccatataaagctggagagccaataatcatctggtgtgggccccaaacaaactccaggcttgttctgaattatggttttgttgatgaagataatccctttgatcgtgtagcaattgaggcatctttaaatacagaagatcctcaataccaagaaaagagaatggttgctcagaggaatggaaaacttgctatccaaaattttaatgtctatgtaggtaaagagaaacaaactgttgcagaaatgctgccttatttgagactaggttacatatcaaatcctgatgaaatgcagtctatactctcttctgaaggagatacatgtccagttagtccatgtacagagcgagctgtacttgatcaacttgttggttacctggaatctcgattggctggatatccaacaactttggatgaagatgaagctatgttggcagatggcaatttggaaccaaagaaggaagttgctactaggcttgtaaggttggagaagaagatgctccatgcctgtctgcaggccacaaatgagtttataaacgacttgccagaccacacagtgtcaccttgccctgctccatatgcccctgaattgaaatgagattgcatgttttcttttcccagatggtcataccattaagaatgtcaaaatttgatcaatttgcatatctatatgaagaccatatatgctgcaaggtggatatactatttgaaagaatctgctgcttgtttcctttagagattacagatcttaattgcatgctagaaggaaatcgcatttcttgctgttcgttcaagttaataaggatatgattggtctccagcgggatatggctatggtctcgaaagggatgtggtcatgttgtagttagttgcgatgcacagaaggtatcacttttgttaatctagttggtgttgtattaacaacctccttttgctgataatcttgggcaggaatgccaatcaacaatcatgattcatgtacatgattgctgactgatcactttttttttcacgagatggtcagtagttattgttgtagttgtctttaggattacttacagaaaccgaatttgggcagaactggattcaatcggccatgctgctatgccagttttcattctagattgggcactactccttctgaggcattgtatggctacagctatttcgggttggaacttggaagcgaatacaaagtagcgtagagaagtttcttagcattgatttacccgatctgttagaggcttttgaggtgtctaaataggtatttgtaaaaaaattgtggagtcgtcttgtcgtaaagagacatctctagctcgtaactcaagtagtcaagtagtaacagatcacagatgtcttcacttctcttactaatacatcgtctgctatattgattcgatgctttatagacacatttacttctatatttattagtagactatatttatatacactattatataatagagtcctttgggg

SEQ ID NO: 3703 - DNA, 1360 bp, Zea Mays
cgccttctggctcagatacttcgaatccaagagtcggatgattgccgatcaaataaatcatgctcgcgaagtaaatccaaaggtgagacgcttccccttctcctcgccgatggagtcgcttgcctcgcaagcgaggccggcggcggtgctctggctcgccggcttcttccaggccgcgcgcctccaccgcgttgtctccttctgcgccagctcgagggcactatccatcaggattgcacagtgcttcctgctgaacgggcttatcttccttgggagcttgcttacacttacatcggtggtcattccaactctactgtggatactacctgagcgatgcaatcaaacagcaggacatctttgtgaacacagggcagccgtatctatctattcattcttgcgctccggccttgttgagattttttatgtattttggttttatccactttatgtcttcagcttcatattaagtacgatttgggttgcacttggtattggggaacaagtctattcaattcttcttttaaccattttctttgttgaggtttcagtgattggttacataccttactttggcaaggcaatgaacttcctgctcctgtcattgatgtatgcctactactgctttgagtacaagtggaacttctttgcagtgagtctgcatgagaggcttgatttctttgaatcaaactgggcgttctttgctggatttggtgctccatgcgtccttccaattttcttcttctctcctcttataagctatgggtttctggctatactttatccgttgtttgtcttgactgccgcaggcactcaagctgagcaagtaattgatgcactgaaacctgcacacgaagggaaactacaaagaatacctgtgttctttgtcgcaaagcgactgacgacaaaagtactgcaactgtttccggtggcacagaaagaacaatgaaggatccacagaaacaaaccaaggagggaaggccgctgtgtgtgttgggtgtgctgctaatcacaatgccccgctcgaacgaacgttgcatccgtaaggtgcgcacgccctctccgctctccgtaacgtggaagggaggggcttgccgccttcacgctgtaaatatcctgtaacaagcatttctgtcgaatgggaactttgaaaatatagagaattgcactttgttatttagcaagtgttgatcattcaagattaggccggcgagtcggcggcaccaaccagtaatgattggttccttggtttcatcttggccatgacagaacagtagtgctctctctctcttttctttttgctgaatgtataactcaagccgcccttgagattaattattattgagaggctgctagctttcgt

SEQ ID NO: 3704 - DNA, 947 bp, Zea Mays
acaggcaagcatctggccacatgtgcactcacacgactcagggcgagaggacagcagggcacaataaccgttccactttggtccataggagcgcatagcacagcacaaggagaggccgagaagcgctttagccgtagccgtagcgataagagtgagctagctggtgcacaccggcatggcggccacggcgtactccgtggcgctcctcggcggcgcgcgcctccccgccgctccgcgctccgccctcctccctcggcgcagcgtctgccagcttcgcttccaagatgcaccgaggctctccctgctccgtgcgaaggccgcttccgaggacacatcggcctccggcgacgagttgatcgaggacctcaaagcgaagtgggacgccgttgaggacaagcccaccgtcctcttgtacggcggcggcgccgtcgtcgccctatggctgacgtccgtggtcgtgggcgccatcaacgccgtgccgctgctccccaagatcctggagctcgttgggctcggctacaccggctggttcgtgtaccgctaccttctctttaaggaaagagttggccgccgacattgagaccttgaagaaaaaaatagctggaacagaataaacgctcatggaaagttttagagcgtcctttcttctttggaaagagatctattcgatcggagaaccaatatgcaactacttgagtactattattgcccatgtattgtgtgctgtatatcttctgtatacaaaggaaggttcgtttgttatgtacgtagtagcattgtagtttaaatgtatcgtattacctatctgctaaattcttctttttgatttagcaattttattgtacgtaaacaaaaataagggtaaaacaaatagagtgtgtaatctataccaatattaagaacttattcgataacataaataatatacaattgtaacatgaataaat

SEQ ID NO: 3705 - DNA, 989 bp, Zea Mays
gtccgtcagttatttctcttcctcctccaaaccaccgatgtcgctaccggttctatccctgcgctgccattgctcgtccgcatcctccttggatttccctcccaggaaggttagggttttctgatgcgctcatacatggggcagcaagaagatgggatgtctgatggcttgtacacttacaagcatcaccgcgagcgaggagctgatatccacaccatctttgtgaagaagagcaaattcaggattctgctgtcatttatcggcacaacgttccttcttgtgtctgtttgctgcgccctgttatcgaaggatggtttatgtctttgttccctttggagcatttcatttgccagtgtaattgcgaaatgcctgcgatgtgaccctgtgaagaaagagtcattggtgatcatgccgacttttggaattcaattagagcaacacttttggagtggaagagttcatcgcaaatttgtgcccattggcaagattctaagaccagtgctgaatgagcatgtgacccctgtctcatgctactggagcttggccttgcttgtacgcgaagaatatgagctcatgcttgttttcaagtcaagatgttggttccaatctggaaagcgttatgtgcattcgtagactccaatacgctgggcaattctgcattgcctcaatccacatgattacatgaacatgcttaaacaagttggtggctgtgtgcagccctgatgataattcgaacatatggttcgctgaagactttgctgactgacaacataatgtttagtttcgatacaaatgatgatggaatgtacggaatgttaccgacactggggctattacgtctcacgtggagtgtgaattgtgaaaggatcgtgatgcttaagagtggatgaattgagattctctaaaaaactctttcgataattaagtcctaattgcaagcttaatcaaaagttttgcaccctaatctttaaccttgtactatcaatggc

SEQ ID NO: 3706 - DNA, 996 bp, Zea Mays
gtccgtcagttatttctcttcctcctccaaaccaccgatgtcgctaccggttctatccctgcgctgccattgctcgtccgcatcctccttggatttccctcccagggttttctgatgcgctcatacatggggcagcaagaagatgggatgtctgatggcttgtacacttacaagcatcaccgcgagcgaggagctgatatccacaccatctttgtgaagaagagcaaattcaggattctgctgtcatttatcggcacaacgttccttcttgtgtctgtttgctgcgccctgttatcgaaggatggtttatgtctttgttccctttggagcatttcatttgccagtgtaattgcgaaatgcctgcgatgtgaccctgtgaagaaagagtcattggtgatcatgccgacttttggaattcaattagagcaacacttttggagtggaagagttcatcgcaaatttgtgcccattggcaagattctaagaccagtgctgaatgagcatgtgacccctgtctcatgctactggagcttggccttgcttgtacgcgaagaatatgagctcatgcttgttttcaagagcttgaatccaccagtcaagatgttggttccaatctggaaagcgttatgtgcattcgtagactccaatacgctgggcaattctgcattgcctcaatccacatgattacatgaacatgcttaaacaagttggtggctgtgtgcagccctgatgataattcgaacatatggttcgctgaagactttgctgactgacaacataatgtttagtttcgatacaaatgatgatggaatgtacggaatgttaccgacactggggctattacgtctcacgtggagtgtgaattgtgaaaggatcgtgatgcttaagagtggatgaattgagattctctaaaaaactctttcgataattaagtcctaattgcaagcttaatcaaaagttttgcaccctaatctttaaccttgtactatcaatggc

SEQ ID NO: 3707 - DNA, 1708 bp, Zea Mays
ggtcatcccaggtcccagtccaccggtatcctcacgcagccacgctaaattcgtctccacctcctccctcgtgacatcgtctcgcacggtcgctcccacctttccgcccgccgaaaccctagcccgccccgcctcgccgacggcgatgggcgctgcatgatcggtgcgtccccttggaaccgcctgccttctggcatcgccaagcccgctgccgcggctgccgtcgtcgtagcggcgctcgcgtcctccttcctcgccctcccgcgtcctcgcgccgccccgcccccagcgggatccgggcccctcatgtcgaaggcaaaggtctacaccgacgtcaacgttctgcgtcccaaggagtactgggactacgaggcgctcaccgtccaatgggggatgactatgaagttgtcagaaaagttggaagaggtaaatatagtgaggtctttgaaggcatcaatgttaacaattatgagaaatgcatcattaagatccttaagcctgtcaagaaaaagaagatcaaaagggagatcaaaatacttcagaatctctgtggaggtccaaacattgtgaagttgcttgatattgtcagagatcagcattcaaagactcccagtttgatatttgaattcgtcaacaacacagacttcaaagtcttgtaccccacattgacggattatgacatccgctactacatatatgagctactcaaggctctagattactgccattctcaaggcatcatgcatcgagatgtcaagccccataatgtcatgatagatcacgagcttcgcaaacttcggttgatagactggggcttagctgagttttaccatccaggcaaggaatataatgtccgcgttgcatcgaggtatttcaagggacctgaactccttgttgatttacaagactatgattattctttggacatgtggagtcttggttgcatgtttgctggaatgatatttcgcaaggaaccattcttttatggccatgacaaccatgaccaacttgtgaagattgcaaaggtccttggaacagatgggttgaatgcttatttgaacaagtatcacattgagctggaccctcaacttgaagctcttgttggaaggcatagtagaaaaccctggtcaaagttcatgaatgctgataaccaacatctagtatcacctgaggccatagattttctcgataagctcctgcgctatgatcaccaagataggctcactgcacgtgaagctatggcacatccctacttcctccaagtcagagctgtggagaacagtagaacgagaccacaataatcgttgtctacaccctcgaaatgaagttgttgctaatttctggaacatcataggctaaaaccgttcaataagcatctcgctccaggaatctgggccatgactccgtggcagtgaatcagatagtatgggtcgcatcatgtgggcaaccttggcagatgtttttattgttgtctttaatcttgggactactgtagctttaaacctacaggctgtgcttgaatgacatgatattcatatcatatcgtctcctgtggtgggatatgaaattgtatgttatctttaaacataaacatactggttgtattatggtgtgctattatgtatgtatgattcttatttattttgtgtgatattgtgatgaaatactcatggatctcatagatgacatgagtttccggatagatgtg

SEQ ID NO: 3708 - DNA, 978 bp, Zea Mays
gtctggccctcgaacggcgagacggtgggtggccgcatacgcatacatttcttccgcattgactctgtggggccaccgacggccacagagagaaacgttgagacagggagagagagagagcgagcgagctccagcctccacgcctccactacaccagccaggcagcagcccccaacgactggctcgccgctcgcgagaacccgagtctatttctgcacgcgcttccaggttttagctgcagcggcatcagggcagggggagagcaaaagcaatagttctgttctactggaggaagagcagggagcaagatggggtccggatctttcctcaagagagatatattgaacaaaacggaccagaagcatttgagaagctcatcagcaagtctacgaagtcttcgaagtcaaggaacacaaagcggttgaacttggaggatggagaggctgaaaatcgagctaaagccgagagagaatcgtggggcgaaaatcccttctacgacaaaaactacagatactaaaccagttcaaaatccactcagcagtttgaagatgaccttgctcacgagcctcatgcaagctatagttgcgtcggactgaagacgacattcccatatttctgactctgaatattgtaccttgttacatccactgctactacataatgatgagttctagagcaattgtggactgtgtaaatggaggtagatgctagcgttaatcgtttatgtgctttttggatggtgtccttatcacccgttttactacatctttagcaaggagcgagccttgattttcagtttggctttcgtatttttgtaattgaatgctacttttagataactgaaatatgagggagttcgagcttctatgaagaaacttaacatgtgctaatgcatagagtgccaacaccgttatcatcgtcacaatttttgtacagggctcttctacaatgacttagagcaaggtggatctttgcagc

SEQ ID NO: 3709 - DNA, 1058 bp, Zea Mays
caaaagttcaaccccattacaccagatatttcaaggtttcaatgctgggtcttgaacttccatttgtgttactggccactcatatcacttgcttatcctctatatgcttctgttagagctatagagacaaaaaatcctgtagatgatcagcagtggctcacttactgggtgttgtactcgtttatcactttgtttgagctaacttttgctccaattatcgagtggcttccattttggtcgtatgcaaagctgttctttaactgctggttggtcttgccttggttcaatggtgctgcctatgtttacgaccattttgtgcggccaatgtttgtgaaccgccaaatagtgaacatatggtacattccaagaaatgagaagctaggtaaatctgatgatgttctgtcagctgcagagagatatattgaacaaaacggaccagaagcatttgagaagctcatcagcaagtctacgaagtcttcgaagtcaaggaacacaaagcggttgaacttggaggatggagaggctgaaaatcgagctaaagccgagagagaatcgtggggcgaaaatcccttctacgacaaaaactacagatactaaaccagttcaaaatccactcagcagtttgaagatgaccttgctcacgagcctcatgcaagctatagttgcgtcggactgaagacgacattcccatatttctgactctgaatattgtaccttgttacatccactgctactacataatgatgagttctagagcaattgtggactgtgtaaatggaggtagatgctagcgttaatcgtttatgtgctttttggatggtgtccttatcacccgttttactacatctttagcaaggagcgagccttgattttcagtttggctttcgtatttttgtaattgaatgctacttttagataactgaaatatgagggagttcgagcttctatgaagaaacttaacatgtgctaatgcatagagtgccaacaccgttatcatcgtcacaatttttgtacagggctcttctacaatgacttagagcaaggtggatctttgcagc

SEQ ID NO: 3710 - DNA, 2232 bp, Zea Mays
cgttacacacagttcctttcaggcttcacccgttttgctctcgagtctctcccggttcggatccaaattcagcaatccgacctgagaccaagaccgcgcaccacgcggctcgccgccgatggcgaacgccgacgccgacgaagcgccgctgctctctgtggaacacctccgtccaggatcctgcagccgcgagctcgagctgcgggagttccgcgaccgctacgtgatccgttcgctcgacggcgccgccgctttcgccgtccttcgctccggcggctccatccgccctctctccccagaggaagccgtagctgagagcgactgcaaggtttccagaatatacggcgtggtcggcaccataagattgctcgctggaagctatgtactcgttatcacttctcagaaagatgctggctcttatctgggctcccctgtgtaccaagtgaactcaatgaaattcttatgctgcaacgaggctatcaagcacttgactccacaggaaagaagggatgaggcatacttcatgtctctcctgagaattgcagaaactacttgtggattgtattattcatatgacagggatttgacactaaacttgcagagggcatccaagttggctgctgggagggtacataaaccactatggaagcaggaacaagaatgtggagaaggggtgcgaatcttgaaggcgccacagcaaattttgtagaaacagaacagttggttgagtatgaagatctcacatcctcatttatacagcttcgaggttcaattccacttctctgggagcaaatagtggatttaagctacaaaccacggcttagcattattgaacatgaagaaactcataaggttgttcaacgccactttcatgatctttcacaacgatatggcaagataattgttgctgacttgactgataaacgaggtgatgaaggagatttgagcaatgcatttgctgctgaaatggacagaattcctggtgtcaggtatatacattttgatttccatcatgtttgtcgtggaggtaactttgacaatttgcaagctctctacaatcaaattgaggaagctattcataagcaaggctgagcagatattttcttatgaacactaaaggagagattttgctggagcaaagtggtgtagttaggtccaattgcattgattgcctggaccgtacaaatgtgacacagagtttccttgcaagaaaatcattggattctcaattgcagctgatgggagcattattgtcatctgaaagcatttctctctctgataacattcatgatacattcaaaaaattatgggttgagcacggtgatgagctgagcctggagtatgctggctcttatgctttgaaaggggatctagtgagatatggaaggcagacattgcctggactaattaaagatggaatgagtgctctttcaagatattatttgaataattttcatgacggagtgcggcaagatgctcttgaccttattagcggttattatacagtcagccaaggcagctcttctccttttcataatggtgttgattcttcttcgtatctgccggtggcttcagcaatcatagttggtgggattaccgcgacaactttcactctcagtcaagttggacggaacgcgcagcacttgatctcctccattatctgtgcgggcttaacagtcggagtagtagccttggtgaaagccaatgggaaacagttttgctctaggccccgtctgtgtggtctaatctaatccttggtcttttccccccttccctttcatattgccctttgttagaaattgaatgtaaaaggattagaatgttgttttattcgttgcaagagtaaggttaaataaggaggcaggatggcctgccggtcccgtaatctgaagctgctaatttgtaagcctatagtttggatttgcacattctatttgttatactttttatgtatccatgaatagaaaattacgcctcgaaattccaaatttgtaataaatccgagagaccacatatttttttagtgtgactggttggtagcgacggtcttggcgtcttgcatagttgctgacacagaaaagacacctccgtccctctgtctggtacagtgagggtggggcatcaaaaacacaaagatgctgttcttatcaggcacagatgtttgccaagtataattccacgttgcgctatacagtcgggtttgctcgtatgcatttatgatctagatactta

SEQ ID NO: 3711 - DNA, 2338 bp, Zea Mays
catttcattccattaagaagaaaaacagagataatacaaaacagccacctcgcgggggccaagtacaagcatattgatactcatccatgaataaaacacccaaaggaagctatgtactcgttatcacttctcagaaagatgctggctcttatctgggctcccctgtgtaccaagtgaactcaatgaaattcttatgctgcaacgaggctatcaagcacttgactccacaggaaagaagggatgaggcatacttcatgtctctcctgagaattgcagaaactacttgtggattgtattattcatatgacagggatttgacactaaacttgcagagggcatccaagttggctgctgggagggtacataaaccactatggaagcaggctgatccacgttttgtttggaacaaaaatttgttagaggaacttattgaagctaagcttgatgagttcatcatcccactgatacaaggaaatatccaaaaaatgatagttccatgtcactgtttatgtatatatttggtttgcatgcataatgtggggcctataccttgccatcatccaaccatattagaaggatatatttcaaaaagttgcaatgcattcccattgttttctatacttggaggacgaacatgatcaggaagctggtgtcctttaactcctatagacccatacgttttcagtcagcacaatttaccttgaaggatagaccagtgaggataacattgttctcaaggagatgcaacaggcgtttaggaacaagaatgtggagaaggggtgcgaatcttgaaggcgccacagcaaattttgtagaaacagaacagttggttgagtatgaagatctcacatcctcatttatacagcttcgaggttcaattccacttctctgggagcaaatagtggatttaagctacaaaccacggcttagcattattgaacatgaagaaactcataaggttgttcaacgccactttcatgatctttcacaacgatatggcaagataattgttgctgacttgactgataaacgaggtgatgaaggagatttgagcaatgcatttgctgctgaaatggacagaattcctggtgtcaggtatatacattttgatttccatcatgtttgtcgtggaggtaactttgacaatttgcaagctctctacaatcaaattgaggaagctattcataagcaaggctgagcagatattttcttatgaacactaaaggagagattttgctggagcaaagtggtgtagttaggtccaattgcattgattgcctggaccgtacaaatgtgacacagagtttccttgcaagaaaatcattggattctcaattgcagctgatgggagcattattgtcatctgaaagcatttctctctctgataacattcatgatacattcaaaaaattatgggttgagcacggtgatgagctgagcctggagtatgctggctcttatgctttgaaaggggatctagtgagatatggaaggcagacattgcctggactaattaaagatggaatgagtgctctttcaagatattatttgaataattttcatgacggagtgcggcaagatgctcttgaccttattagcggttattatacagtcagccaaggcagctcttctccttttcataatggtgttgattcttcttcgtatctgccggtggcttcagcaatcatagttggtgggattaccgcgacaactttcactctcagtcaagttggacggaacgcgcagcacttgatctcctccattatctgtgcgggcttaacagtcggagtagtagccttggtgaaagccaatgggaaacagttttgctctaggccccgtctgtgtggtctaatctaatccttggtcttttccccccttccctttcatattgccctttgttagaaattgaatgtaaaaggattagaatgttgttttattcgttgcaagagtaaggttaaataaggaggcaggatggcctgccggtcccgtaatctgaagctgctaatttgtaagcctatagtttggatttgcacattctatttgttatactttttatgtatccatgaatagaaaattacgcctcgaaattccaaatttgtaataaatccgagagaccacatatttttttagtgtgactggttggtagcgacggtcttggcgtcttgcatagttgctgacacagaaaagacacctccgtccctctgtctggtacagtgagggtggggcatcaaaaacacaaagatgctgttcttatcaggcacagatgtttgccaagtataattccacgttgcgctatacagtcgggtttgctcgtatgcatttatgatctagatactta

SEQ ID NO: 3712 - DNA, 2509 bp, Zea Mays
cgttacacacagttcctttcaggcttcacccgttttgctctcgagtctctcccggttcggatccaaattcagcaatccgacctgagaccaagaccgcgcaccacgcggctcgccgccgatggcgaacgccgacgccgacgaagcgccgctgctctctgtggaacacctccgtccaggatcctgcagccgcgagctcgagctgcgggagttccgcgaccgctacgtgatccgttcgctcgacggcgccgccgctttcgccgtccttcgctccggcggctccatccgccctctctccccagaggaagccgtagctgagagcgactgcaaggtttccagaatatacggcgtggtcggcaccataagattgctcgctggagagctgcatttcattccattaagaagaaaaacagagataatacaaaacagccacctcgcgggggccaagtacaagcatattgatactcatccatgaataaaacacccaaaggaagctatgtactcgttatcacttctcagaaagatgctggctcttatctgggctcccctgtgtaccaagtgaactcaatgaaattcttatgctgcaacgaggctatcaagcacttgactccacaggaaagaagggatgaggcatacttcatgtctctcctgagaattgcagaaactacttgtggattgtattattcatatgacagggatttgacactaaacttgcagagggcatccaagttggctgctgggagggtacataaaccactatggaagcaggctgatccacgttttgtttggaacaaaaatttgttagaggaacttattgaagctaagcttgatgagttcatcatcccactgatacaaggaagttttcagtcagcacaatttaccttgaaggatagaccagtgaggataacattgttctcaaggagatgcaacaggcgtttaggaacaagaatgtggagaaggggtgcgaatcttgaaggcgccacagcaaattttgtagaaacagaacagttggttgagtatgaagatctcacatcctcatttatacagcttcgaggttcaattccacttctctgggagcaaatagtggatttaagctacaaaccacggcttagcattattgaacatgaagaaactcataaggttgttcaacgccactttcatgatctttcacaacgatatggcaagataattgttgctgacttgactgataaacgaggtgatgaaggagatttgagcaatgcatttgctgctgaaatggacagaattcctggtgtcaggtatatacattttgatttccatcatgtttgtcgtggaggtaactttgacaatttgcaagctctctacaatcaaattgaggaagctattcataagcaaggatattttcttatgaacactaaaggagagattttgctggagcaaagtggtgtagttaggtccaattgcattgattgcctggaccgtacaaatgtgacacagagtttccttgcaagaaaatcattggattctcaattgcagctgatgggagcattattgtcatctgaaagcatttctctctctgataacattcatgatacattcaaaaaattatgggttgagcacggtgatgagctgagcctggagtatgctggctcttatgctttgaaaggggatctagtgagatatggaaggcagacattgcctggactaattaaagatggaatgagtgctctttcaagatattatttgaataattttcatgacggagtgcggcaagatgctcttgaccttattagcggttattatacagtcagccaaggcagctcttctccttttcataatggtgttgattcttcttcgtatctgccggtggcttcagcaatcatagttggtgggattaccgcgacaactttcactctcagtcaagttggacggaacgcgcagcacttgatctcctccattatctgtgcgggcttaacagtcggagtagtagccttggtgaaagccaatgggaaacagttttgctctaggccccgtctgtgtggtctaatctaatccttggtcttttccccccttccctttcatattgccctttgttagaaattgaatgtaaaaggattagaatgttgttttattcgttgcaagagtaaggttaaataaggaggcaggatggcctgccggtcccgtaatctgaagctgctaatttgtaagcctatagtttggatttgcacattctatttgttatactttttatgtatccatgaatagaaaattacgcctcgaaattccaaatttgtaataaatccgagagaccacatatttttttagtgtgactggttggtagcgacggtcttggcgtcttgcatagttgctgacacagaaaagacacctccgtccctctgtctggtacagtgagggtggggcatcaaaaacacaaagatgctgttcttatcaggcacagatgtttgccaagtataattccacgttgcgctatacagtcgggtttgctcgtatgcatttatgatctagatactta

SEQ ID NO: 3713 - DNA, 2886 bp, Zea Mays
aaaacagagataatacaaaacagccacctcgcgggggccaagtacaagcatattgatactcatccatgaataaaacacccaaaggaagctatgtactcgttatcacttctcagaaagatgctggctcttatctgggctcccctgtgtaccaagtgaactcaatgaaattcttatgctgcaacgaggctatcaagcacttgactccacaggaaagaagggatgaggcatacttcatgtctctcctgagaattgcagaaactacttgtggattgtattattcatatgacagggatttgacactaaagtaagtgctttgtcatgcatgtatctgaataaggcaaccaaaagacattggcttaatattcagaaaaggccaacaacctttgtgtagtgattatgcacatccttaagatatttttttttctcaaacaacacatgagaactgtgtgcatttcattaagtagagaaaaaaaaccaaaggagaagcagtgtgtggcgctgttagccttgtactaggtggcctagggaagttggcctcctggaaaaaagccgaaacagtcagagcaccctgaatgtcctggatccagagattctgatctaaatcctcctgtaccgttcatctcctcgtcgacatttgtaactaatcgattgcctgttagttccattgttccttgcagatgtgtagtaggttcttgaagtatggatctattgagcacttcttaagaggttctagttgtatgactgttatcatgtactgaatgcctctgtggtgcatttatttttcttttgttatactggattgtatctaactgatgagatagaaataatgcgatgatggaatgctcctcaatgtaaagctataaacactatgattatgtagcttgcagagggcatccaagttggctgctgggagggtacataaaccactatggaagcaggctgatccacgttttgtttggaacaaaaatttgttagaggaacttattgaagctaagcttgatgagttcatcatcccactgatacaaggaagttttcagtcagcacaatttaccttgaaggatagaccagtgaggataacattgttctcaaggagatgcaacaggcgtttaggaacaagaatgtggagaaggggtgcgaatcttgaaggcgccacagcaaattttgtagaaacagaacagttggttgagtatgaagatctcacatcctcatttatacagcttcgaggttcaattccacttctctgggagcaaatagtggatttaagctacaaaccacggcttagcattattgaacatgaagaaactgtaagaatttgttacattttacgctccatacttaatatagcctgatgacttctcttaaactgattccatacagcataaggttgttcaacgccactttcatgatctttcacaacgatatggcaagataattgttgctgacttgactgataaagcaggagagctgcattctcatttcattaagaggagaaaaaaacaagggagaggctgaaccatctcgttttaacagttgttctatttgtccatcgagcgacaacggttcatctaatctgttgttacttgcagcgaggtgatgaaggagatttgagcaatgcatttgctgctgaaatggacagaattcctggtgtcaggtatatacattttgatttccatcatgtttgtcgtggaggtaactttgacaatttgcaagctctctacaatcaaattgaggaagctattcataagcaaggatattttcttatgaacactaaaggagagattttgctggagcaaagtggtgtagttaggtccaattgcattgattgcctggaccgtacaaatgtgacacagagtttccttgcaagaaaatcattggattctcaattgcagctgatgggagcattattgtcatctgaaagcatttctctctctgataacattcatgatacattcaaaaaattatgggttgagcacggtgatgagctgagcctggagtatgctggctcttatgctttgaaaggggatctagtgagatatggaaggcagacattgcctggactaattaaagatggaatgagtgctctttcaagatattatttgaataattttcatgacggagtgcggcaagatgctcttgaccttattagcggttattatacagtcagccaaggcagctcttctccttttcataatggtgttgattcttcttcgtatctgccggtggcttcagcaatcatagttggtgggattaccgcgacaactttcactctcagtcaagttggacggaacgcgcagcacttgatctcctccattatctgtgcgggcttaacagtcggagtagtagccttggtgaaagccaatgggaaacagttttgctctaggccccgtctgtgtggtctaatctaatccttggtcttttccccccttccctttcatattgccctttgttagaaattgaatgtaaaaggattagaatgttgttttattcgttgcaagagtaaggttaaataaggaggcaggatggcctgccggtcccgtaatctgaagctgctaatttgtaagcctatagtttggatttgcacattctatttgttatactttttatgtatccatgaatagaaaattacgcctcgaaattccaaatttgtaataaatccgagagaccacatatttttttagtgtgactggttggtagcgacggtcttggcgtcttgcatagttgctgacacagaaaagacacctccgtccctctgtctggtacagtgagggtggggcatcaaaaacacaaagatgctgttcttatcaggcacagatgtttgccaagtataattccacgttgcgctatacagtcgggtttgctcgtatgcatttatgatctagatactta

SEQ ID NO: 3714 - DNA, 3103 bp, Zea Mays
cgttacacacagttcctttcaggcttcacccgttttgctctcgagtctctcccggttcggatccaaattcagcaatccgacctgagaccaagaccgcgcaccacgcggctcgccgccgatggcgaacgccgacgccgacgaagcgccgctgctctctgtggaacacctccgtccaggatcctgcagccgcgagctcgagctgcgggagttccgcgaccgctacgtgatccgttcgctcgacggcgccgccgctttcgccgtccttcgctccggcggctccatccgccctctctccccagaggaagccgtagctgagagcgactgcaaggtttccagaatatacggcgtggtcggcaccataagattgctcgctggaagctatgtactcgttatcacttctcagaaagatgctggctcttatctgggctcccctgtgtaccaagtgaactcaatgaaattcttatgctgcaacgaggctatcaagcacttgactccacaggaaagaagggatgaggcatacttcatgtctctcctgagaattgcagaaactacttgtggattgtattattcatatgacagggatttgacactaaagtaagtgctttgtcatgcatgtatctgaataaggcaaccaaaagacattggcttaatattcagaaaaggccaacaacctttgtgtagtgattatgcacatccttaagatatttttttttctcaaacaacacatgagaactgtgtgcatttcattaagtagagaaaaaaaaccaaaggagaagcagtgtgtggcgctgttagccttgtactaggtggcctagggaagttggcctcctggaaaaaagccgaaacagtcagagcaccctgaatgtcctggatccagagattctgatctaaatcctcctgtaccgttcatctcctcgtcgacatttgtaactaatcgattgcctgttagttccattgttccttgcagatgtgtagtaggttcttgaagtatggatctattgagcacttcttaagaggttctagttgtatgactgttatcatgtactgaatgcctctgtggtgcatttatttttcttttgttatactggattgtatctaactgatgagatagaaataatgcgatgatggaatgctcctcaatgtaaagctataaacactatgattatgtagcttgcagagggcatccaagttggctgctgggagggtacataaaccactatggaagcaggctgatccacgttttgtttggaacaaaaatttgttagaggaacttattgaagctaagcttgatgagttcatcatcccactgatacaaggaagttttcagtcagcacaatttaccttgaaggatagaccagtgaggataacattgttctcaaggagatgcaacaggcgtttaggaacaagaatgtggagaaggggtgcgaatcttgaaggcgccacagcaaattttgtagaaacagaacagttggttgagtatgaagatctcacatcctcatttatacagcttcgaggttcaattccacttctctgggagcaaatagtggatttaagctacaaaccacggcttagcattattgaacatgaagaaactcataaggttgttcaacgccactttcatgatctttcacaacgatatggcaagataattgttgctgacttgactgataaagcaggagagctgcattctcatttcattaagaggagaaaaaaacaagggagaggctgaaccatctcgttttaacagttgttctatttgtccatcgagcgacaacggttcatctaatctgttgttacttgcagcgaggtgatgaaggagatttgagcaatgcatttgctgctgaaatggacagaattcctggtgtcaggtatatacattttgatttccatcatgtttgtcgtggaggtaactttgacaatttgcaagctctctacaatcaaattgaggaagctattcataagcaaggatattttcttatgaacactaaaggagagattttgctggagcaaagtggtgtagttaggtccaattgcattgattgcctggaccgtacaaatgtgacacagagtttccttgcaagaaaatcattggattctcaattgcagctgatgggagcattattgtcatctgaaagcatttctctctctgataacattcatgatacattcaaaaaattatgggttgagcacggtgatgagctgagcctggagtatgctggctcttatgctttgaaaggggatctagtgagatatggaaggcagacattgcctggactaattaaagatggaatgagtgctctttcaagatattatttgaataattttcatgacggagtgcggcaagatgctcttgaccttattagcggttattatacagtcagccaaggcagctcttctccttttcataatggtgttgattcttcttcgtatctgccggtggcttcagcaatcatagttggtgggattaccgcgacaactttcactctcagtcaagttggacggaacgcgcagcacttgatctcctccattatctgtgcgggcttaacagtcggagtagtagccttggtgaaagccaatgggaaacagttttgctctaggccccgtctgtgtggtctaatctaatccttggtcttttccccccttccctttcatattgccctttgttagaaattgaatgtaaaaggattagaatgttgttttattcgttgcaagagtaaggttaaataaggaggcaggatggcctgccggtcccgtaatctgaagctgctaatttgtaagcctatagtttggatttgcacattctatttgttatactttttatgtatccatgaatagaaaattacgcctcgaaattccaaatttgtaataaatccgagagaccacatatttttttagtgtgactggttggtagcgacggtcttggcgtcttgcatagttgctgacacagaaaagacacctccgtccctctgtctggtacagtgagggtggggcatcaaaaacacaaagatgctgttcttatcaggcacagatgtttgccaagtataattccacgttgcgctatacagtcgggtttgctcgtatgcatttatgatctagatactta

SEQ ID NO: 3715 - DNA, 809 bp, Zea Mays
atgggaacgtaaccaagtcgaactgcatctttacaaatggttaacaagttctcgtgtatagcactagccggagttgcagcagagtatcttctgtatggacgtgcagaaggaggattagccgacatcaataaggtctgagcatcaattgcttctgctgggttcatatttcaccgtgttttatgttttgtgtatcccatataccttatgcgcagcttgatggattgctcaagggtttgggtttcacccaaaagaaagctgattcacaggtgagatgggctgtgctgaatactgttctcatactgcgtcgccatgaaaaagctagatcgcagcttgcagaggcaatgtctacagggaagtcggtgggctcttgcatccaagtcatagaagagtgtataagcactgacgatatttaacgtggatatgttgctgaccctacgttgtctcaatggcatgttatcaacaacaaatcaaggcttgtcaatccaaaagaggatttgagtattaaatccactcttaaggctagtttgagaaccttatttttttaagagattttcttttttttttaagataaattagtttattttctcttgagaaaatagaaatctcttggaaaattggagttgctaaactagcccttagtcaaaaatgactagtagagaatttaatcttcaattgccttctggatttacgtaaccgaacaagctctattctatgttagggctggtttgatggacagtgaattggattcccttgttattcaaaatcctgtctaccgaaccaaaccagtccttagtagttgttgccccctg

SEQ ID NO: 3716 - DNA, 1379 bp, Zea Mays
cataaaatcaacgcatggcacactgctgtatgacagcgttactggcttactgcagcggatctggttccgtggaccgcgagagaggtgagtaggattacaggaaatccaatccaacccgcgccggctgcgtggccactgccgccgctcggtcttgtgcttgtccaggtccaaccgtccaaggataaaaaatgagcacgaacctgggaggagcctcttgcttcggcttcggcttgactcagatgcagcccgccgccgttaggctccggttgccgcctgctcgcgccgcggacacttcgtcctcccagtcgccggcgcgcctgacggcggtgctggagcaggtggaccagttgctaagccaggggaacgacatggccgcgctctccctcgtgcgcagtacgcaggggggtgacggcgggctccgggcctttggcgccgccaggcaggtatattttggtggtggggtgagaaacttggttcttgatacaattggtcactatctcagccagaagtatcacaacagagttatccagcatgaagctggtcacttcttgatagcttacttgcttggagtgcttccaaaaggatacacaatcacaagcttagatacacttatgaatcaaggatcgcttaatgtgcaagctggagcagcttttgtggactatgagttccttgaagagatcaatacaggcaagctatctgccacgatggttaacaagttctcgtgtatagcactagccggagttgcagcagagtatcttctgtatggacgtgcagaaggaggattagccgacatcaataagggtttgggtttcacccaaaagaaagctgattcacaggtgagatgggctgtgctgaatactgttctcatactgcgtcgccatgaaaaagctagatcgcagcttgcagaggcaatgtctacagggaagtcggtgggctcttgcatccaagtcatagaagagtgtataagcactgacgatatttaacgtggatatgttgctgaccctacgttgtctcaatggcatgttatcaacaacaaatcaaggcttgtcaatccaaaagaggatttgagtattaaatccactcttaaggctagtttgagaaccttatttttttaagagattttcttttttttttaagataaattagtttattttctcttgagaaaatagaaatctcttggaaaattggagttgctaaactagcccttagtcaaaaatgactagtagagaatttaatcttcaattgccttctggatttacgtaaccgaacaagctctattctatgttagggctggtttgatggacagtgaattggattcccttgttattcaaaatcctgtctaccgaaccaaaccagtccttagtagttgttgccccctg

SEQ ID NO: 3717 - DNA, 3082 bp, Zea Mays
gcttggcttggcttgcattcacagttgcacgccggccgccgccaaccccgcccccacgtcgcgcgcgctgtctccctctcgcctctctcgtggagacgactgggcgacagccgacagccgctgtcgcccaacgcaagctgcccaggtcttcttcgggctcttcgccggcgacgagcacagccaggtttaggtcgagcaggggccgatgggggaagaggcggagagcaactgcaagcgcaaggcgccggactcgagcgtggaagagcagccgagcctcgcgccggcgccggcgcagtcgcaggcggacccggcggccaagcgcccgaacatctcccgctcttgcgtccacgaggtagccgtcccgaatgggtacgagtcggttaaggacgaggcggtgcacgggacgcttgccagcccggccttcaatggggagatggccaagcagtacccgttcaagcttgaccccttccagagcgtatccatcgcttgcctggagcggaacgagtccgtgcttgtctccgcgcacacttccgcggggaagaccgtcgttgcggagtacgccattgccatggcgttcagggacaagcagagggtcatctacacctccccgctcaaggccctgagcaaccagaagtacagggagctcagtcaggagttcacagatgtcgggctgatgactggcgacgtcacgctccatccgaacgccacatgcctggtcatgacgacagagatcctcagggcgatgctctacaggggctccgaggtgatcaaggaggttgcctgggttatattcgatgagatacattacatgaaggatcgtgagagaggggtcgtgtgggaggagagcatcattttcttgccccctgccatcaagatggttttcctttcggctaccatgtcgaatgcgaccgaatttgctgaatggatatgcagcctgcacaagcagccctgtcatgttgtgtatacggacttcaggcccacaccattgcagcactatatgtttccaataggtggttctggtctttaccttgtagtagatgaaaatggccagtttagagaagataactttgcgaagctacaagactcctttgctaagccaaataatcaactggatggaaggaaaggtggtggacctaaagcgagtggccgaattgcaaaaggtggaagcgcctctgggaattctgacatatacagaattgttaagatgattatggagcgcaagtttcaaccagtcataattttcagctttagtagaagagaatgtgagcatcatgccatgtctatgtcaaaacttgacttcagcactgaagaagaaaaggaatgcattgagcaggttttctgtaatgctattggttgtttagtggaggaagacagaagtttacctgctatagagttgatgttgccacttcttaaacgagtttgccatgggtcttaatatgcctgcgaaaacggttgttttcacgtctgtcaaaaaatgggatggcgatagtaaccgctatattggttctggagaatatatacagatgagtggaagagctggccggcgtggcaaggatgaacgtggtatctgtgttataatgatagatgagaagatggaaatgagtgttatcaaggacatggtgttaggcaaaccagcacctctagtcagtactttccgtctgagctactacactattctgaacttaatgagccgtgtggagggccaatttaccgctgagcatgtgattaggcattcattccatgaatttcagtatgagaaggcattgccagaaatagctcaaaagattacacggttggagaatgaagctaccttgcttgattcttctggcgagactgatcttgctgaatatcacaaattggggcttgatatatctgaactggagaagaaaatcatgtctgagatgattagaccagagagggctttgttgtatttggttcctggaaggctgagtgagggatggttcaacagactggggatggggtgtggttgtaaatgtagtgaagaaacctccagcatctgggactctccctcctgcattaagtgcatcgcgcagcaacaactatacagtcgataccttgcttcactgctcctctaattccagcgagaatggatcacgttcaaagccatgccctcctcgcccaggggaaaaaggtgaaatgcatgtggtgcctgtaccattgcctttagtatctggtctaagcagtgttagaatcaacattcctcctgatctacgaccacctgaagcaagacagaatatactttctgcagtgcaagaactaggaaagcgctacccccaaggtcttccgaaactacatccaatcaatgacatgggtattcaagaacctgaactagttgacttggtacataaacttgaagaccttgagcagaaacaatgctctcaccgacttcataagtccggtcaaagtgaacaggaactatcatggtaccaaaaaaaagcagatctgaatactgaaattcagcaactcaagtcaaagatgcgggattcacagctacaaaaatttagagatgaacttaggaaccggtcccgtgttctgaagatgctggggcatattgatgctgacggtgttctccagttaaaaggacgtgctgcctgtctaatagacacaggggatgaactgcttatcactgaacttatgttcaatggtacatttaatgatcttgaccatcatcaagttgcctcccttgctagctgctttgtaccttgtgataaatcaagtgagcagatacgcctaagaaatgaactttctaggccgatgatgcagcttcaggaggctgcaagaaaaatagctgaggtacaacgagaatgcaaactggaagtaaatgtggaggaatatgttgaatcaacctgcagaccctaccttatggatgtcatatactgttggtcaaggggagccacctttgcggaggtgatggaaatgaccgacatatttgaaggaagtgtcataagacttgctagaaggctggatgaatttctgaatcagttgagagctgctgctgaagccgtgggggaggttaaccttgagaagaagttcaagaatgcaagtgagagtttgcgtcggg

SEQ ID NO: 3718 - DNA, 1454 bp, Zea Mays
cccgagcccaccaaccctagggttctcacggcgccataagagcctctcctctctccccggccgcccgctgccgctgcttgcgcctctctcgcccgcatcgccgcagggttcgcaaagatggcagtgccgctgctgacgcagaagatcgtgaagaagcgggtcaagcagttcaagaggccacacctcgaccgctacaagtgcctcaagctggcgtaggcccaagggtatcgactcccgcgtcaggcggaagttcaagggatgcaccttgatgcccaacattggatacggctctgacaagaagacgaggcactaccttcccaacaagttcaagaagtttgtcgttcacaacgtctctgagctggagctgctgttgatgcacaacaggacatactgtgccgagattgcccacaacgtgtccacccggaagcgcaaggagatcgtcgaacgtgctgcgcaactggacatcgtggtcaccaacaagcttgccaggctccgcagccaggaggacgagtgaaatggccattatttccggttgtgatccgctggtgtgcaagatgttgctgagatccgagattcattctctgccatttttttatgcttatgttagacttttccaatggacaaaattctgttataagcggaagagtgatggcgaggaccatctagtttttgaccggacatcatgaagtatatgcagccttgtgcatgtaatggatctgatggtaatgaatctgtggctccgaagctacatgcatttttctgaggcgcaaatgttggcctgttcaaatgtagcctaatttattagttttcactaaccctagattctttctcttgatcaaaaagaaattctgtcctctcgagctccatcttagtgatcggtccgctagttcacgcaaattcgaagaagttatcacggacgagccacatgcagagaaacttgcacgtgtggttctggccgggctttccttcggtatctaataaccttgcagaatcggtatctaataaccttttctgctcgccgctggcgcatctctcctaactcttgcccttgcccatttattctggaataattttttaggagtactatttactttacttacaaacaatccagcgaaaattcagtttgggacgaatagaacagactatatcgagccaagagtattttcattactattgaaaatgatggataggtaaatccacaatcaatcatgtcctttaagtcgcatgttgctttctaccacatcgttttaaacgaagttttaccataacattcctctaatttcattgcaaaatggtatcaagaattgatccaatatggatggaatcatgaatagtcattgcttttgtatactaattcaaacctgttatctatggagaaaattggataaaagaaataagtatttatcggggaacactatgcaaagatacaatttatttaaacccatattctataa

SEQ ID NO: 3719 - DNA, 623 bp, Zea Mays
caaggttgttagaatcaggatactaggtgcatctccatgttcggcttgaggattcaggaccatttcacttacctaggagttgatatggaagcggacgactggagcacctgtagaatcatcacagctcaaagggttcagcagttccgactggagctagcgggcaacatcatgatgaccaagcacgatatcgacgtctccatcgttgaacctagtgtacaaaacagattggagcagttctagataggcggaacattcgttttgtccagattcagagaagcaacagcctcttgttaatgcagtggaaattgttcagagacgaaggcgacccttgttttctctattagttcggtcagaatgggatgttctttcagatcaaggaaataaatcgggagtcatctcttgtaacaaagagaatcagagcatgatgtacataaggaaaaatcataggcacggtttatgctggatatggtagggattgcttctgtgtaaatatatgtatacaatgtaaacttgcaatggctatatttgcagcaacataagcaccaagctaactgaaaaatatcagttaaccgaatgaatgaggcgtatctatatatacatgatgtgagcttgcaatagcgtat

SEQ ID NO: 3720 - DNA, 2084 bp, Zea Mays
cttggcacaaccaaccgggggctcggaagaggagaagagccgaccagccgggcatattctctcttcctccctccggtgctctctccagcggtccagccgcagcgccctgaaagagggaggcttccactcttctttctccccgagcacccgccgttcagatttagcctgggtgcgtctgcaggttccggttcatggagagatggagcctgggtgccaaagtggtagctctcgcactcctgctgtctgctgcttctcatggaagaggtagttccgtgcgattctctgttggttgctgggttgctgttttatgtaaattggcaccaaaggggtccccgacagcaagctagcttaatagtaacaaacaagataagtatcgagttttcatcgattgtgctaacatctaggaaaagctctgcgttgtggaggaggggggaagtaggtgacaggtgtgtatcagttgctgccatttgctagttcctgctacaggactttgttgttcatatcgtggtgtcctgtcctgattgctagaaaggaagccattattggtggccctacaaaacaaaacaagttaggaaattgcaaaagtagatggttgatgaaccgtaactgcacagaatcgttacaagttgtttttttaagttgacattgcactcaggattctagtcgctggccgcatccctaatattcagtctgccatattttatttcccttatcacagagttgcctgtcaagagtagtgaccgcagttttatctacaatcatactcttgcaaagacgcttgtggaatatgcatcagcggtgtatatgacagatttaaccgctctgtttacgtggacatgctcaagatgcaatgacttgactcaaggattcgagatgagatctctaattgttgatgtggagaactgcttgcaggcatttgttggtgtagatcatagtctgaattcgataattgttgcaatcaggggaactcaagagaacagtgtacagaattggataaaagacttgatatggaagcagcttgatctaagttatccaaacatgccaaatgcaaaggtgcacagtggatttttctcctcgtataacaatacaattttgcgtctagctatcacaagtgctgtgcacaaggcaagaaagtcatatggagatatcaatgtcatagtgacaggccactcgatgggaggagctatggcttctttttgcgcgctcgatcttgctatgaagcttggaggtggcagtgtgcaactcatgacttttgggcagcctcgtgttggcaatgctgcattcgcctcatacttcgccaaatatgtacccaacacaattcgagtgacacacgggcatgatattgtgccacatttgccaccttatttctcctttcttccccagctgacataccaccatttcccaagagaggtatgggtccaggattctgatggcaacacaactgaacggatttgtgacgacagcggtgaagacccagattgttgcaggtgcatctccatgttcggcttgaggattcaggaccatttcacttacctaggagttgatatggaagcggacgactggagcacctgtagaatcatcacagctcaaagggttcagcagttccgactggagctagcgggcaacatcatgatgaccaagcacgatatcgacgtctccatcgttgaacctagtgtacaaaacagattggagcagttctagataggcggaacattcgttttgtccagattcagagaagcaacagcctcttgttaatgcagtggaaattgttcagagacgaaggcgacccttgttttctctattagttcggtcagaatgggatgttctttcagatcaaggaaataaatcgggagtcatctcttgtaacaaagagaatcagagcatgatgtacataaggaaaaatcataggcacggtttatgctggatatggtagggattgcttctgtgtaaatatatgtatacaatgtaaacttgcaatggctatatttgcagcaacataagcaccaagctaactgaaaaatatcagttaaccgaatgaatgaggcgtatctatatatacatgatgtgagcttgcaatagcgtat

SEQ ID NO: 3721 - DNA, 2435 bp, Zea Mays
ctgaagagtgggagtgtacccggcggcctggcctaccgccttcatttcttggcacaaccaaccgggggctcggaagaggagaagagccgaccagccgggcatattctctcttcctccctccggtgctctctccagcggtccagccgcagcgccctgaaagagggaggcttccactcttctttctccccgagcacccgccgtacgtctcctgcaccttcttccagtttctcccatttcagtttgtccactccctgtcattcctgccgcctcgacctccccgctctggaaggtcaaatccttcgcccctaagcttttatttctgtttgtatttggttctggaatcgttgcctgctggctgctgctgctgcacattacccccgtattctgtgctccggccgtgggattgccctgctcgctttctttcaaaaaagaaaaggaaaaggagcaattgctctgctcgctttcagtttgtgtggttgacgtctctctctgagtctctgtgcttcagcaggttcagatttagcctgggtgcgtctgcaggttccggttcatggagagatggagcctgggtgccaaagtggtagctctcgcactcctgctgtctgctgcttctcatggaagaggtagttccgtgcgattctctgttggttgctgggttgctgttttatgtaaattggcaccaaaggggtccccgacagcaagctagcttaatagtaacaaacaagataagtatcgagttttcatcgattgtgctaacatctaggaaaagctctgcgttgtggaggaggggggaagtaggtgacaggtgtgtatcagttgctgccatttgctagttcctgctacaggactttgttgttcatatcgtggtgtcctgtcctgattgctagaaaggaagccattattggtggccctacaaaacaaaacaagttaggaaattgcaaaagtagatggttgatgaaccgtaactgcacagaatcgttacaagttgtttttttaagttgacattgcactcaggattctagtcgctggccgcatccctaatattcagtctgccatattttatttcccttatcacagagttgcctgtcaagagtagtgaccgcagttttatctacaatcatactcttgcaaagacgcttgtggaatatgcatcagcggtgtatatgacagatttaaccgctctgtttacgtggacatgctcaagatgcaatgacttgactcaaggattcgagatgagatctctaattgttgatgtggagaactgcttgcaggcatttgttggtgtagatcatagtctgaattcgataattgttgcaatcaggggaactcaagagaacagtgtacagaattggataaaagacttgatatggaagcagcttgatctaagttatccaaacatgccaaatgcaaagtggatttttctcctcgtataacaatacaattttgcgtctagctatcacaagtgctgtgcacaaggcaagaaagtcatatggagatatcaatgtcatagtgacaggccactcgatgggaggagctatggcttctttttgcgcgctcgatcttgctatgaagcttggaggtggcagtgtgcaactcatgacttttgggcagcctcgtgttggcaatgctgcattcgcctcatacttcgccaaatatgtacccaacacaattcgagtgacacacgggcatgatattgtgccacatttgccaccttatttctcctttcttccccagctgacataccaccatttcccaagagaggtatgggtccaggattctgatggcaacacaactgaacggatttgtgacgacagcggtgaagacccagattgttgcaggtgcatctccatgttcggcttgaggattcaggaccatttcacttacctaggagttgatatggaagcggacgactggagcacctgtagaatcatcacagctcaaagggttcagcagttccgactggagctagcgggcaacatcatgatgaccaagcacgatatcgacgtctccatcgttgaacctagtgtacaaaacagattggagcagttctagataggcggaacattcgttttgtccagattcagagaagcaacagcctcttgttaatgcagtggaaattgttcagagacgaaggcgacccttgttttctctattagttcggtcagaatgggatgttctttcagatcaaggaaataaatcgggagtcatctcttgtaacaaagagaatcagagcatgatgtacataaggaaaaatcataggcacggtttatgctggatatggtagggattgcttctgtgtaaatatatgtatacaatgtaaacttgcaatggctatatttgcagcaacataagcaccaagctaactgaaaaatatcagttaaccgaatgaatgaggcgtatctatatatacatgatgtgagcttgcaatagcgtat

SEQ ID NO: 3722 - DNA, 2021 bp, Zea Mays
ccaaaataagcgcctgcccccagcggaaagcgaccgccccctctgcctccccctcctctcctccgtatagcggcggcaggcccgctggagctggcggcgagggcaatgccgcgagtccgccggcggtgccggggcgcgatgctgctgctcctcgtcgcgtcggtgctcgcgcccctcgtgctgtacggcggctcccccgtctctgtcgcgcccctcccggactccaccgtggcgagcggcgcgttcgacccggagggcgcgtccaatctggtgtggtcgcacatggcagcgtccgcggtgtctctggccaaaggtttgataactgaaaggctcggggagcacaaaaaccgtgtgctatcagcaactgatcactggcaggtggttgaggcagggagcaggaaccgtgcatctggaaaatcaggtactgctggggtcagggaggaccatcacttgccgaattcggaagaggaaggtgacctggttgtcgtggagagtggcagtgctaggtttgggcaggaggacgtcattaaggaggttgtgggaagccagagaagggcagatggatctggtgagcccggggatagcatggaggtggacgagcagaaggcaaaagaagttgggatagagttgcctcacgcaactgatgtgctgcacaaaaacgggtcagatggactagaaatgaacgatgtttctggattgcgcactgttggaatcctgaatacatcttctgcgaaggaaagtgacgttcatagtttatccaataagatgaaacatcctaatatttccagagagcagcaaacaaggacaagtaacagtaatgctgctcaccatgcaacaaatagtattactgatcaaaccacagctttgccagatgctacaattcgcatcatcaagaaccagcttacgacagcaaagatgtaccttggattgtttgcttctaggggtaatcatggcttcacaagggagctccgtgcacggatgagggatatacaacgagcactaggcgatgcaaggagtgatcggcaattacctcataatgtccacagcaaaactagagcaatggagcagacactggtgaaggtcaggaaaattcatgatggctgctcaagtgctgtgaataggctccatactgtccttcactcaacagagcagcaactcgaatcaaacaaaagacaagctaactatctagcacaagtggctgcaaaatctctacccaagggtctccattgccttacactgcggcttacaaatgagtactatttcactaactcaaagaataaagactttccctacgtggagaagctggaagaccccaaactctatcattatgccttgttttcagacaatgtattggctgctgcagtggttgttaactcaactcttgtccatgctaagaaaccagaaaaacatgtattccacattgtgacagatagtcttaactatgctgcaatgaaaatgtggttcctggctaatccctttggtaaagccgctattcaggttcagaacattgaagagtttacatggttaaactcaagctacagtccagtgctgaagcagttggaaacgcggtttatgattgattactacttcagaactgggcatgctaggcacgatgaaaatcccaagtttcggaaccccaagtacttgtcaattctcaaccatctgaggttctatctccctgagatcttcccaagacttaacaaggtgttatttctggatgatgatactgtagtgcagcgagacctaagtgcgctttggttggtagatctcaaaggcaaggttaatggtgctgtcgagacctgtagacaggacttccataggtttgataagtacctcaacttctcaaaccctcttattgccaagaattttgatccacatgcttgtggttgggcatatggcatgaacatgtttgatttgtccgactggagaaagcaaaacatcactgaggtctaccatacctggcagaagttggcacttcaagaacagctgtgcaggctggtatcttagtagggttgcagcta

SEQ ID NO: 3723 - DNA, 2427 bp, Zea Mays
ccaaaataagcgcctgcccccagcggaaagcgaccgccccctctgcctccccctcctctcctccgtatagcggcggcaggcccgctggagctggcggcgagggcaatgccgcgagtccgccggcggtgccggggcgcgatgctgctgctcctcgtcgcgtcggtgctcgcgcccctcgtgctgtacggcggctcccccgtctctgtcgcgcccctcccggactccaccgtggcgagcggcgcgttcgacccggagggcgcgtccaatctggtgtggtcgcacatggcagcgtccgcggtgtctctggccaaaggtttgataactgaaaggctcggggagcacaaaaaccgtgtgctatcagcaactgatcactggcaggtggttgaggcagggagcaggaaccgtgcatctggaaaatcaggtactgctggggtcagggaggaccatcacttgccgaattcggaagaggaaggtgacctggttgtcgtggagagtggcagtgctaggtttgggcaggaggacgtcattaaggaggttgtgggaagccagagaagggcagatggatctggtgagcccggggatagcatggaggtggacgagcagaaggcaaaagaagttgggatagagttgcctcacgcaactgatgtgctgcacaaaaacgggtcagatggactagaaatgaacgatgtttctggattgcgcactgttggaatcctgaatacatcttctgcgaagctttgccagatgctacaattcgcatcatcaagaaccagcttacgacagcaaagatgtaccttggattgtttgcttctaggggtaatcatggcttcacaagggagctccgtgcacggatgagggatatacaacgagcactaggcgatgcaaggagtgatcggcaattacctcataatgtccacagcaaaactagagcaatggagcagacactggtgaaggtcaggaaaattcatgatggctgctcaagtgctgtgaataggctccatactgtccttcactcaacagagcagcaactcgaatcaaacaaaagacaagctaactatctagcacaagtggctgcaaaatctctacccaagggtctccattgccttacactgcggcttacaaatgagtactatttcactaactcaaagaataaagactttccctacgtggagaagctggaagaccccaaactctatcattatgccttgttttcagacaatgtattggctgctgcagtggttgttaactcaactcttgtccatgctaagaaaccagaaaaacatgtattccacattgtgacagatagtcttaactatgctgcaatgaaaatgtggttcctggctaatccctttggtaaagccgctattcaggttcagaacattgaagagtttacatggttaaactcaagctacagtccagtgctgaagcagttggaaacgcggtttatgattgattactacttcagaactgggcatgctaggcacgatgaaaatcccaagtttcggaaccccaagtacttgtcaattctcaaccatctgaggttctatctccctgagatcttcccaagacttaacaaggtgttatttctggatgatgatactgtagtgcagcgagacctaagtgcgctttggttggtagatctcaaaggcaaggttaatggtgctgtcgagacctgtagacaggacttccataggtttgataagtacctcaacttctcaaaccctcttattgccaagaattttgatccacatgcttgtggttgggcatatggcatgaacatgtttgatttgtccgactggagaaagcaaaacatcactgaggtctaccatacctggcagaagttgaatgaaaacaggctattgtggaagctaggtaccctccctgctggccttgtaaccttttggaaccgcacgttccctctcgatcgttcgtggcatcaattaggacttgggtacaacccaaatgtcaacgttaaggatatcaggcgagcggctgtcatccactacaacggaaacctgaagccctggcttgagattggattgccgaaataccgcaagtactggtcagcacacgtcaattacgatcaagtgtttctacgggagtgcaacataaacccctgaacagcaaatagtggtgcatggtttatatccttttcttttcaatgatttcttagaccaattctttgtgctctaggtaatttaaattgcctagagtgcttattctttgtaactgatgtctttcctgatgtaaaggtgccagcaggttggcggtaggcttggatcatacaaacagttagtagccaaaggcatatcccgttttgtgcttataaatgctaatatggtagataatttttgactgtatgtatgaattgaatgctatgttagatgccctcgcaaacagtacagtttgcgacgacccatttccact

SEQ ID NO: 3724 - DNA, 2423 bp, Zea Mays
atgggcacagggggagacggggacaaggcggggccggcgctgccgctggaggcgcttttggcgctcgggctcgaccagcgcaccgccgagaacgcgctcgtcaacgccaaggtcaccgccaacctcgccgccgtcatagctgaggctggtataaaggaatgtgacaagtcaattggtaatcttctatatgcagttgccaccaagtacccaactaatgcacttgttcatcgccctgtccttattagctatgtcttgtcaacaaagataaagagccctgcacagctagatgctgccctctcatttcttactaatactggtcctgattctctagatgtggacaagtttgaagaagcatgtggtgtagttggtatgctatgtggacaggttaggaagagacacccctggggtgatgctaaggcagtaaaggaggaaattgacaagaggcttgcagaaatcctaggtccaaagacagaagctgacagtataaaaccagtgaaaaagaagaaggaaaaaacagcaaaagttgaggagaaaaaagttgcagttgccactactgccccaccatctgaggaggaattgaacccgtatactatatttccccaaccagaggaaaactttaaggttcatacagaaatatttttcagtgatgggaacatatggagagcacataacacaaaggaaattttggaaaaacatctcaaggcaactggaggaaaagtgatgacccgttttccaccagaacctaatggatatcttcatattggtcatgccaaggtttgacgacacaaatccggaagctgaaaagaaagaatacatagatcacattcaagaaattgtccattggatgggatgggaaccctacaaagtaacatacacgagtgattatttccaacctttgtatgagcatgctgttgagttaattcggaaagggctagcctatgtggatcatcagactgcagaagaaattaaggagtacagggaaaagaagatgaatagtccatggagggataggccaattgaagagtcattgaatttatttgaagacatgaggcgtgggttgattgcggagggtgcagcaactctccgaatgaagcaggatatgcaaaatgagaacaaaaatatgtctgacttaatagcatatagaataaaattcacccctcatccacatgctggtgataattggtgtatctatccgagctatgactatgctcattgcatggtggattctcttgaaaacatcacgcattcgctgtgcacacttgagtttgacatacgccgcccttcatactactggctacttgttgccttgggtctttatcaaccatatgtgtgggaatattcgaggctaaacatatcaaatactgtgatgtctaaaagaaagttgaatcgacttgtgacagagaactgggtagatgggtgggatgatccccgcttgttgacactggctggactccggcggcggggagtatcatcaaccgcaataaattcctttatccgtggaatcgggataacaagaagtgacaacagcttaattcgtgttgatcgtctagaataccacatcagggaagagcttaacaaaacagcccctcgaaccatggttgttttgcgtcctctaaaggtggtaataactaacttggaagaaggaaaagtactagaccttgatgggaaaatgtggccagatgcttctgatactgatgcttcctctcactataagcttccgttctcaagaactgtctacattgagaaaactgattttcgccttaaggactcaaaagactactatgggctggcccctggtaaatctgtcatgctaaggtatgcgttccccataaaatgcacagacgttatctatggtgatactcctgatgatattgttgaaattcgagcagaatatgatcctttgaagacttctaaacttaagggtgttctgcactgggttgctgagccagcacctggtgtcgaaccattgaaggtggaagtaagactattcgagaaattgttcatgtcagagaatcctgctgaattggaggattggcttggtgatcttaacccgcactcgaaagaggtgataaaggacgcttatgctgtaccatcgcttgccactgcagttctgggcgacaagttccagtttgagcggcttggttacttcgccgtggacacggactccactcctgagaagctcgtgttcaacagaactgtcaccctccgtgattcattcggtaaagctggaccaaagtgacttccagtgtaatgtaggtagggcgtgggtgctcggttgcataggcgcacctgagctatacttttttttgaagaagaaaatgatcttgtaatacagaacagcctaaaggcctcaatctttgtaaaatttacatgtgactgcagtgcagcttgtttgcttcgaaggaatcagattttgtatggta

SEQ ID NO: 3725 - DNA, 2469 bp, Zea Mays
atgggcacagggggagacggggacaaggcggggccggcgctgccgctggaggcgcttttggcgctcgggctcgaccagcgcaccgccgagaacgcgctcgtcaacgccaaggtcaccgccaacctcgccgccgtcatagctgaggctggtataaaggaatgtgacaagtcaattggtaatcttctatatgcagttgccaccaagtacccaactaatgcacttgttcatcgccctgtccttattagctatgtcttgtcaacaaagataaagagccctgcacagctagatgctgccctctcatttcttactaatactggtcctgattctctagatgtggacaagtttgaagaagcatgtggtgtagttggtatgctatgtggacaggttaggaagagacacccctggggtgatgctaaggcagtaaaggaggaaattgacaagaggcttgcagaaatcctaggtccaaagacagaagctgacagtataaaaccagtgaaaaagaagaaggaaaaaacagcaaaagttgaggagaaaaaagttgcagttgccactactgccccaccatctgaggaggaattgaacccgtatactatatttccccaaccagaggaaaactttaagaaatatttttcagtgatgggaacatatggagagcacataacacaaaggaaattttggaaaaacatctcaaggcaactggaggaaaagtgatgacccgttttccaccagaacctaatggatatcttcatattggtcatgccaaggctatgtttatcgattttggtctggctaaggagcgaaatggccattgctaccttaggtttgacgacacaaatccggaagctgaaaagaaagaatacatagatcacattcaagaaattgtccattggatgggatgggaaccctacaaagtaacatacacgagtgattatttccaacctttgtatgagcatgctgttgagttaattcggaaagggctagcctatgtggatcatcagactgcagaagaaattaaggagtacagggaaaagaagatgaatagtccatggagggataggccaattgaagagtcattgaatttatttgaagacatgaggcgtgggttgattgcggagggtgcagcaactctccgaatgaagcaggatatgcaaaatgagaacaaaaatatgtctgacttaatagcatatagaataaaattcacccctcatccacatgctggtgataattggtgtatctatccgagctatgactatgctcattgcatggtggattctcttgaaaacatcacgcattcgctgtgcacacttgagtttgacatacgccgcccttcatactactggctacttgttgccttgggtctttatcaaccatatgtgtgggaatattcgaggctaaacatatcaaatactgtgatgtctaaaagaaagttgaatcgacttgtgacagagaactgggtagatgggtgggatgatccccgcttgttgacactggctggactccggcggcggggagtatcatcaaccgcaataaattcctttatccgtggaatcgggataacaagaagtgacaacagcttaattcgtgttgatcgtctagaataccacatcagggaagagcttaacaaaacagcccctcgaaccatggttgttttgcgtcctctaaaggtggtaataactaacttggaagaaggaaaagtactagaccttgatgggaaaatgtggccagatgcttctgatactgatgcttcctctcactataagcttccgttctcaagaactgtctacattgagaaaactgattttcgccttaaggactcaaaagactactatgggctggcccctggtaaatctgtcatgctaaggtatgcgttccccataaaatgcacagacgttatctatggtgatactcctgatgatattgttgaaattcgagcagaatatgatcctttgaagacttctaaacttaagggtgttctgcactgggttgctgagccagcacctggtgtcgaaccattgaaggtggaagtaagactattcgagaaattgttcatgtcagagaatcctgctgaattggaggattggcttggtgatcttaacccgcactcgaaagaggtgataaaggacgcttatgctgtaccatcgcttgccactgcagttctgggcgacaagttccagtttgagcggcttggttacttcgccgtggacacggactccactcctgagaagctcgtgttcaacagaactgtcaccctccgtgattcattcggtaaagctggaccaaagtgacttccagtgtaatgtaggtagggcgtgggtgctcggttgcataggcgcacctgagctatacttttttttgaagaagaaaatgatcttgtaatacagaacagcctaaaggcctcaatctttgtaaaatttacatgtgactgcagtgcagcttgtttgcttcgaaggaatcagattttgtatggta

SEQ ID NO: 3726 - DNA, 794 bp, Zea Mays
gggggcccccctcgaggtctgagatgctcaagttccaagtaccgttcctgcacgattaatggtgggagggatcgcctctgtagggatactcgaagcaaacttagttttgtgaatgaaggacagctgcttcttgtttctgaagaaagtatatctgatctcaacagccgattaagttcagtcatggaaatggtaagcaaggggtgttggttgatgcaatgagatttcgtccaaatattgttgtctctgggtccacaccgtacaatgaggataactggaaaaggcttcgcataggggaggcctattttacttccatgggaggatgcaaccgttgtcagatgatcaaccaatatcagagctcagggcaggtgatcaagtcaaaggaaccgctggcaactttagcatcgtatagacgaaaaaaggggaagattttgtttggtgtcctgttgaactatgaagacggcatggagggagaagatgatgccgttgtagagagatggatcaaagtggggcaagaggtacatacatacctcaatgatgacttgtgcacatacatacccggaagtttcacctgcacaagaggctgacgggtaacagttgtcacaatacgtgaaaaaatatagactttcagatgttattaacaagaaagtggtgccatatgtatgtaacaattttcttttcatgcctgtatgtgacacataaggccttgaagcctgtattcagacacaaatacatagaaaacaaatgtacgtttcactcatgtcagtgctggtgcgaccatagagtgagctacagac

SEQ ID NO: 3727 - DNA, 1411 bp, Zea Mays
aaccactgcaatccaaccacatagattttagcaggtgtgcaatccacaaggagctcgtcacagaacacagtctagaacaccaccgtgcaaacgacagcctgtaggaaaccgtcatggctgccggcggtgccgaccaaagggggaataatgctgcgacgacgacttttgtggtgccagcggtggcgctgagcttggggaagccgatgccgcgggtgggcttcggcacggcaacggcgacgctgggccaagcggagggccgcgccggcgtgacggaggcgatcctccgcgccctggacgctgggtaccgccactttgacaccgccgcagtctacaacacggaggcctcgctcggggacgcggtcgttgaggccgtgcgcgccgggactgtcgcctcccgtgacgatctctacgtcacgtccaagctctggatcaccgacgcgcaccccggccgcgtcctaccggctctccacaggacactgcagaatctgcagatgtcgtacgtggacctgttcctgattcaccacccggtgagcatgcgggcgccggccgacgacgaggctgaaggagcaggccccgcggtggtggtgaagaaagacctggtggccatggacatggagggcgtgtgggaggagatggaggagtgccacaggcgagggctggccagggccatcggcgtcagcaacttcagctgcaagaagctagagcacctgctctccgtcgccaagatccctccggctgtcaaccaggtggaggtgaacccgtactgccggcaggagaaggtcaggaatttctgcagggccaatggtatccagctctgcggctactctgcgatgggtgcgagcggcacagcgtgggccaacaactccgtcatggactcccctgtcctcaaacaaatcgcccacgctcgcggcaaaaccgtcgcccaggtgggtttacgagcagggtgactgcgtgatcgtcaagagctttaaccagagcaggatgcgagagaacctccacatcttcgactgggagctcaccgacgatgaccaccgcaagattagcgagctccctgagtccaggggcaactacgatttcttgatccatgaatctgggccgtacaaaacagcacaagagttatgggacggtgagatcacagccggccaatctaaccaaacgccgctcgtctccgacgactgatcatacagctttgtgatctcctttgtcacgaagaaggcctggagtatctctctttgtcaagattcaaatggttagaataaaatatttgtgacactgtatagaatgtcagcgacacgagagaaaacattacttatcttcaaacataaaaatccgtcgataattaatcgcaactgtgaagtctatctaaatctgcatgtgatcgtatctgcaggtgcaattttaaacccgtacc

SEQ ID NO: 3728 - DNA, 3556 bp, Zea Mays
atctgaagatcattaattatattggagtgtgttacatgataatatctatatccggatatatatcttgaggatacatatataacatgcaccagtgtgaggttagctagaccttgcctgtatataaacgcacgcgcacacacatggagacacaaggggtcttcctcatttttctcgtctgaaaaagaagagagcacaacaggcatccctcttctaacctcctgatgatggcactcaacggcggttggagaaagaccttcgtgtccatcctgacgacatgctttcttgtggtggttgtaattgtttccctatcctgcgaagcaaaaggcggcgtcgtccccaggttgcggccaccattctgctttccatacgatcgtgaatactgcacgccatttcactgcggcaaagtttgccaagagtacaacttccctgctaagaatggcggctactgcgataaacgtggtgacccatggaagtgctgctgtccatattgaaacgtacaaaatgcatgcatccatccgtgctgctacctgatcgatatacatgtcaatcatcatcaatatatataatgaatgaataaaatgcatgtgttggaaaatactgcagtgcaggagcttatgatcccacgatctcgcgtccgagactcaatagatttgttgggcctaatcaatatcattgcccagatcgcacttgcatgtgtagatttgttaggccaaggcccaaatttttcggatctttatctcaacttgcacagacgacctttagatattactaatttaagaatttggactgttaaaaaccggttagtctctatttcaaacttgatcagatttgtagaaaagattgtcaacttctgtacgtgacaccaaataaatatactatgaaaacatgtttcataataaatctgattatatatacctcagtgacaccagctgagctatgagcaaaaacaggccgtaatgacagaacagggaaaaggacgatacaccacctagcttatcacaaacctcaggcaagcttaagaaaatgcttggtgtcagggtcgaggccgatcaccaagataccgtacctacaaaacaaaccaagtaaaattcagcatcccaaacaaacgcacagagacatacagtagtagtttactgttccccagcatcgacacctcagaactgcggccaaaagccgaacaccgtcatgatccatgaaccgttaatggcccagcacgtacgtcaacaatagatagggggtgcatgaactgacctccactgagacccacggcaggacaagtgttatcatcagctcaccgtgtgcttgctaacctcacctcacaggccaaagcaaagcagcctttagttttctatccatccatccactgcccggtggacgctgcttttgatacctcacctttttatttttatttggctcctcttggaccagcgttagtgtgtggtggtggtgagaccaaatcatgtgagactcagactgggtggtgcttgtcgctcataacgttcatctgcatctccgttggccaccgctggccaggtcccagatgatcacctcggcgttccttatcaccaccatatgcttttgggagaatcggttggctcgtcggcatgcaggcatccacatctcggctaagaaaactggctggctcatcggcttgtgctggtctccatcaccaattcaccatgcgatgaaaaccatgttcagattgttgatgtttaggctgattgacagctgctgattctgcacatatgcataaaacaaaccctttcagtaaaaaaatacattttttcagtaaaactgatactgccatacttgcacatgaaaatatgaaatcaagcataaatactgtacacatttgttgaacttctgttgctcttaaactactaactcttgcattatggagagtcggaaagaacaaattcacgcatgtgagatgagaaaaggacctgacttaggtcatgcattccatggaataataaggtttcatcacgatgatgatgactgatcagtccctaaagtcagtactagtacatcctactaaagccagggaagcgaggacgacgagctcttggtaccggtcagaggctacagcagcaaccgacatatagacagattaaagaagcgcaaaagacaaacaagcaaacaaacagagcaatggcagcaggtcgattgggctctccattagtggaatatggagcagtgttcagtgcacaggggggcttccaaaagcaggatagatgccaagataacaagttgatgaggccgtccccgccacaatgtggactgcagcacaggttgcaggctggagttcatcaaggatttgaacctggaactggagcccacaagcacacagaggaggaagaacaccaagactggttcccaacctatccaaggtagaagcgagcaacgttagtgtggtagtaacatggtgactgtgagagaggagatgcgtaaggggccatggacagagcaggaggacattcagctggtatgcactgtccgcctgtttggtgaccatcgttgggacttcattgctcaagtctcaggtttgaggggttggagaactacaacttaggcctcaacaggacaggaaagagctgccgcctgcgctgggtgaactatcttcaccctggcctcaagcatggccgcatgtcaccacaagaagagcgcattatcattgagctccatgctcggtgggggaacaggtggtctaggatagcaaggaggctgccagggcgcacagacaatgagatcaagaactactggagaacacacatgagaaagaaggcacaggagaggaagatgggcatgccatcaccttcatcctcatcctcctcactgacataccaaacctgccttcttgacaccattccagtcattgggatgggcagtggtgacactcacaatggtagctgtgtcaccagcaccctcgagaacacacagagtgtcatggatggatatcccatggatcagatatggaaggagattgaggcaccacatgcacctaacttgctgagtattgctgaagggaaagagaagacgtgcagcagtagcccctgtcatctaccatcacctgtaatgtgggactacaaatgccctgagatattctggaagatgggagatcaagaaatcatgatgtgatggaaaatgaaatcaagatgttggctgcacgatttggttatgggcttatggtaaataaggccatcgctattgaaggctgaaggaatacatctatattggtcaggccactcagctatctgcctagcagatttgcagtatttgtacttcctaactatgcttgcattagtatgcagtatttttaaatctagtgtaacactggtggtatgctcataatgtatgtatctatgtagtttgaaaaatagtttgtatcagtttgtgcaatagtgtggacgctctatatgcatgatatatctatttatctctgttcttgttgtgctgaacaaataacagcataatatggtttgcagttattgttacatagaatatgatgaagattgaatattacatttaaactcatataatttccaacggataaagg

SEQ ID NO: 3729 - DNA, 2151 bp, Zea Mays
atgacagtgagctagctagtgtgagtagaagcaagcagcaagatgggagaaatggcgcatgcttgctctgcccctcgcccgtctcccgctcaccatttgtgtgtgcgcatcctactagcgtacctgcttgcggcgcggtggctcgtgccatcctgctcggcggcttctttcttccgcttcccttggcccgccgagcggcacgactaccgtgacgcgctggccaagtccatcctcttcttcgagggccagaggtcggggcggctgccgcctggccagcgcgcgtcgtggcgcggggactccggcgtgtcggacggcgccgcggccggggtcgacctggagggcgggtactacgacgccggcgacaacgtcaagttcggcttccccatggcgttcaccaccaccatgctggcctggagcgtcatcgagttcggcgactccatgccgcgcgacgagcgccgccacgccgccgccgccgtccgctgggccaccgactacctcctcaagacgctcgcccaccccggcgtcatcttcctgcaggtgggcgatccgtggaaggatcacgactgctgggagaggccggaggacatggacacggaccgcacggtgtacaacgtcagcgcggggcgcccgggctcggacatcgcgggggagacggcggcggcactggcggccgcgtccatggtgttccgagatgacgacccggagtacgccgagacgctgctcacgagcgcaaggaaggcgttcgagttcgcggacacgtacaagggcgcgtacagcgacgacccggacctcagggcagggggctgccccttctactgcgacttcaatggctaccagcgccaatctgatggtggaaaaaataagtaggtcaaattcataacacaaatatagaagagagaaaaaaggacgagctgctgtggggggcagcatggctgaggagagcctccaaggatgacacgttcctccagtacattcagaacaacggcaagaccctgggtgcagaggacagcagcaacgagttcgggtgggacaacaagcatgccggcctcaacgtcctcgtctccaaggagttcatagaaggcgccgcgctgcctttgcagtcgtacaaggagttcgcggacagcttcgtatgcacgctcatcccggagtcgtcttcttccccgcacatcacgtacacccccgggggcatgatctacaagcctggaggcagcaacatgcagcacgtcacctccatctctttcctgctcctgacctacgccaagtacctctccaagtcctctcataccgtcgactgcggagacgtttcagttggccctgaaactcttcagctgcaagccaaaagacaggtactgtgatacctctgaaactcccgacagattgccctctgatgaacatttcgaactatctgcaggtcgattacctgctaggagacaacccgatgaagatgtcgtacatgatcgggtacggcgaccggtacccgcagcggatccaccaccgggcctcgtcgttgccctcgatcagggaccatcctcagccgatggcgtgcaaggaaggcacgccgtacttcaactcatccggtgcgaatcctaacccgctggtcggcgcggtggtcggcgggccgggggaggacgacgcttacgaggatgaccgtgcggatttcagaaaatctgagcccaccacctacatcaacgctcccttggtaggggtccttgcgtacttcgttggcaacccgaatcctggtcataacaccagacattgagcatcgcagcctctgaatctttcttggtgtgtgtgtatatatttttatatatgagatcgagtggatggagctatagataagatacttgtaggtgagagagacaaagagagtttgtcttgcatgattttttttttttggccttttgttgttgggtttgcactgaacttgtttggacatgtgcaagtgccattttcactggactagtatagtcatcagtgagaaatattgtactttggtttttggtttggaaggttctaaaggaactcatagcttgaaaaaaaaactaatgccatatggaagactgttttgactatcatggtgtcctgaaaattgtggcagaataaatgctgaaagtttgtagagggctatttgctgaggttaaaggacatcac

SEQ ID NO: 3730 - DNA, 1347 bp, Zea Mays
cggagggagcttgctgttgctgcttcgacggcgtagaggaacacgataagcacggcggcggccgcgagcacgattcgggttgccaacgaagtacgcaaggacccctaccaagggagcgttgatgtaggtggtgggctcagattttctgaaatccgcacggtcatcctcgtaagcgtcgtcctcccccggcccgccgaccaccgcgccgaccagcgggttaggattcgcaccggatgagttgaagtacggcgtgccttccttgcacgccatcggctgaggatggtccctgatcgagggcaacgacgaggcccggtggtggatccgctgcgggtaccggtcgccgtacccgatcatgtacgacatcttcatcgggttgtctcctagcagctgaagagtttcagggccaactgaaacgtctccgcagtcgacggtatgagaggacttggagaggtacttggcgtaggtcaggagcaggaaagagatggaggtgacgtgctgcatgttgctgcctccaggcttgtagatcatgcccccgggggtgtacgtgatgtgcggggaagaagacgactccgggatgagcgtgcatacgaagctgtccgcgaactccttgtacgactgcaaaggcagcgcggcgccttctatgaactcctgcaatgcagtcaaattcccccatacaagtcagttctgctctgttgatttgccagcgtaatttgcattcgtggattgaaggggggggggtgcgatggaagcagccccgtaaaataaccttggagacgaggacgttgaggccggcatgcttgttgtcccacccgaactcgttgctgctgtcctctgcacccagggtcttgccgttgttctgaatgtactggaggaacgtgtcatccttggaggctctcctcagccatgctgccccccacagcagctcgtcctgcgaaggatttcagtgcgcgttaggctctcctcagccatgctgccatctatggaagtgttgttcctcagaccgaacactctatttcgacacttttgtttgggccgttggggtgcaacacataatacatgagcaatgatatgtagtgcatgtagacggggaaacagccaaaattgctagaggttggtcaggaaaagaaacttcaaagtttgttgttccattgaaaacgacagtcactatccattttctgcatttccgaagaaaaaaaatcagttggtaaactaacgagttctctaaataacataagattgagagcatatttgttgtcttcgaacagctttcaaaatctccatcctaaaataatctttacgtcaggaaactaaaaatatttttaaatcattccaacattttcatacctt

SEQ ID NO: 3731 - DNA, 1247 bp, Zea Mays
cgcagctctcacacgagctctgtctgtgtgaagatgaggaggcgctgcaaccagctggggctgcctctcgcgctcttgtttgccgctcttcttggcggcgcgcaatgccagagctctcacggtggtggcggcgccgccgctaacctcacggtggtgggcaccgtgttctgtgacgcctgctccaccagctccttctccaagaatagctacttcttgccaggtgtccgagtccggctggactgcatgatcaaagtgaactcgaactccaaggaggagatcaagatcacggccgagaaggtgaccaacagcgacggcgcgtaccagctggacatcccggcgatcgacggcttcgagtgcgcggcgcccggcgcgaccgccggcgagtccttctgccgggcggccgtgctggacaacccgtccgcgctgtgcggcgtgccggccgtgaccaccacggtcggccacatctctctgccgagccaggaccccagcgcctgcttctacagcctcaactcgctctactaccgccccagcaagccgggcccagctcagtgcggcggcgccgccggcctgtcaccgcctgcggcggcgctgaacacgtccctgttctactgcccgccgtggccgtggccgcccatcccgttctgcacgccgcggccgtggttcccgcccataccgttcttcaccccgccgccgccggcgttcccgttcccgctgccaccgctgccgttcttcaccccgccgtcgccttcgttcccgtttcctcatctgccgccgatctttacaacaccatcgcctccgccaccgccgccgccacaattcccgttccctatgccaccgcttccacacctgcctcctctcccgcacttcccaccgctaccgtcactttactcaccgccacctcctccacctccaccaccgcctccgccgccgtcgttcccgtggacgtttccgccgttaccgtttttccctcctggtcctggttcgtctgggccatctcctccaccgttgatgagtggttctcgtaaagatccaaccacttggtctccttccaataaacaaccatgaagtaaataatacttggctccttctgggaaggataatgtgcattgcaaaagactatgttatatgtattttttttctgttttatatccctgagctgtatggatacgaatgtaagtttctgcttgcccccgatacgtatatacataaaattcctaggttttgaacacaatgcaatacaaacttgc

SEQ ID NO: 3732 - DNA, 2470 bp, Zea Mays
cgcttcgcacgtccccgccgtcgcgctcgcctccctcctctttgttgcctccgcgtcgacctccaccccgctctccgacgcgcttaccgtcgtctcggatttctggtgcactctcttctctacgacgcgagcaagggcggcgcttgccatggcatcgacgggaaccaggcatcactctccctatctctcgggaggggagctgtttgagcggatgcccaccaggaacaatgtttcctagatcacgatgtttgggccacttttggaagaggtcagggatgacatgttttcaagcttggaggacatcaccaacgcaccatatgcagatctgctctctattaattcaatgaggaaaggaaaggggtcatagaaattagtcttggcagatggaggggaacgtctcaatgactgaggcacattttttcttgttagttagctcatggatttttatggtccaagaggagttgctgctatatgaatatgacaacacccattaatcaacataactatatgaatacaatctgaaaggaaggtcggtttggtcagaaacacatggaggtactgatggaggctatgaaacatataagagacatgccagtgaggagcaggagtagtttagtcggttcttgctttatgaagtggatgcaattagaaagacgtacgagcaggccaacatctcgcggtggctcgccctgggcaaccggacctgcccgaccacgatgcaggagctctgggacgacgccctcacccccaacgccactctctgacagctcatcgtcacctggttctcccgcctggttctgcattttgttttcttatctgtcaatcatgtttttccatattactgcaggcgggtctgattaattatttaaatgtagtttatcttagatactgtttgaacgtatgggatgttggaggacagaagacaatcatgtcttactggagaaaattctttgagcagactaatgggttagtttggtttgctgatagttcacacataaggaggcttgatgattgccgtgctgaactccacaatctcttgaaagaagagagactagttggagcttcattgttgatttttgcaaataagcaagacatgcaaggagctctaaaaccaactggaatcgcgaagagtcactctccgacagctcatcgccgcttggttctcccgccggtacacaaggtttaagaagcgctccgcggacttccacggccgcgctgccgatctcgtccacagcctccggggcacggcgatgcccaggagacaggccctcgaggaagagcaatgtagagaagagaaaggtatctcgactgttccaaagcacaagtatgcatccaaagcctgttccccaaaagttttgaagacttaaacaatatgctgcatgaaaatctttactttattcacaacacacctgagatggactgggcttgggcagctaaccggttaattgagaaggatgaggcataaactccagacgatgctcctttaaattatttgccgcagaagaggctaattttgacaagccagttgatccagcaacttctccctgctataccagcgaccattttgagaggacaagctgtgtctacttacggaagtgcgacatacactctatcaatgttgacactaagggatgcatgcagcatggtagcatcattatcatcatcatataactcttgctcacctgtggaggatgaaaataacccatctgaacaaacaagtgctaagaaaatggaagacagagtatcaaaggttgtggaagtcttcgctggaagaatccagaagatggaaaatgactttataagtgattccctcacggttgtgtccttcacaaaggaaggatgtgaagccacactattatcaagcaacaaagccaaagttgtgtgacacaattataacaaaggaatcatcacccattagcacactaaaattggcgcatacagataacgcacctgcaaagtgggatcatttgaacatagttcagcaaagggccgacgcacttgagtcactcctcaagctctacgcaaagcttctggaggagaggctcgatgagctcgccgacgtttttcgaccatttggtgagagagctgtgtcatccggagagatgagcatacaatgatgtctgaccataagcctgatgactccaccgaagttttgagagtccccaacaatgcttttgtagcagcgattcgtttcaacatttttttgtttttcaaataccatttcgagagtgtaaataacttcaacggaattcaaaattgatgtacttaggtaggcctgagccctgtttatttttgatgtatatggtttgcatgtcaccaactgttgtgagcgatgattgattatttatcgtcttgttttatctgtctgtactcctttaatgcagcaccttcgtttgtcatgtgtcgtctcccctgtaagatgttgattaatattcattatatcattgtttattttttagcaatgaaaaag

SEQ ID NO: 3733 - DNA, 2618 bp, Zea Mays
cgcttcgcacgtccccgccgtcgcgctcgcctccctcctctttgttgcctccgcgtcgacctccaccccgctctccgacgcgcttaccgtcgtctcggatttctggtgcactctcttctctacgacgcgagcaagggcggcgcttgccatggcatcgacgggaaccaggcatcactctccctatctctcgggaggggagctgtttgagcggatgcccaccaggaacaatgtttcctagatcacgatgtttgggccacttttggaagaggtcagggatgacatgttttcaagcttggaggacatcaccaacgcaccatatgcagatctgctctctattaattcaatgaggaaaggaaaggggtcatagaaattagtcttggcagatggaggggaacgtctcaatgactgaggcacattttttcttgttagttagctcatggatttttatggtccaagaggagttgctgctatatgaatatgacaacacccattaatcaacataactatatgaatacaatctgaaaggaaggtcggtttggtcagaaacacatggaggtactgatggaggctatgaaacatataagagacatgccagtgaggagcaggagtagtttagtcggttcttgctttatgaagtggatgcaattagaaagacgtacgagcaggccaacatctcgcggtggctcgccctgggcaaccggacctgcccgaccacgatgcaggagctctgggacgacgccctcacccccaacgccactctctgacagctcatcgtcacctggttctcccgcctggttctgcattttgttttcttatctgtcaatcatgtttttccatattactgcaggcgggtctgattaattatttaaatgtagtttatcttagatactgtttgaacgtatgggatgttggaggacagaagacaatcatgtcttactggagaaaattctttgagcagactaatgggttagtttggtttgctgatagttcacacataaggaggcttgatgattgccgtgctgaactccacaatctcttgaaagaagagagactagttggagcttcattgttgatttttgcaaataagcaagacatgcaaggagctctaaaaccaactggaatcgcgaagagtcactctccgacagctcatcgccgcttggttctcccgccggtacacaaggtttaagaagcgctccgcggacttccacggccgcgctgccgatctcgtccacagcctccggggcacggcgatgcccaggagacaggccctcgaggaagagcaatgtagagaagagaaaggtatctcgactgttccaaagcacaagtatgcatccaaagcctgttccccaaaagttttgaagacttaaacaatatgctgcatgaaaatctttactttattcacaacacacctgagatggactgggcttgggcagctaaccggttaattgagaaggatgaggcataaactccagacgatgctcctttaaattatttgccgcagaagaggctaattttgacaagccagttgatccagcaacttctccctgctataccagcgaccattttgagaggacaagctgtgtctacttacggaagtgcgacatacactctatcaatgttgacactaagggatgcatgcagcatggtagcatcattatcatcatcatataactcttgctcacctgtggaggatgaaaataacccatctgaacaaacaagtgctaagaaaatggaagacagagtatcaaaggttgtggaagtcttcgctggaagaatccagaagatggaaaatgactttataagtttgaacaagagggcctcgactaatcggacgactggacgattagtcgacctaatcgggtcggatgccctggtcgttccactaaaaccgactagaccgactaatcgcgattaatcgcgattagtcggacgacttgaaatcattgatcagtgattccctcacggttgtgtccttcacaaaggaaggatgtgaagccacactattatcaagcaacaaagccaaagttgtgtgacacaattataacaaaggaatcatcacccattagcacactaaaattggcgcatacagataacgcacctgcaaagtgggatcatttgaacatagttcagcaaagggccgacgcacttgagtcactcctcaagctctacgcaaagcttctggaggagaggctcgatgagctcgccgacgtttttcgaccatttggtgagagagctgtgtcatccggagagatgagcatacaatgatgtctgaccataagcctgatgactccaccgaagttttgagagtccccaacaatgcttttgtagcagcgattcgtttcaacatttttttgtttttcaaataccatttcgagagtgtaaataacttcaacggaattcaaaattgatgtacttaggtaggcctgagccctgtttatttttgatgtatatggtttgcatgtcaccaactgttgtgagcgatgattgattatttatcgtcttgttttatctgtctgtactcctttaatgcagcaccttcgtttgtcatgtgtcgtctcccctgtaagatgttgattaatattcattatatcattgtttattttttagcaatgaaaaag

SEQ ID NO: 3734 - DNA, 2733 bp, Zea Mays
cagaaggtcacaagtgttgtagtgatcctcgcccgcgcgcttcgcacgtccccgccgtcgcgctcgcctccctcctctttgttgcctccgcgtcgacctccaccccgctctccgacgcgcttaccgtcgtctcggatttctggtgcactctcttctctacgacgcgagcaagggcggcgcttgccatggcatcgacgggaaccaggaggggagctgtttgagcggatgcccaccaggaacaatgtttcctagatcacgatgtttgggccacttttggaagaggtcagggatgacatgttttcaagcttggaggacatcaccaacgcaccatatgcagatctgctctctattaattcaatgaggaaaggaaaggggtcatagaaattagtcttggcagatggaggggaacgtctcaatgactgaggcacattttttcttgttagttagctcatggatttttatggtccaagaggagttgctgctatatgaatatgacaacacccattaatcaacataactatatgaatacaatctgaaaggaaggtcggtttggtcagaaacacatggaggtactgatggaggctatgaaacatataagagacatgccagtgaggagcaggagtagtttagtcggttcttgctttatgaagtggatgcaattagaaagacgtacgagcaggccaacatctcgcggtggctcgccctgggcaaccggacctgcccgaccacgatgcaggagctctgggacgacgccctcacccccaacgccactctctgacagctcatcgtcacctggttctcccgcctggttctgcattttgttttcttatctgtcaatcatgtttttccatattactgcaggcgggtctgattaattatttaaatgtagtttatcttagatactgtttgaacgtatgggatgttggaggacagaagacaatcatgtcttactggagaaaattctttgagcagactaatgggttagtttggtttgctgatagttcacacataaggaggcttgatgattgccgtgctgaactccacaatctcttgaaagaagaggataaaggtttacctatctagggagtgttctattgttgatccttactgtattgattttaacagagactagttggagcttcattgttgatttttgcaaataagcaagacatgcaaggagctctaaaaccaactggaatcgcgaaggtttaagaagcgctccgcggacttccacggccgcgctgccgatctcgtccacagcctccggggcacggcgatgcccaggagacaggccctcgaggaagagcaatgtagagaagagaaaggtatctcgactgttccaaagcacaagtatgcatccaaagcctgttccccaaaagttttgaagacttaaacaatatgctgcatgaaaatctttactttattcacaacacacctgagatggactgggcttgggcagctaaccggttaattgagaaggttagccaactttgcgattctgctattttagttcttgtccatattggtccaagggatttatcttgatgctaaactaaattctggaataggatgaggcataaactccagacgatgctcctttaaattatttgccgcagaagaggctaattttgacaagccagttgatccagcaacttctccctgctataccagcgaccattttgagaggacaagctgtgtctacttacggaagtgcgacatacactctatcaatgttgacactaagggatgcatgcagcatggtagcatcattatcatcatcatataactcttgctcacctgtggaggatgaaaataacccatctgaacaaacaagtgctaagaaaatggaagacagagtatcaaaggttgtggaagtcttcgctggaagaatccagaagatggaaaatgactttataagtttgaacaagagggcctcgactaatcggacgactggacgattagtcgacctaatcgggtcggatgccctggtcgttccactaaaaccgactagaccgactaatcgcgattaatcgcgattagtcggacgacttgaaatcattgatcagtgattccctcacggttgtgtccttcacaaaggaaggatgtgaagccacactattatcaagcaacaaagccaaagttgtgtgacacaattataacaaaggaatcatcacccattagcacactaaaattggcgcatacagataacgcacctgcaaagtgggatcatttgaacatagttcagcaaagggccgacgcacttgagtcactcctcaagctctacgcaaagcttctggaggagaggctcgatgagctcgccgacgtttttcgaccatttggtgagagagctgtgtcatccggagagatgagcatacaatgatgtctgaccataagcctgatgactccaccgaagttttgagagtccccaacaatgcttttgtagcagcgattcgtttcaacatttttttgtttttcaaataccatttcgagagtgtaaataacttcaacggaattcaaaattgatgtacttaggtaggcctgagccctgtttatttttgatgtatatggtttgcatgtcaccaactgttgtgagcgatgattgattatttatcgtcttgttttatctgtctgtactcctttaatgcagcaccttcgtttgtcatgtgtcgtctcccctgtaagatgttgattaatattcattatatcattgtttattttttagcaatgaaaaag

SEQ ID NO: 3735 - DNA, 2923 bp, Zea Mays
ccgcgcgcttcgcacgtccccgccgtcgcgctcgcctccctcctctttgttgcctccgcgtcgacctccaccccgctctccgacgcgcttaccgtcgtctcggatttctggtgcactctcttctctacgacgcgagcaagggcggcgcttgccatggcatcgacgggaaccaggaggggagctgtttgagcggatgcccaccaggaacaatgtttcctagatcacgatgtttgggccacttttggaagaggtcagggatgacatgttttcaagcttggaggacatcaccaacgcaccatatgcagatctgctctctattaattcaatgaggaaaggaaaggggtcatagaaattagtcttggcagatggaggggaacgtctcaatgactgaggcacattttttcttgttagttagctcatggatttttatggtccaagaggagttgctgctatatgaatatgacaacacccattaatcaacataactatatgaatacaatctgaaaggaaggtcggtttggtcagaaacacatggaggtactgatggaggctatgaaacatataagagacatgccagtgaggagcaggagtagtttagtcggttcttgctttatgaagtggatgcaattagaaagacgtacgagcaggccaacatctcgcggtggctcgccctgggcaaccggacctgcccgaccacgatgcaggagctctgggacgacgccctcacccccaacgccactctctgacagctcatcgtcacctggttctcccgcctggttctgcattttgttttcttatctgtcaatcatgtttttccatattactgcaggcgggtctgattaattatttaaatgtagtttatcttagatactgtttgaacgtatgggatgttggaggacagaagacaatcatgtcttactggagaaaattctttgagcagactaatgggttagtttggtttgctgatagttcacacataaggaggcttgatgattgccgtgctgaactccacaatctcttgaaagaagagagactagttggagcttcattgttgatttttgcaaataagcaagacatgcaaggagctctaaaaccaactggaatcgcgaaggtttaagaagcgctccgcggacttccacggccgcgctgccgatctcgtccacagcctccggggcacggcgatgcccaggagacaggccctcgaggaagagcaatgtagagaagagaaaggtatctcgactgttccaaagcacaagtatgcatccaaagcctgttccccaaaaggtgcgtgaactttgttcttgattttgtcagactaaatgtgggtgaactttgtactgcagtttttgtttaaataaactttggactgtttaaattactgatgcatccaaccactgtttttctttactgtttgttgatacacgaccagatgcccagttgagttcacccaaaaggtttattacaccacgaaaaaatctgagatgaaatgatttttatttaaatgaactttgtactgcagtatttacagacatattttggcacccgatcgattactgtttttgttttactaatagctgctgctattactatcttttgggtgaagtgaatcagatttttgtttaaatgaactttgtactgtttaaattattgatgcatagttttgaagacttaaacaatatgctgcatgaaaatctttactttattcacaacacacctgagatggactgggcttgggcagctaaccggttaattgagaaggatgaggcataaactccagacgatgctcctttaaattatttgccgcagaagaggctaattttgacaagccagttgatccagcaacttctccctgctataccagcgaccattttgagaggacaagctgtgtctacttacggaagtgcgacatacactctatcaatgttgacactaagggatgcatgcagcatggtagcatcattatcatcatcatataactcttgctcacctgtggaggatgaaaataacccatctgaacaaacaagtgctaagaaaatggaagacagagtatcaaaggttgtggaagtcttcgctggaagaatccagaagatggaaaatgactttataagtttgaacaagagggcctcgactaatcggacgactggacgattagtcgacctaatcgggtcggatgccctggtcgttccactaaaaccgactagaccgactaatcgcgattaatcgcgattagtcggacgacttgaaatcattgatcagtgattccctcacggttgtgtccttcacaaaggaaggatgtgaagccacactattatcaagcaacaaagccaaagttgtgtgacacaattataacaaaggaatcatcacccattagcacactaaaattggcgcatacagataacgcacctgcaaagtgggatcatttgaacatagttcagcaaagggccgacgcacttgagtcactcctcaagctctacgcaaagcttctggaggagaggctcgatgagctcgccgacgtttttcgaccatttggtgagagagctgtgtcatccggagagatgagcatacaatgatgtctgaccataagcctgatgactccaccgaagttttgagagtccccaacaatgcttttgtagcagcgattcgtttcaacatttttttgtttttcaaataccatttcgagagtgtaaataacttcaacggaattcaaaattgatgtacttaggtaggcctgagccctgtttatttttgatgtatatggtttgcatgtcaccaactgttgtgagcgatgattgattatttatcgtcttgttttatctgtctgtactcctttaatgcagcaccttcgtttgtcatgtgtcgtctcccctgtaagatgttgattaatattcattatatcattgtttattttttagcaatgaaaaag

SEQ ID NO: 3736 - DNA, 3271 bp, Zea Mays
cgcttcgcacgtccccgccgtcgcgctcgcctccctcctctttgttgcctccgcgtcgacctccaccccgctctccgacgcgcttaccgtcgtctcggatttctggtgcactctcttctctacgacgcgagcaagggcggcgcttgccatggcatcgacgggaaccaggcatcactctccctatctctcgggaggggagctgtttgagcggatgcccaccaggaacaatgtttcctagatcacgatgtttgggccacttttggaagaggtcagggatgacatgttttcaagcttggaggacatcaccaacgcaccatatgcagatctgctctctattaattcaatgaggaaaggaaaggggtcatagaaattagtcttggcagatggaggggaacgtctcaatgactgaggcacattttttcttgttagttagctcatggatttttatggtccaagaggagttgctgctatatgaatatgacaacacccattaatcaacataactatatgaatacaatctgaaaggaaggtcggtttggtcagaaacacatggaggtactgatggaggctatgaaacatataagagacatgccagtgaggagcaggagtagtttagtcggttcttgctttatgaagtggatgcaattagaaagacgtacgagcaggccaacatctcgcggtggctcgccctgggcaaccggacctgcccgaccacgatgcaggagctctgggacgacgccctcacccccaacgccactctctgacagctcatcgtcacctggttctcccgcctggttctgcattttgttttcttatctgtcaatcatgtttttccatattactgcaggcgggtctgattaattatttaaatgtagtttatcttagatactgtttgaacgtatgggatgttggaggacagaagacaatcatgtcttactggagaaaattctttgagcagactaatgggttagtttggtttgctgatagttcacacataaggaggcttgatgattgccgtgctgaactccacaatctcttgaaagaagaggataaaggtttacctatctagggagtgttctattgttgatccttactgtattgattttaacagagactagttggagcttcattgttgatttttgcaaataagcaagacatgcaaggagctctaaaaccaactggaatcgcgaagattttacttagttcaatgtgggagcaaaaggatatgccaaattgaatgtagtttcatcagttatgctctattatggatgttcagaggcatccaatttcagtgtgtactgcaatacttgggtccacctagtcactctccgacagctcatcgccgcttggttctcccgccggtacacaaggtttaagaagcgctccgcggacttccacggccgcgctgccgatctcgtccacagcctccggggcacggcgatgcccaggagacaggccctcgaggaagagcaatgtagagaagagaaaggtatctcgactgttccaaagcacaagtatgcatccaaagcctgttccccaaaaggtgcgtgaactttgttcttgattttgtcagactaaatgtgggtgaactttgtactgcagtttttgtttaaataaactttggactgtttaaattactgatgcatccaaccactgtttttctttactgtttgttgatacacgaccagatgcccagttgagttcacccaaaaggtttattacaccacgaaaaaatctgagatgaaatgatttttatttaaatgaactttgtactgcagtatttacagacatattttggcacccgatcgattactgtttttgttttactaatagctgctgctattactatcttttgggtgaagtgaatcagatttttgtttaaatgaactttgtactgtttaaattattgatgcatagttttgaagacttaaacaatatgctgcatgaaaatctttactttattcacaacacacctgagatggactgggcttgggcagctaaccggttaattgagaaggttagccaactttgcgattctgctattttagttcttgtccatattggtccaagggatttatcttgatgctaaactaaattctggaataggatgaggcataaactccagacgatgctcctttaaattatttgccgcagaagaggctaattttgacaagccagttgatccagcaacttctccctgctataccagcgaccattttgagaggacaagctgtgtctacttacggaagtgcgacatacactctatcaatgttgacactaagggatgcatgcagcatggtagcatcattatcatcatcatataactcttgctcacctgtggaggatgaaaataacccatctgaacaaacaagtgctaagaaaatggaagacagagtatcaaaggttgtggaagtcttcgctggaagaatccagaagatggaaaatgactttataagtttgaacaagagggcctcgactaatcggacgactggacgattagtcgacctaatcgggtcggatgccctggtcgttccactaaaaccgactagaccgactaatcgcgattaatcgcgattagtcggacgacttgaaatcattgatcagtgattccctcacggttgtgtccttcacaaaggaaggatgtgaagccacactattatcaagcaacaaagccaaagttgtgtgacacaattataacaaaggaatcatcacccattagcacactaaaattggcgcatacagataacgcacctgcaaagtgggatcatttgaacatagttcagcaaagggccgacgcacttgagtcactcctcaagctctacgcaaagcttctggaggagaggctcgatgagctcgccgacgtttttcgaccatttggtgagagagctgtgtcatccggagagatgagcatacaatgatgtctgaccataagcctgatgactccaccgaagttttgagagtccccaacaatgcttttgtagcagcgattcgtttcaacatttttttgtttttcaaataccatttcgagagtgtaaataacttcaacggaattcaaaattgatgtacttaggtaggcctgagccctgtttatttttgatgtatatggtttgcatgtcaccaactgttgtgagcgatgattgattatttatcgtcttgttttatctgtctgtactcctttaatgcagcaccttcgtttgtcatgtgtcgtctcccctgtaagatgttgattaatattcattatatcattgtttattttttagcaatgaaaaag

SEQ ID NO: 3737 - DNA, 2639 bp, Zea Mays
aataaatgctgctctatgcagtgtgtgtgtctataatgcggcgcgctaaaaaggtttcggaaaaaataataaatcacaaacgccaaaaaaaaaaaattacagccccacttggcccagctagaggatccacttgcccggaagttgcgtgggcttacgcattcgagcacgtgtccgtttgaactctcaaaagctctatgtcatcgctcgccaccaccaagataaatacccgggcaaggcaccctcgccgacgatccaccctttgccttcagcacagcacgaccaggacacagtgctccctccccaaagacaaacaggcgagcagcaaacacacacgctcgaaccgagacaagccaatctaataatggggagggctccgtgctgcgagaagatggggctgaagaaggggccatggacgcccgaggaggacaaggtcctggtcgcccatatccagagcttcggccacagcaactggcgcgcgctgcccaagcaagccgggctgctgcggtgcggcaagagctgccggctccggtggatcaactacctgcgcccggacatcaagcgcggcaacttcagcaaggaggaggaggacgccatcatcagcctccacgagcagctcggcaacaggtactttttactcacgccgctgttctttcccttcctcgcattgctgtcttctcgggtgtaaaaatcggagaatcaatgattgtttgcatgttgcttcaaacgcaaattactattcgtcttcgtctgaattgttcctgtcagtggggtagggcatacaatacattatccccgtgggccccgcctcgaggcccgcccgacgaagggagaaagaaaatccaagtgtgctgaccacttggtcgctagttaattcatggcgtcagacgtcagtgatgcatgagcatgatgatacgcgagatctgccggagatttccacctcctctagtttgtccgtcgtctagcttgtctagagctctcagtgcagttaaaaaaaaagaatggggattccgctccgccgttaaacaagtgcatgtgatccctcccggcggcaaggggaatcaaatcacgcagcagcagagatactaggactcaggagtagatctagcatggatcatgcatgtcatgtcatctcgcagatagagtggtccgccatcgccgccaggctgcccgggcggacggacaacgagatcaagaacgtctggcacacgcacctcaagaagcgcctggatcccaccaagcaggagcagcagcagcagcacgggacgacgccggcggctggcgccggcaagaagcacaggcccgcggcggcggcgaagcgcgggggcggcggagccaggaaggcgacggccaacgccgacgccgtcgtcgtcccggccccggccccggccaccgctgcgccggcgtctcccgaacggtcggcggcctcgtcgtcggtgaccgagtcgtccatgacggagcaggagcaggagcacggcaacacggggagctcgcccgcgttccccaaggaggagagcctcaccacctcctcctcggacgccgaggagttccagttcgacgacagcttctggtccgagacgctgtcgatgccgctggacagcctcgacgacgtcgtccccatggagccctccgacgacgacgcgttcggcgacgtcgacgtggctgccgcctcctcctcgtccgtcggcgccgacggcgacctggactactggctcagagtgttcatggagtccggcgacgcgcacccagaactgccgcagatttagaccgctcgcgcgagaattttcggctcctaattgattcatcgttcttttgtctctatctctctctgcacgtcttgcatcggaggggacggacaaggacagcagcagctgattaacagagaaggaaatcaggcagaaacaacgcgacacgccgttgcaacttggatcgatcttgtttgccttcttgttgtatagatactagaatccatccaagcctatgcgttctgagaacagaagcacgctgtgctgtgcatgcagattcccatgtatgtacagtagccacggccgccgccagaacagaaatggatccggcctcttccaaattccaattcgttgagttaattcatctagctcgtgctactcgtgtttcggtcggttacgaaatcacgtcatggcgatgctgtacgcctccagtcccgcggtctgttcatctccagtgcacgcttcgtctcgcagcacagctgaggttgaactagtggtaactgctgcctgcctgcctttgagaaagagaaaaaaaaaaggctggaacacgtgtgcagaggaaccggacaaaccaaaggaggatttttttgcgccattgacagttaaacaatgccaatcacagatctggctgtctcctgattgattctgcgtcacctttgttgtggctttgtttgatctggaaaaaaaaagtaaacgaagaacatgtgggctgctatgctgatccatgtacaagtgcgtattggcgccgccattttctattccaacctgtgcctttcatgcttaatcaagctaacagtcttcaattgcataagcaggtctcctgccgttgtctacgcgatagggttcagatactatactaccgagggtaccttttgagctgtgctagagatgagtgga

SEQ ID NO: 3738 - DNA, 2216 bp, Zea Mays
aactagtctcacgtggtcatcactcaccgcgccgccgccgccgccaccgccagcaatggcgcgccgcctcttctgtgccacgagaacgctcctccttcctgccccagctcccgtgccggcgcccacctctgcgtcttctgcagcggccgcggaagcgtcggcctcgctcctgccactgctcccctgcaagcggagaaagaagctcctgaggaagctcaacagcccacgggtcgcgcctatcgagccggaggccgcgcgtcgcgttccggccctcgacgccgtgctcgaccgcgatacggccttccgcttcctccaccgggcgcgctcgttcctggcttccctcccgcctccgcaccggatcccccttgccgaggctggaaagctgtaccgcgagctcggcttcccccgcggccgcaaagtgtcgcgctccgctacgcgccacccgctgctgttccacctcccagtcgtggactccgttccgcacctcgcgctcacgccgttcatgtgctcgctcctcgaggaagagcgccgcatccacgacgacctcctcccttcgcgggtgctcgcagtcaggaagctcctcatgctcacagcccaccgtcgcgtgccgctcgcgaagctccaccactgccgcgctgtgctcggcctccccgacgacttccgcgaccgcgtccaggacttccccgacgacttccgcgtcgtagtcgatcccagggacggccgccacttcctcgagctcgcgcgctgggaccctgcgctcgccgtcagtgcgttggagcgcgacttcgtcgtggacgagcgccgcgtccggcgcacgttccgcttcgcggtcccacaccgccggttgatgccgcttgacgccgaggacgccgaccgcctcgacatggcgaccacgttcccgttggtctcgccgtacaccaacggcgcgctgctcaagccatggacgcccgaggcggaaaagtaccgcgtcggtgtggtgcacgagttcctgaacctgacgctggagaagcgagcgatgatccaccacatcgtcgagttcaaggaggagttcgggctcacgcggcacatggacgcgtatgacgaaaatggcgtgctcaaggagaaggatcccctcgtgctgttcaatgagaagcttcagcactatgcgtgtatgagcaagatagattccagagagaccatgattgatactgcaggcttgactgaataaggtcagctttcagttggttctgccgccagaattcaattgtgcttatttgcagccagcactgaatggtctcaccaggctgatgagcaccttatcgccagcgaggagccgccctcattgagccatggctgcatctgttgctgcccgtgaatcatagactggatcagcgcatcagatcgtacaccgccacgtggcccattggaacgaactgtgactggactcggccaccggttgtcaggtacagtcacccaagacaatgctggctcaacctcgcgaccattcacatcttctttggtcggtgcaagcggcaattactgatcgtctcacacgcgaaggatgtccaacgtcgccgcctggctactaagtgggtgaaccaatggttgaactcattggcctttagatttgtgcaatggagttctgcaacatcaagattgatactggcaactctattgataagactgcaggcacaataaaggttggatcatgaagtgagatcaagctcttatggacaggtagcgaacttcttatccaatcttagcttattcccatctaatcacacgtgaagaaaaatattttgtttgactactgtaaatgtttaaggccatgaaaatttacaaatatgaaatagtcgtggtatatgtatgctattcaaaggagacttcgtctgctgttaactatttccttccgttgcacacatgtgagcttgcaagtgccacacttatggttttgaccacactgagatgcaatgcgaaaattaatattgtgtctatggtctgaaatgttcccccaacactactgaacaggctttgcagaaacatattctagcaatactacatgtttctcaagttcagttataatttcttcttaatggtaaagcatcaggtcattccgtgttctgtcattcccattcccgcactgtctttctcattcttccatccccgtaaagctcattcccattcccggctgtcattccgtgttctgcgtgcatccaacgcctagctaaaattaaatt

SEQ ID NO: 3739 - DNA, 4213 bp, Zea Mays
caacacgcaaattggaaggcaccgtaaccgttcgattacggggcccgccgcgccactcgacatctcaacccacactggcccactcctgtcttgaacatctcccgtccccatcgtcctcgtcgcatccagcactctgcactcatgcgtttcctcccctcctaagccaaaccccgaatcctccgtcgcccagcagccgccggtgacggcgacgctgggcaatggggactgaggtagcagccgtagtggatctccgggcgctgacacagtcggatctcgtggccctagctgccgcatcgccctacgccgtcgactcccgccggggccggcgccggcgccgcgatagcgagttcctctctcccccgaagatcgaccgcgccgttttcaacgagagcgcaggttcccgcaaacaaaccttctcccgtcgccgcgtcgccaccaacatatcccacaaactaacgcccaccaccaccggggcctcctccttatctacgccagctgcccccaccgaggaggaccccgacaaccgcctcattgtgttctacctccaacgcctcttcgcgcgtgacgacccctcgtaccctgctccgcctacgattccaccccgaccgcaaaccctagccgcgcccgcgataacagcacctgcaccgcccgcgccgtctctgccgccgccgtctgctgcggcggcagaccccgatagggtagtgctgaatccaaagggtttggtggttgacctggtgagactcgccgatcttgtggatccgtatggggaagagctacgtcagcgtacggcaggattggggtcagagtccgagctgctgggattcatgaacgcgctggaagggcaatggggaagccggaggcgtcggaggaagtttgtgaatgctggcatgttcggtgaccacctgccctgtgggtggaaactgctgcttgggctcaagcgaaaggagcgtgtcgcatggattaattgccgccgttatgtgagccccaaaggacatcagtttgctacttgcaaagaagtatcttcctacctcttgtcccttcttggatatcaggaggcaaagccaactgcctctcagattaacaatgcaggagtgcatgacctacatgttaattctgtaggtcttcaccagcaaaccatctcaattgaggaaaagcaaattgcagtgccagttaattcagttgcattgtttaattcctctggtgattctcatcaacaaaaacttcagaaggatgaagctccaatagaagtgaatgcaaaggagtgccggaaatgcaatttgacgtttcatgaccagagcgcctatatgcaacatcagttgtcctttcaccaaaggaaagctaaaaggcgcagggttagtaaatctggagaattgggtaccaacatagatggaaactacgagaagactcagcagaagacctctggagaggtatctggcaattttggccacagcgctgcaaatgtaaggtatgaaggtctgagtccagcagaactgttagatggtcgaccatccttgatggcagtgccatgtggatctcaggagatcactatcttgcctcaacagggaaaagaaccttgtgtgttgcctcaacagggaaaagaaccgtctgtgttgcctcaaccgggaaaagaaccgtctgtgttgcctcaacagggaaaagaaccttctatgttgcctcaacaggggaaagaaccttctgtgttgcctcaacagggaaaagaaccttctgtgttgcctcaacagggaaaagaaccttctgagttgcctcagcagggaaaagaatcttcaggagatatctctgtgaatcagaaggaccctcttaaggagatgaatggctttcctgaacaggaaaaaggacttgttgctggagaacttgtctctgcacatcataaggaccctctaatggatattacagatgcatttgaaatgataaaaaaacatcctgccagagagccttcctctgggcatcatctggatactgtcgacaattctgatgatcataaaacccacgatgaagcatgtgacaatgttgtaacttctctttctattgatgctgaaaggaaattgggtgtttgcaactccatgaatgttcatgagaatatcagcttaaaagatccagaactttccaatgcagattattcccaaaagttcaataggtctgatgaaacttgtgatgtacataaagaggtttcttcaactgtgaatgatcctgatgaaagaaaatgcacagatgattcaacgaggtgtactaatatgtcctgtgatctactgcatggcaaaattgtcagttctcctgaagaacatgattttagtaaccagctagaaagtaacccactttcagtatctaggaatgagcctgatcttaattcaattggtacggaagtggatggtggcaatataacttgcaatgcggaaaaccccagaagcttcaaaagtgagaaatctgctgagctcaagattatggattgcgaaatgacttcttttaaagacagtgaaataaaaaatgatgtcagagtaagggatgtaaatctcaattcatgtttggattcaatatcttctcctatttctggtggaaacaatgaaacatctgatactcctgatgatgctattcgatcatccattatcgcccaatgcttcggtactacctctaatgatgacacggcttgtaaggatggaaactttgccaaccagaacgacacctgtaagggtgaaaattttgtcaaccagaaaaatgtcacaatgtaccaatctaatttgaccatggaacctatacctcgagctcaaataaatgtggattgtttcacttcttcctgttcaatgactcctgaaatcaaggactatggcaacagaggtgaagatcgtgcgaaagaagcactagtgaactcacaaaacatgacaagtaatgaaactggttttgatgctgaagcttataacagtgatatcttcaatggtactatcacagaaagtagtcttgcccagagttcttttgtcagctctaccagtcgcactgaaccaaatgagcactgcacgttggattttgatatcaagggttccatgcttgaggcattggaaaaatctgacagtgacttagataatcaatacaatgatgcaggcccttcttgtgactcactacctgctactgggacaagtgggactattgatgattttatgtccatgcaaaccaattttggtagctttacttctttggttcgtgctgttgaagatgttccactgagcaggattattcaagatcagcggtgtgatttgcaacttggatttggtggccccaagcagcagatgtatccaagctttgagcaacagctaaggatggcctcggctggagctccgccttatgggaccatcggcaggcatgaccctatacctgtaccagagccaacattgatgctaggttatgcaccgcagctaggtaactgcccccctccgttccagttgggctggggtccgtcttattcgaagatggttggcatgctccaatctgtgtgcgtgtggtgcaatagcccattccagcatttcggcaccgtcgctgagcagcaggcagattcacttggttacatttgcccgtcgtgcaagggaaagttttctggtcatcttggcatcaacggtccatctatttgaaatcagtttcttgtaacctgaactggtgctgctgccccaccatcaatttatagtctagttgatatgaatcgttttgtacttgtagtatgtatcctttaactcgtggctagtggtggaaacaggtttattcgaatcttacatttttggttattaaaactcaaccatcaagcagttgttgcgaacaaggaagctaagttgttggatacatacaagactgtgctctcaagagatactggtgggtactctgctgaagaaaagaccaattggcctgaagactaaattgtccatcttcaattgcaccaagagaaaggatctccattgcactggtggctggtgcatgtttgaggcttggatgatggcagaagtgtcatgtttttttatgttgaaccttgtttctaaatagtaagtctagacaattgttctgtttgaaatctgaatgaattgtggctggttgttggtggactggattacaggcaaaagtgtcatgttttttctatctttaaccttgtgtataatatagtaaaggacggatgattgctctatttgaaatatggagtaatggttgctagttgcctgac

SEQ ID NO: 3740 - DNA, 2013 bp, Zea Mays
gctggcaaatagccgcccccgcgcccggcggggctgccgcgtgcccgcgtctgcgcagcctcggctgccgccgcctgctcccacactcaccctcacacgcacgcacccccctctgccgcgggtctccccaataaaaatagcaagccacgacgccagtgctctcccggcccgcgcctcgctctctcttgtctcgcccgctagctcccatcccagcctcccaccgcgcccgcctgccccaacatcccccctccccgctccgctccacgcacggctccagatctgctacggcggcggccggtggacgccgcgccgcgcgtgccggaggcggtgacgtgagcggcggatcctgcccggccgtgccatcctggcgacgatgacagcgtaagcgggcggcggacgaccgcgcccccccggcccctactcccgagaaaatggcgatgatggtggatccccccaatggcatggcaagtcaaggaaagcattactatactatgtggcagacactgtttgagatcgacaccaagtacgtgccgatcaagcccatcggaagaggagcttacggaatcgtttgctcatctgttaaccgcgagaccaatgaaaaagtcgcgataaaaaagataaacaacgtctttgacaaccgtgtggatgcgctaaggacgctgagagagctgaaactccttcggcacctgaggcacgagaatgttattgctctcaaggacataatgatgcctgcgcatagaaggagcttcaaggacgtttacttggtttatgagctcatggacactgatctgcatcaaataattaagtcatctcaaccactatccaatgaccactgccagtatttcctttttcagctgctccgaggcctgaagtacctccattcagccgggatactccacagagacctaaagccagggaacctcctggtcaacgcaaactgtgacctgaagatatgcgacttcgggctcgcccgcacgaacaacaccaagggccagttcatgacggagtacgtggtgacccgctggtacagggcacccgagctgctgctctgctgcgacaactacggcacgtccattgacgtctggtctgtggggtgcatattcgcggagctgcttggccgcaagccgatcttcccaggaaccgagtgcctgaaccagctcaagctcatcgtcaacgtcctcggcaccatgggcgaggccgacctcgcgttcatcgacaacccgaaggcccgcaagtacatcaagtcccttccgtacgccccgggcgcccccttcaccggcatgtaccctcaggcgcaccctctcgccatcgacctgctgcagaagatgctcgtgttcgacccgtccaagaggatcagcgtcaccgaggcgctggagcacccgtacatgtctccgctctatgacccgagcgcgaaccctcccgcgcaggtgccgatcgacctcgacatcgacgagaacctcggcgtcgacatgatcagggagatgatgtggcaggagatgatccactaccaccccgaggtcctcacgagaatcagcatgtgagtatgtgatgtgaccagacaggcagcaatgaaacatgtggacagaggtctgctgcgccaggatcatcacatgttcgcccttcttacgagcttaactgcgattacggcaccgagtcgaggtatcactacatgtatcggaaccgtcaggcggtctcttgtgtaaatatgcgctgaataagatgtgtggcaatctcttgttttttggttgtacatggacctcgctgttgtacgagtctgtgaagtggaaccctggtactaagacctgtaatttcagaccctaatctgttgtatggaaatctgaaggccttgactcccatctgtttgtgtcacacccagatttaaaacctgtttgtatcacacccggatttaaaacccggaagaacatcacatacaatttgagataaatatcataaatgtcattattacataacaaaagtcttataagaggataaataataataaaacaaactaaa

SEQ ID NO: 3741 - DNA, 2692 bp, Zea Mays
ttaactctcctcgcctccgttaccgtcttccccctttccacctccccccaccccgctgtgctcatccatcgaccgcgacgagcccccgcccgccgattcgactacgtttattttttttatttcatttgatttgattgcaaagcaccgcagcagcaggaggaggggaagggagggatcgttggaccgtcgttcggctggatggtggaggcggttcgtcgatttgagggcaccgggtttcttggacctgcgtaaaaaacaccagccccatttccctctcggccggcggatggacgcgagggaggtgtgaagcctggtcgctaactgatgctcgtggagagattcggaggagaggagcgcgccgtgcggaggcggtggaggaggaagcgccgacgatttggacagcgcagcgacggaaggggagcagcaggcggacgaggagcgagccgccaggaggacgacggccgccgccgccgccgccgccatgggcgagtcgctgctcaccgcgctctccatggacaccgccacagcccaccacccgcaccagggcccctccaccttcctctccatggacaccgcctcccacgacgacttcgacctcttcctccagccacaggggcccttccgccgctgcctacatgccgcggcggtcgccccccctgacatcaaccttcccctagccgccgacccgtctccgccacctctggcgtcgctcgacgccaacgttgacatgctagatgtcggcctcggcggctcgcagcactacgactcggattcgcccgctgccgctgggccagtctcggccccggcagcagcagcgaccaccatggtcgccgtgtcccacaccaagggctccggttccagtgctgcgcgcaagtgtgtcaagaggaatgttagcatctggggagcgtggttcttcttcacccactacttcaagccagtcatgtctgcggacaaggctggcaaagcgaaggcagccaccaccaccggcgggaacggcaatagcgccacactggacgctttcctggtgcagcacgacatggagaacatctacatgtgggtgtttaaggagcgtccggagaatgccctggggaagatgcagctgaggagcttcatgaatgggcactcacgccttggggagccacagttcccattcagcgcagacaaagggtttgtgcgctcacaccggatgcagcgcaagcactaccgtggcctctctaacccacagtgtcttcatgggatcgaaatcgtgagggcgccaaatttggcgggtgtacctgaggctgatttaaagaggtggatgcagctcactgggagggacgccaatttctcggtcccaactgaggcgagtgattttgagtcctggaggaatctgccgagcacagactttgagctcgagaggccagcaaccgcggctcctgcaaagagcagttcacatggacaccacaagaagttgctgaacggttctggccttaacctctcgacgcaaccatccaatcacagttctggggatggcatggagatcacagccacctgtaacaagcgcaggaaggattcctcaccgaccgcaatggaagaggactgcagcaattcgaattcggacaaggcccaagacatggatgtgatccacaccttcgagccatcatggatgaatgacttctcaggtgtgatgcgccatgcttctggaccagtaaccgctgcaaaaacaatatacgaggacagcaagggctacttgatcatcgttagcctgcctttcgctgattttcagaaggttggcggatcctgctcctgagcattgcccgccgggagagtttgtccgggagatcccactccctacccgaatccctgaagacgccactctggaagcgtactgcgatgaaacagggacagggctggagattattgtcccgaagttccgcgttggccctgaagaacacgaagtgcatgtgtccatgaggccaccctcgtcctggtgccaatgaaacctgtttccaagcttgcggggggagacacacatacggtgtggaggtttgccgtaaggctaaggctactgcacaacaaatgcagctcagttttgctaattttgatgggaaacagtccttgattgattgaagcattctggtagttggccgccgcagcgtttggaacattttaggaaatatgctacgggtcgcaaggaacatgcttgcattacttagttcttgtatggggatacacctagtgtgttacatttcgtttccgttgtgtcgaaagactggttgtctgctcgatgtgctgcaatccgtgcatcgcccacccgtcacgagcaacaatctgtttgtgttgtacacagaatggcaactggatgtataggggcatttatagtcattttccatagattgaggtttgctttgtgggcatcgtgtaaaattcgtctcagattgatggaaactaggaagaaaaagaagatggcagtgtctttaggatttggcgaagttgtaatggggattaggcggtgctgtagcattctgtctagtttccaggaatttgtagaagacaaatgtaaatctgttgttccgtcatcaatatagaaaagtggtctgtgtctaccagcaaatgccttgtgtacgatcttaaccatccagcacgttttgtgccgtactttaatgaggcagagcccacgggtgttgttgcgttctggtctcaactcatgaga

SEQ ID NO: 3742 - DNA, 2478 bp, Zea Mays
caactctcgatctttcggaaaaaggtgaggcccaacacctctgcctcgcaccagtaccacaacgccacgacacgccggcgaggtggacgagcggcggcgatggcgggcggcgaccgggagcgagacgcggacgaggagacgaggaatcagatgatgcagaaccttttcggggaccagtcggaggacgaggacgatgcggacgacgacgacgtcgccgagatggtcgatgaggacgacggccaccagccgcagtcgcccccgcagtcgcccccgcagcgccaccaggagctggacgacgatgcctacgacgatgaggaggaggacgcccgcagccacgcgcccgcccgcgcaagcggataccactccgaggaagtggatggtgaggcagagaatggaggggaaggggaaggcgaaagtgaagggcaagttgtaatcgaagaggaaagtgaaggtgaagctcatggtgccgatcttgatcaaggagaaagtgatggggacaaagtccagagctccccagaaagagaactcgatgaccagaggatggaacctgatgcaagaggaatggacagtgaagatgaaggctaccagcagaggacagtatctggcagaagaaggggagttattgcctccgaatcggagggatctgaagatagttactatgctgctggagctcaagaagacgaggaacctcgccaaacaaggaaacaaagctctccgttggaggaagaaagagatcatgaagtagttcgtgatgtgtttggtgatagcgatgaagatgaaccagctccatatcgtgttcgccatgaaatcgatgaagattctcataggtctcacatggaggatgaaggccattatgagaaggacatgcaaccagatgacgttgtggctgacgaagatatgcgatatgaatctgatgataatcgtgaactgaaaccaaaagagaaaccagtcggtccaccactagacttggtggttccatttaagcaaccaccagctcgacctgacaaaatgaatgtgatcaaggtatcaaacattatggggattgaccctaaaccctttgatccaaaaacatatgtggaagaagatgtttttgttacagatgaatctgggactaagaaaaggatacggctagaggacaatattgtgcggtggagaaccattaggaatgcagatggcactacatcttgtgaaagcaatgcacgctttgtaaaatggaaggatgggactatgcagcttctgattggcaatgaggttcttgatatatctgtacatgaggcgcatcatgaccagtcccatctgtttttgaggcatgggaagggaattctacaatcacaaggaaggcttttgcacaaaatgcgatttatgccatcctccctgtcttcaaagtcgcatcgcttattaactgctctggttgattctcagaataagaaaactgttaagatgcaaaaatggtttgagactaaggatcctgagaaagcgaaaatggaaaaagaaagggttagcaaatcactattacttcattatctggtgttttgggccaaaatattcgagcccattcaatccttcaacgcaaaagagaaaaagtgaaccgcaagtacacacagcctgcccgtccaaggcggcagctttctccagggttcttggaagacgctctagatgaggatgatgagcctggctatgattctcggcgaatgccaggccgtaggcgttttgaggatgaattggaggctgaagcactagctgagaggcgtatcattaacgcgaagaagtcaaatatgagcagaaatgttccccacaaaccaccgtaccctcctgcccgtccaccgagacgtcaagcggatgaatactcggggagtgagagggaggagtcagagtacgaaacggatggcgaggatattgaacattcactgcctcgtggaagaagggaggacgagctggatgaggaggaagaatacgaggaagatgttgaagaagaagaagcgcctctgtcggatgaagaaatggaggcaccgaaacgtaagagagaatcagggggtggtgggcaaaggcgcgaggagctggtgtctgaggaggacgacgaggaccacgacgattctccgccaaggaagcagccggctgtttcgcatcgtagaaaggctgtcgtgtttgatgacagcgacgaggactaaaatttgtaaaaccgtatgacgacctgacatgatacgcttgctttttctccccatttgtttaagagaatgattagttatttttcgtcatgctggtgtaatatggttgcaattctacctacagaggtgagattgtacatgctttaatgatgcgtgggctacagtgaaaggaaacgcaagcatgaaacgatttttttttctttttggttagaaaggaacagcgaaacatgaagaaatcgataattggattggagcacgttcataatagaaccacaataacgtactggaaataaaaaaaaaaactgaatgctgg

SEQ ID NO: 3743 - DNA, 2549 bp, Zea Mays
caactctcgatctttcggaaaaaggtgaggcccaacacctctgcctcgcaccagtaccacaacgccacgacacgccggcgaggtggacgagcggcggcgatggcgggcggcgaccgggagcgagacgcggacgaggagacgaggaatcagatgatgcagaaccttttcggggaccagtcggaggacgaggacgatgcggacgacgacgacgtcgccgagatggtcgatgaggacgacggccaccagccgcagtcgcccccgcagtcgcccccgcagcgccaccaggagctggacgacgatgcctacgacgatgaggaggaggacgcccgcagccacgcgcccgcccgcgcaagcggataccactccgaggaagtggatggtgaggcagagaatggaggggaaggggaaggcgaaagtgaagggcaagttgtaatcgaagaggaaagtgaaggtgaagctcatggtgccgatcttgatcaaggagaaagtgatggggacaaagtccagagctccccagaaagagaactcgatgaccagaggatggaacctgatgcaagaggaatggacagtgaagatgaaggctaccagcagaggacagtatctggcagaagaaggggagttattgcctccgaatcggagggatctgaagatagttactatgctgctggagctcaagaagacgaggaacctcgccaaacaaggaaacaaagctctccgttggaggaagaaagagatcatgaagtagttcgtgatgtgtttggtgatagcgatgaagatgaaccagctccatatcgtgttcgccatgaaatcgatgaagattctcataggtctcacatggaggatgaaggccattatgagaaggacatgcaaccagatgacgttgtggctgacgaagatatgcgatatgaatctgatgataatcgtgaactgaaaccaaaagagaaaccagtcggtccaccactagacttggtggttccatttaagcaaccaccagctcgacctgacaaaatgaatgtgatcaaggtatcaaacattatggggattgaccctaaaccctttgatccaaaaacatatgtggaagaagatgtttttgttacagatgaatctgggactaagaaaaggatacggctagaggacaatattgtgcggtggagaaccattaggaatgcagatggcactacatcttgtgaaagcaatgcacgctttgtaaaatggaaggatgggactatgcagcttctgattggcaatgaggttcttgatatatctgtacatgaggcgcatcatgaccagtcccatctgtttttgaggcatgggaagggaattctacaatcacaaggaaggcttttgcacaaaatgcgatttatgccatcctccctgtcttcaaagtcgcatcgcttattaactgctctggttgattctcagaataagaaaactgttaagatgcaaaaatggtttgagactaaggatcctgagaaagcgaaaatggaaaaagaaagggttagcaaatcactattacttcattatctggtgtatgtaacacaggatgtgcatgtcttgcttttgtccaatatagctgcttgaactaagatccctagttcaggttttgggccaaaatattcgagcccattcaatccttcaacgcaaaagagaaaaagtgaaccgcaagtacacacagcctgcccgtccaaggcggcagctttctccagggttcttggaagacgctctagatgaggatgatgagcctggctatgattctcggcgaatgccaggccgtaggcgttttgaggatgaattggaggctgaagcactagctgagaggcgtatcattaacgcgaagaagtcaaatatgagcagaaatgttccccacaaaccaccgtaccctcctgcccgtccaccgagacgtcaagcggatgaatactcggggagtgagagggaggagtcagagtacgaaacggatggcgaggatattgaacattcactgcctcgtggaagaagggaggacgagctggatgaggaggaagaatacgaggaagatgttgaagaagaagaagcgcctctgtcggatgaagaaatggaggcaccgaaacgtaagagagaatcagggggtggtgggcaaaggcgcgaggagctggtgtctgaggaggacgacgaggaccacgacgattctccgccaaggaagcagccggctgtttcgcatcgtagaaaggctgtcgtgtttgatgacagcgacgaggactaaaatttgtaaaaccgtatgacgacctgacatgatacgcttgctttttctccccatttgtttaagagaatgattagttatttttcgtcatgctggtgtaatatggttgcaattctacctacagaggtgagattgtacatgctttaatgatgcgtgggctacagtgaaaggaaacgcaagcatgaaacgatttttttttctttttggttagaaaggaacagcgaaacatgaagaaatcgataattggattggagcacgttcataatagaaccacaataacgtactggaaataaaaaaaaaaactgaatgctgg

SEQ ID NO: 3744 - DNA, 1815 bp, Zea Mays
atgggcaagaaattttcttatatctgtgaaggcagacctaagacaaattcgggtttattcatgcaatccctctttctgcattgtatcggtagatgctggcttcctggaagagcatatttctgaactgaacccactgcacacttaccgataatcctttttgtggtcacagctgaactattttccacttaattttgcgctatactacatttactatctgtatgagtgccaaccatacaagccgcagttcaatatttaggccccgtttcaatctcacgggataaactttagcttcctgctaaactttagctatatgaattgaggtgctaaagtttagtttcaatttccaccattagctctcctgtttagattacaaatgactaaaagtagctaaaaaaaagctgctaaagtttatctcgcgagattggaacagggccttacttgtctcttggtaaggcgcatatttgagccaatatctgttgcacgctggaactattctttaacacattaaatattttatccttttggaaacataggagtgcaggcaactgaaagatttcgttgttatggcgaagcaaaatggactgcagctcgtgcctgcacttgtcaaaaggatgctggataaaggcatgtttttgtttggctatatgaatttgatcgacgacaacggggacaagtaggtcgaggaattgatcgcattgcagaacaaacgagtaaaatttgcatgtgacaagttatttgcaaatatcaagcagaaagatatatgcacatgaacttggtcccttctcacaccatagaccctcaggccgcttctctcgtcaatacctcgacaacactcctcgccctcctcgcccttgcggtggccagtggactggcggccgacggcttggaccaccgtgtggacttgaatgggacaactggcgatatggttgattttcaatctacaggagatgcagggaatggcgcaaccatcaccgagatgggcaacccggttcctgagccatcctacgaggaagctgttctttcagtagaagaggctagattatggagtgttgatactgtgaattgcttagatttcgatgtctggaccacaattgttgaggagacggacaaaaatgttgagggtgatgactgatgagttcgagcttgacagcatcaagaaattgtcaagggagtatgcagaagcaaaggaactggcccttgcagcccctatcacctggacagaggaaagccaaactgtagaagttgaagatgctaagcacctccttcagagtgtgagaggctgttgggcgacaagatggacgaagtcgtcaaagaatgggatgtccagaaggactgaaggaggggttctaccagaggacaggattatcctcatcccctggcgaccagctcatggcggtcgacaacgatgaatcaggagctcaatgtcacgaggatggatcccgtggcgatcagctcatggcggtcgacaatgatgaatcgggagtacaggatcacgaggacgaccatgacgacggctttgccgagttagaactgctgctagagtgaagaacatctacaagtctgtaaactcttactaccgccgtatatccatgtaatcatcgcgcccagagatgaaatcctcgctcgtctttactaggctctcctttttagttgccagaccttctgttcatctacactggttgcagttactgtacattgaaatagtccagtgcgccagcctatgcagaggaggggaaaaaaagaggtgagcttgagtaaaaatgtagatgaacagtgacaagaaaaaacgctggttgcagtaactgtacatttgaa

SEQ ID NO: 3745 - DNA, 2094 bp, Zea Mays
atggcgtcggcgaagctgctctacattgtggtggttgacgaagacgcctcctccttccgatacacgcgctccctcctccacagcaccctccagctgatgggatgcaagcgacgccacgccttcgaggtccggtgtaaggtgttcgatgtcatccggggtgaccaacagggcctcggcgacacggccacctccgcccgggtgcggaggtacgaggtcgccgaagcaaccccgaccacaagttcccgtcagttccagttcgagctatacaagcgccggaccaccgtcctcctccccagggacctcttcctcgacctcgtcctcgacctcgacgccctcgccctctacaagttcgtcgcccccaaccagcgcaccgatctcatgctcgcctgcaggattcgtgaacgaaaggaatctatcacagttctttgcggaactagtggcaagtctactctttctatgttgctgggaagcaggttaggaattacaactgtagtttccacagattcgatacgtcacatgatgcgaagctttgttgaagagaataaaaaccctcttctctcggcatcaacttatcatgcaggtgaatgtcttgacccagtagcagttgctgaagcaaaagctaggagtaaagtaaaaaaacgctcaggcgtatcaagcaactcaaatattgattatgcgaaaagtggggctcttaccgaaaaagttgatgggaaatcaatcgggaagaagcaaatggccatcgaaggttataaagcacagagcgagatggtgattgattttgattgatagtttggaacggttaattactgcatgggaggacagaaaagaatcagttgttgtcgaggttgttcacttagccttaattttgtgagcagagtcagtcaatctgcagtttggcacctttgggataagtgcctgccctactgatacgggctgtacaagtgaagctggaaatgccgatgaatcatatgcaaatgctgctgaaggcagtagcagacatgttctttcttcgtctggttctccgaagaagtcggatggtcattgtaaagagatcaaagagtcgtcagcagcatattgcagcgatgaagtagaggaagaagaagctgatgtacggcctaattcagggagtgatgaggacctaagtgaagaagacaacagggaggtcgatgatgagttgcttcactgcactctatgctccgaatcccatcgtaagcatattcgtggatgtctgcatgacatatggaagggtctgtcgatgaggacggcaacaggtccgatgagaaatatgacgacctggccatgctggacagtttggagaacggctgtttaactgacgatggcgtgttttattctggtttaagcaaaccttcaagcagcaagttctttagtcgcaatcaacgaagccacagcatgccaaagaaacacaagagaagttaggtactggtgttcctgagacggcacactcttctgctgctgcaatcgctgtcggtacaagcatcaagcggcatgccgctaggaagtggaagcgctcgctgagtgactcaatcccgttcgcggccacggagtgctccggaattggtgtcagtatgcaagggatcgccgcccgtgcctgggctccagatgagaggtagctgatgcggtgatgcctgatgagctgcacaagacatactgtcattttttcgagcataaattgcaaaaaggaaatacgaatattatttccgtggcaccatggatgcgaaaaaggtcctcaaggcataaaacaccttcgataaaacagtacaagggcaggtgtaacatgaaaatataagttgaagctacgattgaaggagcttcgacatgatggcatgctaaagacgaaggacgataccgacttaaagaggaaaatactgtgtagttcctaatgatctgtactgtaaatgtaattagttgttagggacatggatgtaattttgtccgggctgcgtcccgtacctataaatagatgaacaatacctccgtactgttcaggctggattgtaatcattcttgcgttactcctgctcttccaccttctgtcaaaccaaatgtacaaatgtaatatatatactattgatg

SEQ ID NO: 3746 - DNA, 954 bp, Zea Mays
ttcctgaactgcattgtttacatgtgttggcggtatgcaaatgctgctgttgtcaaaatccatcaggtttacggtataagcacagcagaagtgatggaactattggaacatttcctggctatgaatccagataacgatggacgtgtgaaagctgaagatttctgggctcattttggtctggattgcagtcctctgtgcaagaagatatttcactatttcgatttagacattaaggggttgattacgttccgtcagttcttggttgggtgcgcgcacctgaggaagcaaccactgttccagggttcctgcgagaccgcctttgagaagtgccggggtcctgaaacgtctgagatctccagggcacagctagctgatctcttgcggttaagcatggtgccaccttctgatgataagatgctggagctgttcaagacgttcgatgtagatggcgacgagaagatcagcagggacgacttcatggcgtgtcttgggaggttcccgttcctgatcgcgttctttgctgccctgatcaatggggaagtgtacatcgagatagtctgaatgaatgcctgaggcaaagcgatgccgcgtaaaaggctggagctgccagtgccaggcgtaggcaggggatccctccgtttatgcaatgtggatacccaccgggtgctcctccactttgagaccaaagcaactgtagtattgggtattgggttgcatcaagtggctgaccagtgtagtgcgtcgattttgtttagttgcttcgttcgaattattattggccatttaccgaatctgttgagatacgcgctggactagtagattgtcgatggaactcagaacgcaaatagaaagcatctgtaatctgaactaactgagaaaacatttttttttggctctctaacctgctgaagttgtgttttcttgctagctgtagcacttcggccagttgtccgc

SEQ ID NO: 3747 - DNA, 926 bp, Zea Mays
gacctgtttattccttcgtctgttacattgaaagtctggtccctggtgaggcggttcgaccagccacagctcttcaagcccttcgtgagccggtgtgagatgaaggggaacatcgagatcggtagcgtcagggaggtcaacgtcaagtccgggctgccggccacaagaagcacggagaggctcgagctgttagacgacgacgagcgcattctcagcgtcaggttcgttggaggcgatcacaggctgcagaactactcctccatcctcaccgtccacccggaggtcatcgacggccggccagggacgctcgtcatcgagtccttcgtcgtcgacgtccccgacggcaacaccaaggacgagacctgctacttcgtggaggcgctgctcaagtgcaacctccggtcactcgcggaggtgtccgagggccaggtcatcatggaccagacggagccccttgaccggtgaataatgagtcggaccattatattgcattgcattctgtgtacgcgtagacctgttctccaatgcatggagcccctaggttcttggaaaactgctatgccgcgttcaaagtcaagttctttttccccctccttgcgattgtgtttttctgttcttctccggcgttgtatgtcgcggagggagaagtgcagagtatgatgtgcttgatgaaaattgaaagaaaaaaaaaagaatttagaactgtgaggccctgggacatcttcattctcagatcaatatgtggacttgagggtttaatttctctgtaattagattgctccatcttgattcctttctttcctccgtgtgtgtatgtgtgtgttttgtaaatacatgtcccaagtgtgtacttagggtacgtttagttggattgacaggacgggacgagatgagacgatctctcaaataaggttgtttggttcagg

SEQ ID NO: 3748 - DNA, 840 bp, Zea Mays
ccaggacccaggccgccgtcactctaggtccagggtgttacacttggaggtacaggcaaggaacatggagataggcaccccaagattggtcagggagctctaattggagccagtgctactatcctcggcaatattaatgtaggcgaaggtgccatgattgctgctggctcccttgttttaaaggacgtacctccccacagtatggctgtaggtaatcctgcaaaggtagttggttatacagagaaagaagatccttctttaactatgaaacatgatgcaaggagagattattttgagcatgctgccatcagattgagatgattgatacacctaatgacgagtcttctttctattcgtctgtggaatactgtggagtaaaaaaagttccaaatcgccttattggcaagaagttttgtggagttaaaaaaaggtttcgtcgtcttactcgcaggaaaccttgtgaagttaaaaaaaaaatgtttgacgaaacgcatacggatgccattccggacatttcgtcacaggcacaaggctggatagtcgatgagctctgtgtttccctttctgcccagacaaccaaatgaagatggaaaagggtcacccagggctccaaaatctagagtgtagacaagcatgtccttaatgcgccttaaattggtctggatggcacttttttgtgataaactatctatctaaaccattgactaatgtctactctactctcaacaagatcaattaattgtatatttgatattaaagttggaatgtttagtatgacaaatttaatattttaaaatagatatgcatgaaatttgatcttgatctttttctattatcaag

SEQ ID NO: 3749 - DNA, 1871 bp, Zea Mays
cagacagcaaaatacacaaggcgccaaaaccctcaccataaccgcccagccggccgccccgaacacgcatccccgtacggcgtctccccgcactcagtggccgtctcgggctcccgtcgattcactttgctcccaaccgctcttttttctactccactgtgtgcgcctttgcctctttgcgctctcacctgcccgcccgtcccgcctgcctcgccgcaagcgccaagcgcacgcgctcggctcgccgcgtcgggtcgccgcagggcgaacgaaaccctaggatcagggaggctccgggcatcgctgctcgacccccatgacgtcctgcgggtgtctgatgctcgagaaggtggagggcgacgcgtcggcgaagacgagggtgaaggccgcgccgggcgccggtgccggcgcctggtgcggctcgtgcgctggggactggcggggccggtcagaggccatcttccccatctacgtgatggggagctcgcgggagagcaccgtggcggcggcgcgcggcatagtcgactcccccgaggaccccatatgggttgccgtcaaggcggaggccaagtctgaggcagaaaaggaacctattttgagtagcttcttgtatgccagtgtgctgtctcatgattgcctagagcgtgcattgagcttcgtccttgcaaataggcttgaagatccaacattgcttgctactcagctaatcgatatttttaacgatgtcatgctgaataacaaagatatatgccgctccattcgccttgatgctcaggctttcaaagatagagatccagcttgtgcccaatatagttgggcactgttatacttaaagggctaccaatcgttgcaatcatacaggatagccaatatattatggaaccagggacgcaaagttttggcattggcactgcaaagccgtattagtgaggtctttgctgtggatatacatccagctgccaaaattggcgagggaatattgttggatcatggaacaggtctagtcattggtgaaactgctgtagttggaaactgggtttcattaatgcagacctttgatgcagggtgttacacttggaggtacaggcaaggaacatggagataggcaccccaagattggtcagggagctctaattggagccagtgctactatcctcggcaatattaatgtaggcgaaggtgccatgattgctgctggctcccttgttttaaaggacgtacctccccacagtatggctgtaggtaatcctgcaaaggtagttggttatacagagaaagaagatccttctttaactatgaaacatgatgcaaggagagattattttgagcatgctgccatcagattgagatgattgatacacctaatgacgagtcttctttctattcgtctgtggaatactgtggagtaaaaaaagttccaaatcgccttattggcaagaagttttgtggagttaaaaaaaggtttcgtcgtcttactcgcaggaaaccttgtgaagttaaaaaaaaaatgtttgacgaaacgcatacggatgccattccggacatttcgtcacaggcacaaggctggatagtcgatgagctctgtgtttccctttctgcccagacaaccaaatgaagatggaaaagggtcacccagggctccaaaatctagagtgtagacaagcatgtccttaatgcgccttaaattggtctggatggcacttttttgtgataaactatctatctaaaccattgactaatgtctactctactctcaacaagatcaattaattgtatatttgatattaaagttggaatgtttagtatgacaaatttaatattttaaaatagatatgcatgaaatttgatcttgatctttttctattatcaag

SEQ ID NO: 3750 - DNA, 1285 bp, Zea Mays
ccggcaagcattcaagggaacgaaaaaaaaatctacaacgggacaattgaaaggcttgagagtatggtggatggaggaaatttctatgaagctcaacaaatgtacaagtcaaccagtgcaaggtatattgctgctcagaagtattcagaagccttggacatccttcagtcaggcgctttggttcaattgaagcatggacaggttacctgtggtggtgaacttgctgtcctctttgttgacaccctcatcacaggagagcttccatatagtgaacaaatttttgatcgtatcagaaagatgtatgaggcattcccaagggtaactgttccacatttccttggagatgactatgatgatgaggggcatcaattatctgaagctatttctgctgccaaagtgcgggcagagagttgctcatcattcatgaaagctgcaatcaggtggtctgctgagtttggaacatcaagaaatggttcttctgagcttcacgttatgttagcagaatacatatattcggaatctccagagacggacatgactaaagtctcaagtcattttgttcgtggaaatgatccaaaaaagttcgcttctatgctggtgaactttatgggcaagtgttaccctggtgaagatgatactgcaattgcacgtggggtcctaatgtacctatctcaagggaacttgagagatgcaaatttacttatggatgagatgaacgaacaactaaaatctgctaactcggaatttccgaaaacagatttgattcagttcatcaagtatcttttaccaacacttgagagagatgcttaccctctttttagaacacttcgacagaagtataagacaagtacagatcgtgatgctgtgtttcaggagatataatgcacgagaaaagaattttatgtcgatgctttcatctaaaccattggctggaataatacaattggtcaacaaaggtgtttgctcaactatgaatctccaaggccatacatttagcatcatgctgcatgaagatatatacttagctctgcagcaaaatcgtcgattagtgtcagattgttactgagcatgtgtaactgaattttgttttctattacttgtttctctttgttgacttgcccttgattgttattgaccatgcataactgaattttgttttcttttacttgtttctccttgtcctgttcacttttggagatgtattttgtgtacccacagatcaaaactataacctatttaaattcattgattttaatatatggtgttatcagtaaagttcattgaa

SEQ ID NO: 3751 - DNA, 1518 bp, Zea Mays
caactataccacacaccaagagccacaggccagaggccacgcggccacgccgtcctcttcaccccagggttgccgacgcggcgactccgatcacccaccaccgctgccccctgtcctccctgctgccgcctgtgccggggctagcccgccgcggagccatgtcgcggtccttgagcatgagagggagcatgagggcgcgccgcgacctgcctcctcctgagaagacaattgaaaggcttgagagtatggtggatggaggaaatttctatgaagctcaacaaatgtacaagtcaaccagtgcaaggtatattgctgctcagaagtattcagaagccttggacatccttcagtcaggcgctttggttcaattgaagcatggacaggttacctgtggtggtgaacttgctgtcctctttgttgacaccctcatcacaggagagcttccatatagtgaacaaatttttgatcgtatcagaaagatgtatgaggcattcccaagggtaactgttccacatttccttggagatgactatgatgatgaggggcatcaattatctgaagctatttctgctgccaaagtgcgggcagagagttgctcatcattcatgaaagctgcaatcaggtggtctgctgagtttggaacatcaagaaatggttcttctgagcttcacgttatgttagcagaatacatatattcggaatctccagagacggacatgactaaagtctcaagtcattttgttcgtggaaatgatccaaaaaagttcgcttctatgctggtgaactttatgggcaagtgttaccctggtgaagatgatactgcaattgcacgtggggtcctaatgtacctatctcaagggaacttgagagatgcaaatttacttatggatgagatgaacgaacaactaaaatctgctaactcggaatttccgaaaacagatttgattcagttcatcaagtatcttttaccaacaacacttcgacagaagtataagacaagtacagatcgtgatgctgtgtttcaggagttactggatgaaatagctgcaaaattttacaatatacaacgccagaaccctttagaaggccttttcagcgaaatgttcaagatataatgcacgagaaaagaattttatgtcgatgctttcatctaaaccattggctggaataatacaattggtcaacaaaggtgtttgctcaactatgaatctccaaggccatacatttagcatcatgctgcatgaagatatatacttagctctgcagcaaaatcgtcgattagtgtcagattgttactgagcatgtgtaactgaattttgttttctattacttgtttctctttgttgacttgcccttgattgttattgaccatgcataactgaattttgttttcttttacttgtttctccttgtcctgttcacttttggagatgtattttgtgtacccacagatcaaaactataacctatttaaattcattgattttaatatatggtgttatcagtaaagttcattgaa

SEQ ID NO: 3752 - DNA, 1178 bp, Zea Mays
acagattatgcagtggttgagaaaccatccttgacaacatggatgaaaggaggacttgattatatagttcttaaaagtttagatacagacgggattcgcataatttcaagcgttcttggtcaaagtatcgcccttgatcactatattcggcaggtcgatgatatggttgaggaattcactgaaattaatcgtgtcatggagaaaaccggtaactttaccatgcaaagaaaaaaactctttcaacttgtgggtaaggccaattctaatcttgcggatgttatcatcagacttggtctttttgacagaaattgcttggaaaaatgcaaattatgcacaaattctagaatatcttcgggaggaatatgaactgaatcagcgttttggaagccttgacttcaaactgaaatttgtggagcataacattcactttcttcaagaggtcctccaaaacagacggtctgatctgctggaatggggtgtcataatactgctgattattgagattgctatctcattatatgaaattgccaaggactccatgatcgattgagagctctgaacaacacctctattcatcctcgatcatcccattatgctaactccagatccactgttttaacaaaaaaaggaaaagaatgaccccagcttccatattttctgactatccatctccaccctttggatttctaaccttagatgaaaggaagttgggaatggcgttctggcttgagtttatttacatcctttaattctacaactccaaacgaaaagaagtttggccaattttcctatgtccaatgagttcccgggcagccaggttttccaatttgagtagaatctagttttcctttcaatattcatgccaggtgttcttgatacatgttcttggtgccactttttagtatcttgataggactgtcagctctttttttttgggggcaaggctgacgccaggcagctgcaactggacctgatggaaaaatcatgaaagtttttatcaaatggctttgtaatttgtacaaatacttagcgtgggaaggttccatttggtttaaccatactgaattgctcgttccattttgcgtggtaattaaccatgcatactgtaagtatgtgtagtacacttgatgcctatgagtgagagtgaattagatatttcttctagtcaaaatctatgc

SEQ ID NO: 3753 - DNA, 1202 bp, Zea Mays
acagattatgcagtggttgagaaaccatccttgacaacatggatgaaaggaggacttgattatatagttcttaaaagtttagatacagacgggattcgcataatttcaagcgttcttggtcaaagtatcgcccttgatcactatattcggcaggtcgatgatatggttgaggaattcactgaaattaatcgtgtcatggagaaaaccggtaactttaccatgcaaagaaaaaaactctttcaacttgtgggtaaggccaattctaatcttgcggatgttatcatcagacttggtctttttgacaggtatgtctactacactcaagtcagaaattgcttggaaaaatgcaaattatgcacaaattctagaatatcttcgggaggaatatgaactgaatcagcgttttggaagccttgacttcaaactgaaatttgtggagcataacattcactttcttcaagaggtcctccaaaacagacggtctgatctgctggaatggggtgtcataatactgctgattattgagattgctatctcattatatgaaattgccaaggactccatgatcgattgagagctctgaacaacacctctattcatcctcgatcatcccattatgctaactccagatccactgttttaacaaaaaaaggaaaagaatgaccccagcttccatattttctgactatccatctccaccctttggatttctaaccttagatgaaaggaagttgggaatggcgttctggcttgagtttatttacatcctttaattctacaactccaaacgaaaagaagtttggccaattttcctatgtccaatgagttcccgggcagccaggttttccaatttgagtagaatctagttttcctttcaatattcatgccaggtgttcttgatacatgttcttggtgccactttttagtatcttgataggactgtcagctctttttttttgggggcaaggctgacgccaggcagctgcaactggacctgatggaaaaatcatgaaagtttttatcaaatggctttgtaatttgtacaaatacttagcgtgggaaggttccatttggtttaaccatactgaattgctcgttccattttgcgtggtaattaaccatgcatactgtaagtatgtgtagtacacttgatgcctatgagtgagagtgaattagatatttcttctagtcaaaatctatgc

SEQ ID NO: 3754 - DNA, 699 bp, Zea Mays
gacagacctggtggagtcaagtactctaccaaacttgccccttcccttcccagcgcgctctctctagccggcgacgattgggcgagcggcgccactcaacgccaggtcttcgtgaaaaccatcgccggcgatgagtttcaaccagtctactgtcaaggggcaggccaggagggagaggcctagggctcgccctcatggcctgacgcagcagaggaggcaggaaataaaggaagcttttgatctgtttgatacagataactctggaaccattgatgcaaaagagctcaatgttgccatgagagccttgggatttgagatgactgaagagcaaattaggcaaatgattgctgatgttgacaaagatggcagtggagcgatcgactacgaggagtttgagcacatgatgactgccaaaatcggagagagggatagtaaagaggagctttcaaaagcattccgcattattgatcaagatggaaatgtaaggcatcatccctcttttctctgacacacttctatgattatagtggactattattttgcttgccttatcttttcgagtatgtcaattgtgaacctccaattagacaattagcaacttgaatgttctctctagtcaacacaatcacccaagttgcttccataacttaagatgatgaataatgaaggctttacacagctttcaatcctctctcctag

SEQ ID NO: 3755 - DNA, 975 bp, Zea Mays
gacagacctggtggagtcaagtactctaccaaacttgccccttcccttcccagcgcgctctctctagccggcgacgattgggcgagcggcgccactcaacgccaggtcttcgtgaaaaccatcgccggcgatgagtttcaaccagtctactgtcaaggggcaggccaggagggagaggcctagggctcgccctcatggcctgacgcagcagaggaggcaggaaataaaggaagcttttgatctgtttgatacagataactctggaaccattgatgcaaaagagctcaatgttgccatgagagccttgggatttgagatgactgaagagcaaattaggcaaatgattgctgatgttgacaaagatggcagtggagcgatcgactacgaggagtttgagcacatgatgactgccaaaatcggagagagggatagtaaagaggagctttcaaaagcattccgcattattgatcaagatggaaatggaaagatttctaacattgatatccagaggattgccaaagagctgggtgtaaatctcaccctcgatgagatccaagacatggtgcaagaggctgatagaaatggtgacggtgagatagactttgacgagttcatcaggatgatgaggaggaccagctttggctactaggtgtatttatctgtatggcaacttttatgtataacgagcacggcccgacaacctactaagaaaatggtagcgtaggggacggagggatggacggtgaaaacaggtggcacgccaacgactggacggagcgtgcgaggaaggggaaatggcagcgcatggcacgaatgagagatggagatagagagagaaagaatgagtgctacctttcagaagaaagaatgagtgctacctttcagaaggaagaagtcggaatagaaaacgctcgatccgtggctgggagtaatggccagaaacttctggaggctttggggattgtatgactggtg

SEQ ID NO: 3756 - DNA, 1728 bp, Zea Mays
aacaaaataccgatcgcccgaccccttcagtgccttgactcacgcccgcggcaaccggcgacgaggcggcacgaccctccagtccggagtccgccatgcctcacgccgccgccaccgccgctgcggcgctcccgcgtgcctctctgctcgttatctcggcgccgctccgcgactccctcgccgcggcgccgtacgagccccccgcgggcgcatccgcctccgtcaagtccctcctcgcctctctcctcccttcgccttcccctccccagccccagcttcaggagccggcgggtaaggagtctggggacctcctcctcttctgcgctgccgtactcgcggcctccccggagtaccccgcgctgcactgggtcccggcgagcctcgtgggcgcggccgccgccgcggtgaacgagctggcggcggcgggaggttggggcagcgttggggatatggtggtggccgtggcaccggaggtggtgcctcctctcaaggccgtggtgaaggactcgtgcgtcgatgctgacagcgacgagattggggctgtgaagccgcccaaggagcacgcagcagtcgccgcgcaccagttccggtggctggtgtctcaggtaagctaccctaagctcggggatttgtgttcgttagtcattccatgtgccctgacaaccttagatcattggtcaccagaagttaaggtacagggaatggtaagctttgtacacatagcgaagaatgtgaaagcaacggaattaagtttgtatgaagatgccatacttgatgcgtgctgtcagaacattcctgcagatgatgagttatggtaccaggttattgaggtatctgtgatgttgctgacattcacccagcggagcaatcctcgtagcccctggtatgatcgaatgcttagtgagatgttgggccacctggaacggcagccactaaataaagagcgtcgtgttgcatggttgacccttattgggccagtttttgatgctatgggcctcttcctgttggcacattttcgccgccttttctcactgtttttccaatggatgcacactgatgataataagacagttcttctgactttaaagcaaatacatgccattatcaagcttacctggatcaggaagtcaccttatactttgaggtattataatacatcttcgcattgttgctggtggacgagcttgttctattatataaagaatcagccacaaggagcaaccgtgaaatcatgcgagatcatatcctggagatacttgtactgcttcagaactgcaagggacatcaatttgaggaagcttggaagaaacatgaactagacccagacttgacgatgctgctgtccactttcaataagctttgtataaaaaacagttcaccgtgatgttgagttcaactacatgtgttatcagtgtaaatatttcaccatcgcctatcctgtcactgaatatttcactactgcctattctgccactctcatctgctgaaggaaatcagccttgattcttgtggcagatccattttaaaaaaaaatctagtacctgtagaggcagctggacaaggtaatgaacaactcatgccttgtcgacagccttcttcctctgcatccgttctggtacacgcgtttgtgttctgtgtgacttcatcgtggattcagtgcagctgactgcactgcatgcaacgtgtatattttgctcacactcagtgtggctcacagcttgatgatag

SEQ ID NO: 3757 - DNA, 5366 bp, Zea Mays
gactcagcccactagcccagccccggcaaagcctcacatccatccggagggcgcagcccgtcgctccttctcgccggtcgccgccgcccccctctcatcgtccaaggctgcctccatgcacgccgccgccgccatgccctcccgctgctggtccagactccaaagccctcactcctcccgagcgaacacccaactcacccctcgattgctgtctgtcctgtttctgtttggaatgccgcttctttggctgcttccattccatggcggaaaaatcgcagcctttctggatttgcatcggttatctctttgcctgtgcgggtggagctaagctgcccacgtcctgcacgctgtccccgtctccccgacggatacgcccagcccagtcgacgacaggggagcaacacaacagtgatgtagatggattcagattcagtgatgcaggaagcttctcctgaattactagacatgtagacatgatgacaattcgagtaatcaacttgagtgtcggtaatagtcgctggctccaaggttgtcgacttgtcgtggtgaatggtacaaaggcacatccctatcgtcttggcatacccttggagcagctgacttgactttgtgtgtctgctgcactaggtgcttgtataaagtgtgtcctttacgaagccagagggcacatgtcatctgccttatctggagcacacttaggctttagggggagggaggaagggatatcagttcgtcgatccatccaggggatggctaactacacggcctattgcatcgctttgaaggctaaggatcatcatgatctcagggatatgcatagcttatcagcttgtgcaaagtacctttggagcacttctagggcaacagtgatccgcaatgaggtacttgtcgtattgtctgccatcagcctgttgttcatgaccacctttgggcccttgcgccgccggagcagaaactcgtttgtacagaatggtttcatggttgcatacactttgtcctcgtccctgatatcatacacacttggttcaatgtactcatctgcagtaaagagcagcatgtatcccatttgggcctcatccctgtatctcctcttttgttctgcggactctattacatcttattgtctcaatggcaacaatcaacaaaaggaacagcttattttgtttcttcttttccaaatatatgtcagccaaataactaatggatctgattctaatggctctctagttttttcggtagctgcttttaaatttatggaacgattctgggcataccagctggccaccggatcatggaatttgaacaaaatggttgctgactacatgtatgaggaacaatccagaagtggctcatcttatgatccaaccagcatgaaaggttatcattacttagttgattggcccttggatgagtcaaaactggaagcaaggatgtcatatgcaaaggaattaacagtggatgatgcacagatcattgacatagagaggatatttatgtgcagtgaactaagctccgagctgaaggatgtatgcctttccttctctctttttcttctgctgagaaggcgcttctttgggtttgtctgcgttgaagcttcacagcgaaagacacatgattttgtcttcaagggggttttgtcaaagaatcaggacggaaccctcaattacgacaggatcttcaggttgattgaggttgagttagcttttatgtatgatttcttcttcaccaagtatgctgttctttactatggatctaaaaaggtttcagcaatttggtccctggcatcagccagcttcatgtctgtgacaatctacaagctgatagaaagtgttctttctaaccagaatcggtctgaattcgtgggcacaacaacatctgatgttacaacaacatctgatgttgttgtaacaatactgatagtagcatgcattgttttgcttgagtttatccaagtattacttttttttagcaccatttggtgcagagtatcatttgtttgccattatgttcgagaacaagcaacgaacacaaggagaggcttctgcatgaaactgtttcaaaagttctgctgcatgagattcagggagattattcttaacatggctattggtatcaccaggtcaaggtcaagcgaatactactaccaaaataaacttgggcaatactccttgcttgaatcagtgattagttgcaagtacaagcagagtccacgtaaggtatggtttcacaggtttatgcatcgatattgtagtcttatagtggctccagactttgggtacctttgtaatacaaacaaagactttattcacgcacaacgtatccgcaagaaacatgtgaaacctgcagctatcaagataccagtagaagtaaaaaaggcagttgtccattccctccagcgtacacagggtgtcctagcgaatggagaatcgtcattagtgtacaatgaggtgcatgacctcttatgggcttgcaggcacaatatgctctcagacccaggcaccaactgttacctggacaaggagaatcagacacacatcattttgacttggcacattgcaacgtgttactgcgaggtgcaaacattgaaatgcctttatcctagagttgggggggcactcaagttacatcttgacatcgcaaccatactgtcaaagtactgtgcatacctggtggtctcagcaccgaagttgcttcctgggaactactatgattctagccttgtgtttgatgcagtagcagtggaagctgcacagtttctgcagaaagtggaagacaagtatgaagccttgagaagtttgcctgtatcaacagaaacctccatcttacagagggggatgaagttggcgaggcagctcgaggagatggaatgtgacaagtgttggaaggtgcttgcggatttctgggcagagatgttgctctatatcgcgccttcggaaaatgtgaatgagcatttcgaggcactggcaaatggaggggagtttataacacactggtgggcattgctcacccacgctggcattctagagagggctccaaggaatgtcaacaatgacatagaaaatcaatgggaaggatcatcatcatatggttgcccatctacaactcaggctgcagctgcagcctgtgccacaaatcaacagccaatggctggggaccgtactgtgcaactgattgaaatgaatgtcggagacatagaagatgctaagactgacaggcattatcctggagagatttcatatggtgctgctttaaggcttcgtcgtgcgaactcctacattagcaagtgtagagaagctgctaccttagccaccagcgccacgattaaaccagcaatacgtggaaactgtgagcaagtgaggatgatgattcggcaacaagcatatctaggtcaaaatgtggaactcgcaagtcccagcgcaagcactgctccaagtgagaacaaagagattgaaattgtaatagcatgtgagtaatgttgctatatatgtgtcaatgaatgaaatttgtacatatgcatggggcaacattcacaggttcagctggtcatttgtttgtggagccatgaactattatgaagttgtcctgttattctgaaagtaaaagagtgcagagatcatatgtaatgtgacagatatttagtatcaaaatagtgtacaattgtcttaagatgaaattcgtatatatggggcatcttcattcacaggtcctgctgtatgatgcttgctcatgccatggtgattgctaattttgtgtgttttagttaacacttgttctattcaacatatttctatctgaaaacaagtgtggtctttaaaaataccaaaacttgtgaattccgtgcggaatactgaaacctatgattgatgggatgtttgaatgcactatagctaataattagttggctaaaatattgctagtagaattagctagctaacaaataggtagctaactattaactaatttactaaaaatagctaatagctgaactattaggtagggtgtttagatgtctctagctaatttagtcactaactattagctctagtgtattcaaacactccctgagtatcagaatgcagggaaaaaagctcatcagtggaccaagtggacatcttgacaggagtcacgctactcctgatagcaagggttcctgccaagttgggctacaggaagaatacattgtttgctccaactatcgcacttggcaaaatctcattattactggcaacagctgcacctgggttggatactggagaaggttgcctgaagagactactgaagctaagctactgatgcgttatttggttcagttaatcagttgtatcctctgcccttgtaggctgttgtacctcacctgtgtcagcaacatttttgtgaatctaaaacagttagcacatcaacaatgctgacagactagaaccgggctttgccggtctggatgtactgcttacgtgcattgatgctagtgtggacagcaaatctctgcactgcatcatcagactgtgttcttgaatgaaaactctggagagctgggacgcaaagacatctgtccgagccaactgcagaagatggaagacggttcagactggaaaatagcagcatgtcatcttagagattttgtgatattggcagcatgcatccagtctgtgtaaatgtcatgtgattcaaagagaactaactggaaaaagaagttctgtatgacggcagcaccttaggcagctgggctctcgtggagttccctatggtgtgcatggcatcaaccgcagagctaagagcgtttcttatcccttgaatatctgcctgaaaacatgaggtctcagtatttcaagatgagaagcaacagattgacgaaacttagttcctggtttatggaacaccaaccactgctccatcggagacaggaaggcgcaggacggtggcagtcagagcctgtgtagttcctgacaaagaatgggcatggcccctctccaagaagggccattcttccaggtatttcatctgcgttttttagccccaggaagtcaggaggaggggtcagtcaatgacccgacccctactggttaatgtaaatacatacgtaggaataaaaagaagatagcttgtactttcatctgcatattgtaattttatcagattttgtgcggacaatgtgtactcagaacgaatctagtgtcataaattagcgattagttactccagcgcggcaaactgggtgtacgagctttaacctttaagatagcaattatagttgcatcttcatgaaccatgtcatggccattttaatttgcaagctagtatgaagtccgttttatcagtgagatgggttgtcagtgttgtggaacagatggagaattgagctgtataaa

SEQ ID NO: 3758 - DNA, 733 bp, Zea Mays
gaggaaaaaagatatcatcccttcgcaaggagttggacgaagcaaaccgagctatggtggagctagaaaacaagctgaagttcaaggaagagacagctgctgctgcaatggcggcacgcgatgctgcagagaagtctctaaagctagcagatacgcgatcgtccaggctacgtgagaggctggaggagctcaacaagcagctcgaagaatcagatacgagaaccgagtcggtgaatcgcaatggccataggtacatgtgctggccatggcagtggctgggactgaactacgtgcagttacctctagcggagacagaccagacgtccaacgagatggagctatctgagcccctaataatataggtgctccgacctccatacttgtacagattacagatatatacagatcctgctctttcactagataagggggaacagtagttttttttttgggaggggggttgggttgatgggttcttgtgtagatgttttcgcaatttcttgatgcatgctttgcggaaaacgggcgggtgctggaaggcgccgtgtaattgtaaaaggtaccacttagtgaagatgctgagaagttcattctttgacaagattgttcttgaaacaagtctcgcttgatcttcattgtgataacaatgtgctacactgctactctacttagacggaggaacttgtttgtttaccctttagattatataataatccagtttaaataagtcgac

SEQ ID NO: 3759 - DNA, 3477 bp, Zea Mays
gtcagaatcatcttttcccactcctgccgtctattttcccgactactctacgtgcgctttctctctctgcgcaactaggtgaccgcgaccgcggccaccgccctacgtcacgtacgtgcttgctagagtctagcctcgtcggttccttcgcatggtctcgttcaggcggacccttcgccggcgaccaacacccaccagcaatttactggaagtgtggaaccacttctgatgctgtctttgtaaatattgatggagctagctgagtagaaatggactgcagtcaagatccccaagaagaaagccatcaaagaagggagaatggtgaagaagcagaaaagacggctgactatggaaatgctttgagtcgtaaggaggtaacagaagagcttcttggttgtgtggttcatagtgaggaagaggcgtacaggttgtactgtgattatgggcatcgaatcggttttagcgtgcggaagggcaaacagtcttactttattggtaccaagaatattcgaacaaaggattactactgctcaaaggaagggcttaaatacgatgagcctgttacagaagcaaattttaatcgaccagacacaagaactaattgcaaagcaatgatccgctttagagttgacgagaaggggcggtggacagttatacgctttgttcctgtacataatcaccagttggcaaaacctggagaaagacacatgctgagatcagccaaatcgcttgctgttggcaaatcaggtgttatagatccattagcatctacagaggcacatccaattaatggtttctctgatatgacaggtgatatagttgagaattcagggtatactataagggaatgttacaatcaagtgggcatgcagagtataacagtaattgaggcaggggatagccaaagtcttgtcagctatttcaagcataaaactaatgaggaaggcatgttctattgggacgtccaagttgatcaagaagggcgcatgacgaacttcttctacagggatggtaaaagtagaaatgattatggctgctttggagatgccattatatttgatacaacctaccgcacaaacaaatataacttgatatgcgccccatttgttggtgttgaccaccattggcaaaatgttgtttttggctgcgcgttcttgttagacgagtctgtaacttcctatgcctgggtatttaaatcattcttggagtcaatgggagggcgatcaccaaaatcaatattcactgatcaggatgaagctattatgcaggcagtcaaacaggttttccctaatacgcaacattgtttttcctactggcatattctgaagaatgctcaatctcatttaggctcactaaatacgtctcaagcatttcaaagtatgtttaccaagtgtatgcaaggatctgactcagaagaggattttaaggaatcatggactgcaatgatccaggaatacaagctacaggataataattggttgattgacctttatacattccatcataaatggtgctcggcgtttaacaaagatacatttgatggtggaattaattcttctcagtggggggaggtttcaagtaatattctcaatggaatttctgatgaaaatacctctcttacacgttttgcccttttgctagaaaaggttgtcaaggatctacgtagaaatgaatctgaagaggattttcgatgtagccaaactgctccagtccgtgcaattaagcatagtaccgttttgaagcaagctgcagaatcatatacacataggatctataaattatttgaagcagaatttctggatgggtgtggagcaacttcatgccatgaaacttcgagtggtggaaatttattgaggtttggaattacaatgcaggggaggggttcaaaagtatgggatgttgttcttgacacttccaccatggagatcagttgtggttgtagaaagtttgaaaggatgggtcttctttgttcgcatgccctcaaagtcttcaccctgcagaatgttgacacaattccagaaaagtatgttttgaaacgctggacaaaagatgccaggagaagcatgtatacacttgctcaggatgattcaacccaacaggaatgcacagaggctgaacttgcatatcgcaatcgggcaatgcagtatgcatataacctaattataaagagccaggaactggaagaatcacgaaaaatattctgggactcccttgaaactggagagaaggcactggaagtgttctttgaaatgagaaacatgcgcactcaagcagccaaggatgctgataagaatgtaaagaagaagaaaaaaacatcaaaaggaacaaacccaaaaaaagctaaacaagccccaggagtttcctcaactggtccagagctgatagtccatactaatgagcatcaatttcaatcttcacaagatgctcagggtaatgcaaccattggaagaccatattactatcaggcttttccaaatgcccctatacaaccaaaccagatgtacatgcatacaaatatgcacacaatgcccctttgcacaccgcaggagctgtctgcatatgctgcaatacgccccaattcaatgtttggtggtgccaagaacatctgaaggatattaaggcctcaatccgctgtgggcgtgagtttctccccttccaaggcagtttcctgcatgggttcagcttgagttgagctgctgagttgtgaacgaggaagcaaccaaagcaactgggagcctgggagagtgggagtggaggagctggctgccggcactggccgaggaactactcagtccaagacgtgtgtcgatctgaagtgacgctgacggctgacctatcacctatgttttgggaggggctcagggccggcaacagccatggccgggcaggtctccacacagtggccactggagctagaactggacctggaacggcgccccacctgccaaacggcaatgctgatgaccgcttgacagctgcttccgatgggctggccacctcccactgcccacatatgaaagggaacctggaactgtgtttgctcggcaaccagcactggtttggggaaacagaaagggtacataattgtagattgagagaaaaattagaggatgcagctgttgcttgggttcagtggtgaaggaagcagctagcagcttcttgggttcattcaagagagattggagaagggggaaggattggaaatgttgcttctgattcgcttgaactctgaatttctgattgtttccttgttcacagaatgtagtgtcatgcataacctgggttgccacgccttgtttctgaggcgtgacatgtgactgtcgtgatggtgtttttgaaatttcggttggtaagaaatgctgaaagaagaaatggcgtcattacgttcgttgcattgctttgcctattttgcgtgtttaatggaatatgattgttgtatggcacttcactctgaatgtgagttgttttatgctgagg

SEQ ID NO: 3760 - DNA, 550 bp, Zea Mays
cggctccgctgtgcccccggcccccgccttcatgtcactaatcgacaagggcgtctcgaatggaaggagcccatccaacccaacgaagaagcaaaatccccaatctctgcgccgccgccgttctgtgtcgttcttcgcccgccgtcgttccgtgtcgttcttagcccgccgccgtttgtagtcgcggcttcatcgtcgcgtaccgatccccaccgcccccactgccaccagaggtgtcgacatgtctcagaacaacccctcccagcttctcccctcagagctgatcgaccggtgcatcgggtccaagatctgggtgatcatgaagggggacaaggagctcgttggcaccctctgcggctttgatgtctacgtcaatatggtgctggaggacgtcaccgagtattggttcctggtggttcaccacctgatgtgtaatgaacttttgcttcccagagtatcattcgtggcaatggattatgaagaaacctgataaatggaagcgcatcggttgtatttggcgtttgattgacagcgttacttttatttaaaa

SEQ ID NO: 3761 - DNA, 1967 bp, Zea Mays
caccgctcctaacccgcgagcggttcatccgattccgcccccagtccttgcatgtccccacggttccgtgaaacgtctcgtcgtgtttggtctcatcatagggacgtggctaatcgcgatcctgctgtctccttggaggttccggacgcatgtgaccgtggaattccattcctcgtgcgcgattaggttgagacgtcgtgatcctcgtgcgcccgccgtacaaacccgtgatcctaattgtgctgatggatcgattggaaatgcaggacgactcgaagagatccaataggcccaaatattctaagtttacgcagcaagagcttccagcatgcaagccactgctaactccagcaattgtcatttccgccttcttactggttggcatcctattcgtcccaattggtctcgcatcgctttctgcgtcacaagagattgtggagctggtagatagatacgatacaagttgtgtgcccgtggctgacaaagttgggttcattcagaacactaaaacggacaaatcatgcacaagaactctaactatccctaagcatatgaagagcccaattcaaatatattaccagatcggtgacttctatcaaaaccatcgacggtatgtgaaaagtcgcagtgataaacaattgcgatataaagatgctgcacacttgacaaaagattgtgagcctgaagtttatagtgctggcggtgccccaatcgttccatgtggcctcgttgcttggagtttgttcaatgatacatatacaatttcggtcaacaagaaagctattgtagtgaataaaaaggatatagcctggcagagtgacaagaagaaaaaatttggcagtgatgtttatcccagtaactttcagaacggaaatcttataggtggcgctaagctaaatgagagcataccggtatgtgagagagtttctgtgtcttcaacactaagtgagcaagaagatctcattgtttggatgagaactgctgccctcccaactttcagaaagctttatggaagaattgagacagatattatggaaaatgatgaactcacagtggttatacagaacaactataacacatacagttttggagggtcaaaagcactggtcctctcaactacatcttggattggaggcaaaaataatttcattggtttcgcatatctgattgttggtggtttttgccttttccttgcactggtttttgtagttctctacatgattaagccaaggactcttggagacacctctttcttgtcatggaataggggtaccatggactatccaagctaatacatcgaaacattctctttataaaaatagtggaaggacccattgccaattggactgcactgcagagtctcatgcattgctcacctcaaagaatgacactgcaaacaaaggtggaaacgatgttactcctatctgttacggatgcactacctgtgtctgataaaggaaagtacaattctagcatatgatacctcaaacttgattaattatagataaaagaagttcagcttgtgtttcagaaacgtcatgctgagtacaattctagcatatgataacttactgcagcttggtaattacgatttactagctgcacattcccaaatctgcagcatgtgcgttcaacgatgaggtgtttggacgaaggagttttgcaccttcttccattgttaagagcagtagatggtgaggaagtacctggagaggtcgtggtgtcgacggagaagctggcgagggggatgacgaacgacttaatcctccccgtgcagtacttcgtcttggatgccatcttggacgtgttctgcagtacggtgagcatgagcacttctcagaatccggtggagcaagcaggcaagctgcatgcagctccgtctccgaacgagacctacctgcatgagaaggtagctcttgccatcgccggagttcttgatgaccttgaagctctgaccgtagtatatc

SEQ ID NO: 3762 - DNA, 3874 bp, Zea Mays
ttccagttccatgccgcatttcctttccatttctgttgctctcctctctttacccgtcgccgccctcgccctcgccaccacccgcacccgccgcgcggcccccattcgcctcgatttcgccggcggcgatgtacggcaacgacaactggatcaacagctatctcgacgccatcctcgatgccggcaagggcgtcgcggccgcggccgcgggcgccgtcaggggccggggcggaggctggggcggggaccggccctcgctgctcctccgcgagcgcggccacttctcccccgcgcgctactttgtcgaggaggtcatcaccggctacgacgagaccgacctctacaagacctggctccgggcgaacgcgatgcggagcccgcaggagaagaacacgcggctggagaacatgacctggaggatctggaacctcgccaggaagaagaaggaggtgcgcctttttgctcttgaaatgtctgaagatctttttgaaggagtgaagggagaagacgctggtgatccatctgttgcctacggtgacagcacaactgggaacacacctaggaccagtttatttgacaagctatacatagtgttgatcagtctgcatggcctgatacgtggagagaacatggagcttggccgtgattcagatactggtggccaggtcaaatatgtcgtggagcttgctaaagcattaagttcatgtcctggagtttaccgggttgatctattgacaagacaaatcttagccccaaattttgatcgtggctatggtgaactagatgagctgctggcttcgacaagtttcaagaactttagatgcgaacgaggagagaacagtggtgcacatatcatcagaataccatttggccccaaagacaagcatctagctaaagaaaatatctggcctttcattcaggaatttgttgatggtgcactaggtcatattgtgcgcatgtcaaaaactataggcgaagaaactggcagtgtgtgtccagtgtggcctactgtgattcatggccattatgccagtgcaggagttgctgctgctctattatctggagcacttaatgttcccatgttgtttaccgggcattttcttggtaaagataagctggaagagcttctcaagcaaggtaggcagacaagagaacaaataaatgtgacatacaaaataatgcgccgaattgaggcagaggagttgtctcttgatgcatctgaaataattatcgcaagcacacggcaagaaatagaagaacaatggaacttgtatgatggttttgaagtcatgcttgcgaggaagctccgtgcgttagtcaagcgtggtgctaactgttatggtcgttatatgcctcgtatggttataattcctccaggagttgaattcggccaattgattcatgattttgatatgtatggagatgaagataaccaatctccagccttggatccatctatttggtttgagataatgcggttcttcacaaatcctaggaaacctatgattttggctattgctcgtccatattctgaaaagaatattgcaacacttgtgaaggcatttggtgaatgccatccgttgagggaacttgctaaccttacactgataatgggcaaccgtgaggctatttccaaaatgaacaaaatcagtgcagctgttttgacatcggtgcttacattgattgatgaatatgatttatatggtcaagtggcatacccaaagcttcacaagcactctgaagttcctgatatttatcgtttagcagcaagaacaaagggcgcttttgtaaatgttgcttattttgaacaatttggtgtcaccttgatagaggctgccatgcacgggttgcctgttattgcaacaaaaaatggggctcctgttgaaatttatcaggttctggaaaatggtctccttgttgatccccatgatcagcatgcaattgcagatgccctctataagatgctttctgaaaagcagttttggtcaagatgtcgagaaaatggattgaaaaatatacaccaattttcttggcctgaacattgcaagaattacttgtcaaggatatcaagtcttggtccaagacatcctgcttttgcatgcaaagaagaccacaaggtgcctgtgaagtgcaggaagcatatatctatcattgctgtagactctgttaacaaggaagatttaattcaaattatcagaaactctgttgaggctacacgcactggaactatgtcaggttctacaggttttgtgctgtcaacttcactgacaatagcagagctacagtctgtaatagtacgcacaggcatgctcccgactgactttgatgcctttatatgcaatagtgggagcgatatatattatccattacagtctagtgatgtgccaagcaattcccgtgttacatttgcgttggaccataactaccgatcacatatcgagtatcgttggggaggagaaggtttaaggaagtacttagttaagtgggcttcttcagtagtagaaagaagggggagaactgaaaagcaagtcatctttgaagattcggaacactcttcaacatattgtcttgcatttagagtggttaatccaaatcatttgcctcctttgaaggagctgcaaaagttgatgagaatccagtcactgcgttgtcatgctctgtataaccatggcgccaccaggctatctgtaattccaatgcatgcatcgcgatctcaggctctaaggtatttgtctattcgctggggcatagagttgccaaatgctgtggtcattgttggtgaaactggtgattctgattacgaggaactgtttggaggtctccacaagacagtcatccttaagggtggattcaacactcctgcgaataggatccatacggtcagaaggtaccctttacaggatgttgttgctcttgatagctcaaatatcattggaattgagggattcagcactggtgacatcaggtctgctatgcaacaacagcttggtatacccacacaatgacaccaactgcaatctattttgttattaatagaaagaaagaaacagataacagaaatatacgatacaaatacttagtttccattctattggaaatgtccgattttgcctgccagtcatttaatgtatgtgtgtggtggtccctgcacgggttatgaatgacgttcccttggatcccgcactggagattttttggattgaagagcttgttaatggatacatccagctgtacagacggaacaaatttgttcaaatgttgatagtgaaaacattttgtggaagtattttcagcaaacaagcttccaatatacaaagttcacactttccatcgcttcaatgtggagcatctgattacagtgcaatcgtctaagggcttgtttgtatttacctcaattcatatgtgttgagatagattatatgtgttgagatagattgagatgtaacttaaactaatttacacaccaattcatcccaatatatgtggattaaggtgaatacgagagtgtccatataaggcctattcggttaggggttgattgagggagtttggagagaattaaatacctttcgatacaaatttatataggagaggatgtaatcctctccaatccccttttagcgcttgtttagatgttttagtattgatcccaatacacatgtgtttaaggggatagagaactaatttatactctaatccttctcaaatcatgtgtattacggtgaatactagagtttcaaacatagctttaaccgaacaagtcctaaactctttttttttctttctaggaggagtgtcttatattgtgtaaataccgtgtcacacaatttagcaccatacatcatgtgcaggaattatttgaagctaccaaagc

SEQ ID NO: 3763 - DNA, 2316 bp, Zea Mays
cttattttatctcggccaacgtggacggcgcgtgattttctcttctctcgcagtcgcagcacggcagtcggcagcaggcaggcagccagccagcagccagcagctgcgaatcgaagcggaatcgaagcccaccaccagcagcagtgcccacttgcttggagcgcgagtttaccccgagcaaatcgcggcggcgctcgtgcccgtgcctcccgcgtcgaaccctagtgcaactaccagatccggagatcccgcgcgggcgcgggcgggacaccaagcttctgactcaactcaatccccgcacctgccaatgccaccccctcggcgctgatccgatcccgccgccgccgacactcgcgggcccgccccatggattccgcccggagctggctccagaagctgcagccgcgggacaaggacagagagcggggcgccaagacgccggcgccggcgtcgcccaacggtggcgccggcaactccgcgaggatggccgccgcggcgggggaggaggcgctgtctagcgccaccaagcagaaggtggcggcggcgaagcagtacatcgagaaccactacaagtcgcagatgaagtcgcttcaggagcgcaaggagaggtgagactttgtagagaaaaagctacatccaatgtgtatgcaatgaaaaagcttaagaagtccgaaatgttacgaagagggcaggttgaacatgtcagagctgaaagggacctccttgcagaggttgatagtccttacattgttaagctgtactgctcatttcaagatgatgagtttctgtacctcattatggagtaccttcctggtggtgacatgatgactttactcatgcgcaaggacacactgactgaggacgaatctaagttttatgttgcagagacaatactagcaattgaatctattcacaaacgcatttatattcatagggatatcaagcctgataatttgttgctagatcgaagtggccacttgaagctttcagattttggcttatgtaaacctctagatagcagttgcttcccaaatctgagtgaccttgactatgcagcaggtaagagcaccaatccatcatcagatggtgataagcaatccagtaactctactgcccccaggcggacacaacaggaacaactactacattggcagaagaatcggaggatgttggcttactctactgttggtacacctgattacattgcacccgaggtactcctgaagaaaggatatggaatggaatgtgactggtggtcacttggtgcaataatgttcgaaatgcttgtggggtatccgccattttattctgaagacccaatgtcaacatgtaggaagatagtgaattggagaagtcatctaaaattccctgaagaggccagcctttctctagaagctaaagatctcattagcaagctattgtgtaatgtggatcagagaattggaacaaaaggtgcacatgagataaaggcacatccatggtttgcaggtgttgagtgggaaaaactatatcagatggaagcagctttcattcctgaggttaatgatgagttggacacacaaaactttgaaaagtttgaggagactgctcctccaatgcaaacttcatcaaaggcaggtccttggagaaagctgagctaaagaaaacgaacaacaagccaaagcgaccaaccatcaaatcattatttgagactgctgatagtgaagaccagccttctgatggcagttttctgaacctattacccacacaactggagctgccagagagccttgagccctctcctcactccagtatctcttctgaggattcccaagcacggaataggtagcaggtgtgttttctggcacctgccagcttagtccaacaaaagcaagacatagaggcctttcacctagtgatggattgctatctgcaggtctctattcagaggacaagctccataaagtttgcttttgaagagatgtttgtggtgctcagcagccatctaatgtacattgtcctgtacattgttactggtttccaaagttcctttggcaacgacacgaggaggttggttgtcatatagaggaggaggtatttgttctctcctgtaaatccttggattctttgagtttctgagatttattctttcgatatagcatgccaagggggtatgctgcctgtttcctttttacgtgcagaaatctgcatttctacatcgttgttgtaagatttgagacagtgtaaagaaattgcaagtgataaacaagcgaccgaaaatgataatgaaaatgctatttttcttctatacagccttttttctttgcccttgtactt

SEQ ID NO: 3764 - DNA, 1187 bp, Zea Mays
tataatttatggatggaatgacaagccaagctcacttctggtgaaattgcagatctcaccttagttgcctcctccgtcttcgctccctccgcagcgtcagatcggccgtcgctcgccgagccctagcgccgccgatctcagcccgtaccagtcttgcagatcggggtcgcgccgcggcggcaagaacgatggccgaggaggccaagtacctggagacggcgcgggccgaccgctccgtgtggctcatgaagtgccccccggtcgtctcccgcgcctggcaggccgcctccgcctccgcctcttcctccgacgccgctaacgccaaccccgttgtcgccaaggtcgtcctttccctcgacctgctccgcccagaagaacgccccgaagagcgcccggaagagcccacgctccagggaaactttcatgcgaaggaaaagtcgagcataaatttgacatggaacctcacagtgataatttggcgaactatggaaagttatgtcgtgaaagaacacaaaaatatatggttaaatctagacaagtgcaggtacttgacaatgaccacggtatgagcatgagaccaatgcctggcttggttggtctcataccttctggttcaaaggaaaagaagaaacaagcaccagcgaaaccatccgatgtcaaaagaactcgtagggatcgtacggagatggaaaacattatattcaagctttttgaaaggcaacccaattgggcactaaaggcgctggtgcaagaaactgaccagccagagcaatttctgaaggagatattgaacgatctctgtgtgtataataaacgaggaccaaaccagggaactcatgagcttaagccagagtacaagaaatccacaggggacactgatgctgcttaaagatgatagacgacttggttgtttatgtgcagaatcgctagttctctgtcggtaactcgggcacacaaacacaagcgtgatctagttttatttgtatgctttaagaggtgttatttgtaagctggatacacatttgtttagagaggaaaaggggaaagataattgaaacaaaatgtaagagtctaaattgttggaccaatgttctttatcgggtattaaatttagtcagttggaagtggagtgaataggtgaaacctgaaaattataaaactttgaacacgaattttaccttgagtta

SEQ ID NO: 3765 - DNA, 6105 bp, Zea Mays
caaatcacgagctcctccctctaacctccggcctcttcctgcgtcaccaccgcgcaggcgcagccatccccatccttcctcaaattcccaaccccacccaagccagatctcaccccctccccgatcgctacacctccgatgttcccgcctctttcgcctatcccttcatagccgcgtcgccaccggcgccgctgcgaggcggccgctgcctttctccgctccctttgtatggaaacgcgcagccgcaagcgggcggaggcctcttcttcttccgcgacctcctcctcccgctcctccaagcgctcgcgacacaaccctaaccctaatcctcccgccggcccctcccccgcccccaaactcgtcccgttgccaccacgcacccgccgctcgaccgctgtcaatcccctccccccgatggattcctcgggcgacaacaactccaatcccgtcccgccgccgcggcgccgcggtcgcccctccaacacagataagggtaaggagcagcagcagccggagccgtctcacagctcccgagtgcgcgaggccgagcgcctgctgggtctaggtttcgagggcattgatgatgatgaagattcagggttcggggctggggccatcccccacagcctgacttccgcgagcaccgcgctccagggtcttcttaggaagcttggtgctggcctggacgatatactgccatcgtcggcactgtcagctgcagctgcagccgcgtcatcgtcatcagcatccgggcagctgagtgggaggttgaagaatattcttgcaggtttgcgtgctgatggggaggatggaaggcaggtcgaggcgttaacacaactctgtgagatgctgtccattggcacagaagagtctcttggggcattctcggtggactcatttgtacctgtcctggtcggtctgctcaatcatgagagcaacccagacatcatgttgctcgcagcacgagccctaactcacctctgtgatgtgctgccgtcttcttgttctgcagttgtgcattatggtgctgtgccttgcttttgtgcccggcttctcaccattgaatacatggacttggcggagcagtcattgcaagctcttaaaaaaatatccctggagcatccaactgcgtgcttgcgagctggtgcactaatggcagtcctatcataccttgactttttctccacaggtgttcagattttgtaatggaagcggttccacttcttactaatctactgaactaccatgattcaaaagtactggagcatgcttctgtctgccttacccgtattgcggaatctttttcaccatttccagaaaaattggatgagttgtgcagtcatggattggttgcacaagctgctagcttagtgtctgttagcaactcagcaggacaggcatccttgagtacatcaacatatacgggtgtgattcgtcttctctcaatatgcgcaagtggatcacctctggcagctaaaacacttctccttcttggaattagtggcatacttaaagatatcctttcaggctctgggttggttgctggcacgactgtgtcccctgctttaacaagaccagctgatcagatgaatgagattgtgaagcttgcagatgagttacttccttctctgcctgttgggaccatttctttaccagtgtattctggtgttcacatgaaaggttgttctgtaaagaaatccacttctagtaagcagggtgaacatggttcaacagcaaatgaactatcaggtcgggagaagttattgcgtgatcagcctgaacttctgcagcaatttggcatggacctgttacctaccatgacacaggtgtatggctctagtgtaagtggaccaatacggcacaggtgcttatctgtcattgggaaattaatgtactatagctcagctgagatgatccagtctctccttagcacaacaaacatttccagctttttggctggcattttagcttggaaagatccacaagtgttgatccctgctcttcagatagcagaagttttaatggaaaaacttccagagatttttttgaagatgtttgtgagggaaggcgttgttcatgctgttgagtcacttatatgcccagaattatctggtcaggtgactcctcatgtggattccattacatcttcacataataggcgcaaccgccgtagaaataatgctgtgaacactggaaataacttgcctgatggaccaaaaggttccaattctatgattgccaattcacccccaagcatggctgaagttccaaataatagtcttcgtgctttagttagtaatcatgcaaagtcatttaaggataaatatttcccttccgagcctggctcaagtgacattgcagttaccgatgaccttcttaaactgagggcactttgtgcaaaactgaatacaacagctgacactatcaaaacaaaagctaaaggaaaatcaaaggtagtgtctgacaatagttttgatgtcttgtgcaatattgaggagcaattggatgatataatagctgaaatgttgtctgagcttagcaagggtgatggtgtttcgacatttgagttcatcggaagtggagttgttacggctttgctaacctatctgtcatgtggaacatttgggagggaaaaggtgtctgaggcaaacataccaaatttgcgtcatcaggcagtcagacgatacaaaacatttatatcttttgcacttccaaatgataaagatgggaataaaactcctatggcattcctagtccataaactgcaaagtgccctatcttcgttggaacgtttcccagttgtgctcagccattctggaagggcatcgactttgggaggatcccgcctgacaacaggtttaggatctctgtcgcagcccatcaaattgcgtctttgtcgagcgcctggtgagaagtcacttaaggatttttcgtccaatgttgttcttattgactcattagctagtctggcagctgttgaagattttctttggcctagagtccagcgcactgaaccagtattgaagcctccaatgtcatctgcaaataattctggatctggagcagcaagctccacagcttgtgcgccttcaattccatcagaaactcaatctgtccgtcgcacatcgttaagatcaaagtcatcagctgccaccagtggtgcaattaagaaggattatcaggagggaagcataaacacctcaaagggaaaaggaaaagctgttcttaaattgagtttggatgaacctaaaggcccacatactaggaatgctgcgcgcagaaaagctacttcagagaaagatgttgaactgaagccatcacatggtcacatcacttcagaggatgaagatcttgatgcttctcctgttgagattgatgatgctttaattcttgatgatgatgacgaggatgtcccagatgatgaagatgatgatcatgaggcggttctccgaggttctcttccttcctgtgttcctgagagagtgcatgatgtgaaattaggagatgctgatgattctagtgttgcctcattggcaaatgataaccaggcacagccctcatctggttctagtacaaaaaatacttctagcaggggattggacactgctgaatttagaagtccagccacatttggttcacgaggtgcaatgtcgtttgctgcagctgcaatggctggattaactccagtaggtggtcgtggaattagaggtagccgagatcggaatggccttccattgggtgctcgtgcaactgagcattacaacaaattgatatttacagctgctgggaagcagctgaacaaacatttgactgtatatcaagctgttcaaagacaagtagttcatgccgaggatgatgaagatcgattcggtggatctgatttacctgatgatggtaaccacttctgggatgatataaggggtgatgtgttcactataacgtatcagaaggctgataacacagcggagaaggggtctgttggaggttcagcttcagtgccaaaatcttccaaatcagattcttgcagaactttgtctgaaaaacagtgtacttctcttcttgatagtattttgcaaggagagcttccctgtgatttagagaaatcaaaccaaacctacaatatcttatcactattacatgtgttggagggtttgaatcagttatcacctcgtctgagactgcagtcagcctgtgatgattttgctgaaggaaaagttgctacattaaatgggctatacgatgttggagctaaggtaccctcaaaggagtttatcaacagtaagatgaccccaaaacttgctcggcaaattcaggatgttcttgcactgtgtagtggcagtttaccatcttggtgttatcagctgacgaaagcttgtccttttctgtttcctttcgaaacacgaaggcaatacttctattccacagcttttgggttgtctcgtgcacttcatcgtcttcagcaacaaccgggcaatgataataacactgcttttgaaagagaagtcaggattggtagattgcaacgccagaaagtccgtgtttctcgtaaccgtatcttggattctgcagctaaagttatggagatgttctctaatcaaaaggctgtcctagaagttgaatactttggtgaagttggaactggtcttggtccaactttggagttttatactctcttaagccgtgagctgcaaagggttgacttaggattgtggagatctcattcttcagataattctgggatgcaaattgatgcgaatgctgatgatttaataagaagtaaaaatcatgaatcagaatcacttactgagagcaggaacatagtacaatcacctcttggattatttcctcagccttggccacctactgctgctgcatcagaaggtagcaaattcttcaaagttgtcgagtatttccgcttagttggtcgagtgatggcaaaagcattgcaagatggaaggcttctcgatttgcctttgtcgacagcattttacaaacttttgcttggacaagaacttgatttatatgatatattatcttttgataccgagttcggaaagacattgcaagaattgcaaattctcgttgcacgtaaacaatttttggactcctgctctagtgagagccaaaagatagatctatgtttccgtggtgctcccgttgaagatttatatttggacttcactcttccgggctatcctgaatatgttctcaaggaaggtggagagaatgcagaggtcaacatttgtaacttagaagagtatatttctttggttgtggatgctactgttaagaccggcataatgcggcaagtagaggcatttaaggcaggattcaatcaggtgtttgacatatcatcactgcaaatattttctcctcaagaacttgattatctgatttgtggtcgctgtgaactttgggagccggaaacactgcctgaacatataaaattcgaccatggttatacctctaagagtcctgcaattattaattttcttgagatcatggcagaatttactcctgagcagcaacatgctttctgccagtttgtgaccggtgctcctcggcttccacctgggggtttggctgctctaaatcctaagttgaccattgttaggaagcactcttctgtggcaaataataattcaaatgcaactggagcgacagagtctgcagatgatgatttgcctagtgtcatgacttgcgccaactatcttaaactaccaccatactccaccaaggctatcatgctaaagaaactgctttatgcgatcaacgaaggccaagggtcatttgatctttcgtgaatctcaacactaacataggtattggtccacctagaaatctgcgtcattgttacccagagttagtttctacctcattcatgtatgacataggttaaactcagctctccggagtcccaccgaaggtttggagcccgtacctttgggtgtggatgtctatactctcttttcttcttggttgtatattcttgcggatctttatagtgaataatagtaataaattgttttgcgcttcttactatgctaatcatcagtgccccacccgaagcgtcagtcgtacaaattttgctcgatggtttcgctg

SEQ ID NO: 3766 - DNA, 1900 bp, Zea Mays
agtgtgtcttaagtggtccagcaacgtttgccgcatgcagccgcttcaagtccgacgattttctcctttctctctctctctatttttcactctagaccgaaatcggagcgcccgataccataccaatagcagcagagcagtagcagcacagctccctcccccgtcctctccaaatctcgccggattccgtccaccgccaagccctcgcatctgccgcaggttcgcgtctgtgcccgagcgtgttgcactgccggtggtgttggtggtggttggcggagttgccgccgagggtcggtcatggactacgggccctctgacagcagcggaactgatgatgatcttccacaacttccacataggagtatcagaggcagcggacgtgttagtggagaaggaaggtctcatgactgaacttaggaaggaactaagagtatctgacaaagcacacagggagctgttaaataaagtcaacaacgataatattatatgtagcataagggaatggagatcaacaggagggcttcaagcaagcatgtccaataacccacaaccgattcatgaccctgttccaagtcctaccacctctggccgtaagaggcaaaagacatctcaatctgttcctgctttacctgcacctcctgcaatgcattcacaacagctggctacaccaacacagccatcgtcttcaactgctaggaaagcagtacccccagtccctaaaggcaaaaagacgaaaccaggtcagaaggtaccaggtggctctgcagccaagcctatgccatcttcagcaggtcctagtggaagaggaccacacatgaataggaattttccaggtggttctgctcctgaagctcaagctcagaatgtcgatccattggttggtcgtaaagtgatgagccggtggcctgaagataatagtttttatgaagcagtcatatctgattataatgctgaaacgggcctttatgtgctggtttatgacattaatacggcaaatgaaacctgggagtgggttgatcttaaagagatgggacctgaagacataagatggaaagaggatgactctgggatagaccctgtggtgtatctgcgcagccgaggtgccccaagtagtggggtcaggaagccaacaggtcgcggtgggcccatgccaggttctggaagaggaagaggattaccgaagaacatgtctaggaaagattttccacctccacaaaatggtgttggcaagagaagttccgatgacattgatatccttcatactgagagcctaataaaagaggttgaatgtttattattacaatgaactgcagatcttgtgcacttcatttcacttctcttctgctatatctgctcatgtaggtggagaaagtttttagcgttagcaatcctgatccacaggaagtagaaaaggcaaagaaagcactgaaggagcaagaacagtcattgattgacgccatagcaaggcttgctgaggcatcagatggtgaaagtgatgggctcaatcgtgggcgaaggaacttgtatgctggtaaccagcatcaagcaaactatgttgatgacatgcccgttggtgaccaagctgatgccatgtaaacactgcatgaacatgtatacacaacataatataactgtctgttgtacaatccattgcaaatatttgttctggatttaggtctctgtaagctaagtatcgttcgtttcgggaaactaatttttttagaacagtaattcagaatgctgacaagtaaagcttgtagatgtttgtttctttctctagtttttttgttagtgtggtctcatgttctatatgcatgataaaaggaaaaaaatcacctttgtaaagcactaagtttgtcttcgaccatttttgacgcagcaatcattcctcatgaccatg

SEQ ID NO: 3767 - DNA, 3409 bp, Zea Mays
gagcacaccatcctcgcattattcttttcggatttgctccacccctccactcccatgcccgtgtccatctcaggctgcgtcacatcatcgccgccacacccagcaccagcaccagcggcggcgcaccaccaccggcgccatcaccagcgccagcgctagcgccggcgcaggcggaggcccgggcgacgcggactgggcgaagttactggccttcttttcgtcagcggcgtcccttgccatcaagctaaggtgaaatgaaacaggtcttccagcaaggttacgtggagtttaccaatgggtctggataatacttatggcgacctatctggcatgttctatggaggcctgtcttatgatggctacacagaccacagcagcgcaagtgattacttcagatttgccgatccacttcctgccactgtgccccagatggcaccagaagcctgttcaaatccttcctccactgtgtcaagggccaatactgaaactgacaacccagaggattgggaattcatctcagatgagtccctcgactatatcagccggatgctcatggaggaggatattgatgagaaagttagcatgtaccaggcggagtcagcagcactgcgtgctgctgcaaagccgttctatgacattcttgggcacaagttcccaccgtctcctgaccgccagctgatctcttggtccatggacagccccagtgagagtagcagtagcatctgcacacaatctgtggcaagtactgtcacgagcagcagtgttggtggcacagtggatagcaaccggcgctatgacattggacttagtgagcagctggaagcttaccgaggcttgtgtggtcaagcttctcatccacttgttggtacatcaagtgatgcttccaatgcagtggatgtgctagaagaccctttgatcacgaacggtcagatccctgagtatttgtttgagagccttccaacttgggatttcaggagaggtattgaggaagcccagaagtttcttcctgttaacaataaactagtcattggtttagaagctggtggtattgcaagaccccaagaggcaaggaaagatgtttctttgaatgccaaaaaggcagatgcattgaaggtcaagaaaaatagacagagtgaagaccttgacgtgattgaaggccggaacattaaacagtctgcattttgttccgatgaacctgattggattgaaatgttcgatgatctgcttcttcaaaccgagaagaaggccacagatctgcgagagctgatgcggaatgaagcttccaagaattctcaggtcacccagacgaaaggaccaagtggaccacggccacggggaaggaaaccaacaaagaaggatgtggtggaccttaggaccatcctcatccactgtgcacaggctgtggcagcagatgaccgcaggactgctaatgaattgttaaagcaaataaggcaccattccaagccaaatggtgatggaacccagaggttagcacattgctttgcagatggtcttgaggctcgattggcaggcacagggagtcagctttaccgcaagcttatagcaaaacgaacaactgcctcagacatgcttaaagcttaccacctttaccttgcggcatgcccatttaagaggctttcacattttctttccaatcaaacaatcttgagtatgactaaacatgcatcaaaggtgcatatcattgacttcggcatttatttcggcttccaatggccatgcctaatcaggcgtctctccaagagggaaggtggtccacctgttctgcgcattactggaattgatgtacctcagccaggtttccgacctactgagagaattgaagagactggacaaaggcttgcagaatatgctgagaagttgaaggtgccttttgagtatcagggaatagcatctaagtgggaaaccatccgagttgaggatctcaaagttggcaaggacgaagttgtgattgttaattgcctatacagattcagaaacctgattgatgaaacagttgctgtagacagtcctaggaatagagtgctcaacaccataaggcaagtaaacccagcaattttcattcatggaattgtgaatgggtcatacagtgttcccttcttcatcacacgtttccgtgaggcgctgttccatttctctgcattgtttgacatgctagagacaactgtcccacgggatgatgcacagcgtgcactcatagagagggaaatgtttggccgagaggcactcaatgttattgcatgtgagggctcagacagagttgagagacccgagacatataaacagtggcaggtgaggaacctcagggctggatttgttcagtccccgttaaaccaagaaatcgtgatgaaagccaaggacaaagtaaaagacatttatcacaaggactttgtcatagatgaagacagcggatggctcctgcaaggctggaaaggaaggataatctatgcaatatctacctggaagcctaagaataactaggttcttggtctcacatgttacgtttcctattccattgacggtggcagctaattaaccagtcctgctatgttatagcatgtggaccttgacttgtgaacctgtctgatcaaggaaatggcttgaagacggataatgatcaacatggagctttgctagcttcacatctgtccagccagtactctgatagactggatgtaggcctctctaccttggtgttggtacaatcacttctattaaatttcgtagttttcttctttccatttacttctatgatcggccaggcgtcctattagcaataaccagatcactgcttctagttaattggttagccaaactacctactatcttgagcttagtatttttgacttgtatccatccatgttgaacattatttggttttcagcaccagcagataaaaaattccccaacgaggaagcatgaagcatctaaatttgttatacgagaatgggcgctgctgtttgtgtggaatgtagtatctcatggagtgctttgcctttgaattctccattttttatttcatctctttgtagcaagtgatgcgtgctgtcacaaaatgactctttaaacttgagtggagcactagtttgagaatatcgctagaaagtggcgctacagatttttggagacgactagcgaatggtgccaccacaaggcggcatgatattagtgcaatgcgaccactatcagcgtatcttcatttgataacgcattgttttagctgatcctttcagtccattctcttttatcgtacggttttcagatctgccatgtctaacatttatctaggaatatctggagttttattctcataaaacttcatctcctatgaaactctcactcttcattaaattacatgttatatcatccagtttgctctcccattttctat

SEQ ID NO: 3768 - DNA, 2165 bp, Zea Mays
ctttgcttcaggatggtgccgttgacacagttacaaaagaagctttacatgtcagtgttgcggaaagagctgccaacacttatttcatttgctagaggatcatctcgccaccagtctttgcaaaacattgttatacaactgaggaaagtttgcagtcacccatatctgttcagtggcattgaacctgagccttatgtggaaggggaacatttaattcaggctagtggaaagctcattgtcctagatcttatcctgaagaagctccatgaatgcggacatcgtgttttgctatttgctcagatgacccagacactggacattcttcaggattttctagagctacgcaattacacttatgagcgcctggatggttcagtacgtgctgaggaacggtttgcagcaataagaaatttcagttctcaatctacaaaaggtcttatcagagatgataatcgaagtgaagcatttgttttcatgatatcaactagagcaggtggtgtggggcttaatctcattggtgccgatactgttatattttatgaacaagattggaatcctcaagctgacaaacaggctctacagcgcgctcaccgcattggacagctgaatcatgtcttgtcaataaatttggtgtcacagcgcacaattgaagaggtcataatgcgaagagccgacagaaaacttaagcttagccataatattattggagaagaagacgggactgatgggaagggaggagatccaggaattgaagctagtgacatgagatcaattatctttggcttgcacctgtttgatccagcagatacagctacagaaacaatcgatgaggatataactgctgagacattcagtgtcgagaaactggcaaagttaaaaacaatgtctgaaaaggttgtcatgatgcgtagccatgagtcttctgaaaaggatgaacgagcatttgagatcaatccaaatatgactgatgacagtggaactgtgattagaagggcttctgattctatccgcattgatcctgggctaaatgaagctgcatacctatcctgggtcaagaagttcaaagaggcttccatttctagtgaagatgccacagttggatttggaaggcaaagagcagcgcctgaagaaaagctcctgaaacatgatgttaacaagcaaaaaatagaagaaaagagattggccaaatgggaaagtttgggttaccagacactagcagttaaggaacctgatatcacagcaagccagaatatttcagacgcgggatccatccaatttgtatatggagattgtactaatccttcaaaagtttgtcccgcaaagcctgccatcatattcagctgcatagataattctgggacttgggggcatggagggatgtttgatgctttgactagtctgtcgacatgcattccagatgcttatcaccgtgcttctgaatttgatgatctccacatgggcgatcttcacttgattcagcttgatgaaggcaactgtacccggagtttggatgcacctttatgggttgcactagctatcgttcagtcttacaatccgaggcgtaaagttccgagaagtgaaatctccatgtctgatttggagctctgtatatcaaaagcagccttctcagctgctcagcattctgcggctatccacatgccccgaattggttaccaaggtggctcccaacgatcagaatggtatacaatagaacgcctgctcaggaaacactcatctctccatggaatcgacatttttgtatactactttcagcgacgacagacagattgccagattgtaacccaggtaggtcatgctgacgattcgacccaagcgtagggatgtctctgtaaaaacccactacatcagaagaatctgggattatgtgtagctagctgcaacaatttgtcttttctttttcttttactgccccttctctctgggaccaaaacgcctatgaatagatgagggagccaaatgaattaggttttagtacatttagctaagaggtgtatgtatgtacaagtgttgtttgcatctgcagtctcttttgatgaaaatctatgtggcatttatattgcttgatttttgttttttgatttggtctattttagacctctttttcttcttcttaacatatatgatgcgtagcgaaaaaatcttac

SEQ ID NO: 3769 - DNA, 3351 bp, Zea Mays
ccaaaaccctactactctgtcgagccagcgccgtctccctcccccactccattcccactcggacttggaccccaaaaccctagcggctagcgcctcctcgccgtcaccgccatgatcaccggcggccagagctacgtctcggcgccgccggccttctcggccgacgggcgcctcctcctcgtctgctccggtcgcgccgtctccgtcttcagcaccgccaccgccatgctagtgtcggagctggaggggcacgagggggacgtcaccgccgtggtggtggtggcgccgccagcgcaggcgaccgcggcggccaagcttgcgagctactgctggacggcggggctcgacggggtgctcatctactgggacttcttggccgcggaggtgatgcggaaggtccaggttgggctccccgtccactccatggtggttcctgacatatataggacctcaaaaggagttgaggtgtcgagcccctttgcattcatctctgtggaggatacgagtaagctggcaagtgaaccaaaagcgctgtgtgggcagatgagagtttatgacctgacaaaggggcgccaagtgggtggcctcctggccgagacacgtaaaccagaaaagatcgttgcaagtagttctggagaattcttgggcattacaaataaaagaaagctccatatatggcgcataccaacaaaagatttcaagcctgacaagataaggaagataaagctccggcacaccaaacacttgaccactctggcattccatccaactgagagaactgtggctggtggtgatgtaacagggcggatcctgatttggagatgttttggaaactcaaagttctctgaaagtagtgtacagtcgaaagaggatgacggaagggatggtgttaggggggatgatgatgcagacacttgcacaacatggcattggcactcaagcagtgtggtttggagggagttattgttgtgtggcaactagatactggaaagagaaggtataaaccacgtctggggtctcctcttttgttctttgtagattctccagattcttccatttcctgcgtgtcatgtacaaataaccaagtctatcttctaaaaatgcctaatatggaggtcatgagatctattgctggaatcaagctgccaattgcttcaccaaacttgggcggatctaatcgggctgtgtatggatttgattatactaatagacttgttgctataccaactgaagattactgcatacagttctacaatttgtttgagaacgctgaggtttcagaggtgcaagtgtgtgagaggaatttccagcctattgatgatatcactatgtacatttccatggtttcattgtcaatcgatggcgatttgatgtgcaccgtggatgtcaaacttcctgaagaaggtttaggtggtcttgttacattgaagttttggaatcatgggtcaagagctggacattattttttgtccaccgtcatttatgagcctcacagtgatgatggggtttcttctgttgcattccgcccaggaagaaatatggccgttagctcttcttttggtggtaactttaaggtttgggtccagagtttgtcttcacaatcaaatgatgaaagaaattgttctggttggagatgccaatcagttggctcatacaagaagaaacctatgacatcagcagccttctcagccgatggatctgttcttgcagttgcagctgagagtaccatcacattgtgggatcctgataataatgcgcttgttggtgtcattgcagaaacactatcgccagtgacaaatctttctttcgttgggacatcagtgtttttgatgtctctatgtcagagttcaagaccacagattgctctatggaatgtttcaaatctttccatgcagtggtcttacagcatttatgcagaagctgcatgctgttcgccagatgggagtgaatttgcagttcttgctcttcttagttgtcctgatggagaagcatcaacacaacaagatggagtaattcttctttttgatgcagaaagctcaaaccccattgcctcctggtcggtaaagaaggcatcgggtggcagcatttcttttgtaaaaggtgacgtccctttggatgcaaatgctgatagttcgagagacaaagagccaatgttgcttgtttatgtaaatggttctcatgaatacgccatctttgatccccgggagagtgaggaggtggtcattagcaagaacaagcacaagaagattcaagctgaggaacctgcaccaatcggctacgcttctatttacggagagcttacaaaactggagccaaagaaagaagtttcagatgttccattcgtcccttcggacaggccttgggaaaccatattcagcgggtcgtctcatgttctcccgcctctcacaaaactatgctctgcattcttgtcatcgctgctggagaaacggcctgttgcaaacgagtgagccgccctagaacattgtcctctcatacaacggtaggtatactcgccagttgcagaatggaaatgcggaaggaaatccgtccgtgacgatgcatatgcccacttgaagagttcagagatgctgggtgatgccatctgaggttggttatggttatacagatatcacacggcccacgaggatcattttgcagcgatactcgacggccaacctactgatcgcagcaattttgttttcttctccgcttgacatgtaatcctgacagtaaaactagaaaatcttagtgtgctttatctgatgcgatgacgcggtgctcgttgaggtgctgcgactgtttggctattgagctgtctacggcacaaccgcatttcttttgtactattttgtttttttttcaaagaaagctcacgcttggatatctgaagttgataagctttgttactgggatccctgaatattgtatgttaggctgactcgagcagttcaccagaatgtagtttgaatatggatattagtatgggtaagctgctggagatagtcttagatacaaactaagcagtccagcaataagttcttcgtgagttgcactctgttgggcctagagatggcaatgggtacccgctacccgaaacccggtgggtttttgctctattagggtatgggtttgggtcaatttatgtacccacgggtttgttaatgggttcaaatggaaacccaacgggtacgtgggcataggtttgttcttccactacccatactcgcaaacccatgggtttttaaaatccgccttaaaatcaacatttcttataaatatgtatcataatattattaattgaatatgttctaattgaaataaacttcatgtaacaaattttaagctaaaatt

SEQ ID NO: 3770 - DNA, 911 bp, Zea Mays
gaggttgaattgtgtgttatggttcttgctacagtagaggtgcttcatgcttttgcaaccgaaggtgcacactgtgctagagttcgtgaagtcctgaattcctctgatgtatggagtgcttacaaagaccagaagcacgaccttttccttccatccagtgcacaatcttctgctgctggagttgctgggctcattgagagctcgtcaagattcacttacgccctcgccgcaccgccatcttcttctctctctccaccatcagctccagcaaaccctagtggacggcaatattatcagcattcgtagtggaaaacgaaacacttaatctctgctccttggagtatgaccatgaaggcaccaccatggtaacgatttgtagagtgaggccaccttgagtgggcttgttactgtcaccaaatacagctcgtgtctccattcccaccaatgagcagctgatcagttgcccgcatttcagtacatagcatagcatagcataccattgtacagttttccattacataagggtcggggtcggttttgtgtgtgtgttttttttttgtaaagcatatgattttttttgggtaccatagatgtccatagaatacgcgagctgaatattgtatccattcattactgggttgatgcactcccttgttcggatcacacgacttacttgtgacgagagaaataaatgttttttttgcctttgtttgatgagcattttctggtgtcagttaaccttttacagtcatattgtcgtgtatgaccaccgagtgtgtgtaggttttatatagcctgtccgtcactacttttggttagagtttgctatttcatttgtaatgaagttgtttgctgacacctttgcgtgtaacaaaagaaaagcacacaaaaaataacatgctccctcagcc

SEQ ID NO: 3771 - DNA, 1167 bp, Zea Mays
gattacctcctaccgtccgacccggctccctcggtccctccctcggtccctcccggtctcgcagttcctccccgtcgtcttccaccgcaaatcgccgaagcaagcaggcgagctcgggaccagatccactgcgggcagctggagcggaagggccatggggacgccgccgcctttccaggagtccggccactgcgacgtctgccgctgcaccttcaacaccttccgccgccgtcatcactgccgcagctgcggacggacgctctgtcacgagcattcttcgtactacatggctctcccgcagtatgggatatatacagacgtcagagtctgctacggttgcttcaacaaatcctccagccaaggacacgctgataatccggtgtcagctggtagcatttctggagcagctgactctttttcagggctgagtttgggtaaggaggatgattcgtcgcctatgaagaattcaacggttcagagcacggcagcccttattgagtgcaaatgtgggatgcctttgtgtatatgtgaagcaccaaaaccagaaccttctcctacacctgtaaagaatatcaacaccgttcccccaaccacacagtcaaatccaaggccaaagaagcctgctaacactcaacagaaggcttcagctacttccagtagcaactcaagcccattcttaaatattggattaatgaacaacgatagcaatgataagggcattgttgactatgaagttagtggggagggactgagagaagcaattaaaggcggggatgttaagggtgtaaagaaacttcttacacagggagtggattctaactactgcgacaaacaaggatttactttgctgcatttggctgctttgtttaaccaaactgaaattgctcttattctcatggaccatggggcaaatgttgaaagcaaaaatgggcaagatcccactcatgtggaagcctccgacgatgggtctgctcttaagctctcgaaaaaaatgttcaatgtagagccaaagaggagagagtatgacaaagggaaaagtggcttgagttccatgctcaatttggttctgttgagagttatcatcgtcatatatttagttactcacccgattttgaaattgaagtagggatagttatttcagtgcctggaattgctaacatcatcaat

SEQ ID NO: 3772 - DNA, 3155 bp, Zea Mays
cgcgcctccagcccttcactcaccctccagctgcctcccctcctctcctacccgccagcatccgccagcccctcctctccaactgccagccgccaccagcagtatgaacttatcacctatatttatttgctatgaagtatgaacttgtactcttaatctctaaattgctactgattactaactactgaccattgcctaattggcgcctaggtgcctgactaggcgtccaggtgcccagctggcgcctggcctcaccgtgggcgctgtgataaccttgattccatatttccattgaatacttctatatgttgatgtgtccttgtttggctacatttgttaaagaaaaatttcctgcataaggagtgtactttttgcatgggatagtgatctagccacttaagttatcttatattggttcctgcttttcaagggtggaagttgcgatagattttgttctttttattaaaacctgttttcttaaaatgtatatcatgtgagcatgtacatttatcatttaataatgtgaattagctgttggatgttgaatgttttccttcatgtcatctgttttgttaatcttaccttttaagatgacaggagggataaaacatataccttaaactgtttatttcgccttcttgaagtcattctccctatttttgtaaatattggagattttgattgaaatcaacatgggatatctttctgaagaatatacatgcatgcagaatgctgttgaacagatgtatcgtttatttgttttcttgtactgctgcaggatttcgatatttctcaaggatctgtactttgtgatgttgacgaagcaactgtgcgaagtcttaatggttgcagagtggcggatcagattcttcggcttgttccaaatgttgagaatttccggacaacactcagatgcttgaagtactgggcaaagagaaggggtgtttattctaacattactggtttccttgggggtgtgaactgggctctgctggttgctcgtgtatgccaactctatcctaatgctgtgccaagtatgctggtttctaggttcttcagagtttttactcagtggcaatggccaaatccagtgatgctatgtgcgattgagaataatgatcttggtttttctatatgggatccacgcaaaaatccacgtgacagaaaccatctcatgcccatcatcactccagcctacccatgcatgaactctagttacaatgtttcaaccagcacactgagggttataatggagcaatttcaatttggcaacaaagtttgtcaggtacttcctgaaaatttacagctgatagctaatgttcttggtatggtctcactgcgtatcttttatgcaggaaattgaacttaataaggccaattggaatgccttatttgagcctttccatttttttgaggcatacagaaagtttctagtggttgacatagttgcagaggatgacgatgatcttcgtctttggaagggatggatcgagtctcgtttgagacaacttactttaaagattgagcgggatactaaaggaattttgcagtgccatccgtacccatgcgagtattcagatcccacaatagagtgtgcacattgtgccttctacatgggcttatcaaggaaagaggggttgaaaaaacgtggtcaacagtttgatatccgtgggacagtagatgaatttatgcgtgaaattggcatgtattcattgtggaagcctgggatggatctggctgtcacccatgttcatagggagcaggtcccatcttatgtatttgagcaaggatacaagaaaccctgccctacaatgcatgcaaaccaacaagagcagtctgatggagatggaacatttagcccatatctggagagtcagcttaagagaaagtacatttccgatggagatggtcatgtggatctttgcaaatctgtaaaaagggcttcagtaagcccacctggtgtgggaaccccacctcatcttggaaatagtgtcagtaacgttgtttgtgacagtccagtcaaattcgtttcaagtgtcgtttgcagcggagcgcatgcttcctcatcacatgatgatataaatatagaacaagcacaattaactacttcaccatatggatctgaggatacctcagcatcaggtacaagctgtgcagcagtgggagcagttattttggctgatgaatccagcaagctcggtaacttgacatcagatcttgaagttgatacaattcagacaatgccactgcacacatctttagaatgcgtcgctcaaaagggtgaaacaaagcttgaggaaatcagaaggttggcgagcaacaattgtgctgagtttctagagagctaagttcttgctgacaaggtacacttagacttaggtgggcatgaagtgaattgaaacatcattccagacaaggtttttcttcctatacttcttgtcaaattaagattgtagtttgatatgatctgaactctatgcctgcctttctattcttttcattgattaactgtttggatccattaaaagtcaatgaaacatgtggttcgaagcggtttcgaaaggtgatgcaggggtgaagtttgcatagcatcgataggccggaaatcggatttgaggacccaatgatatgccgctgcatggaaagtttcatcatttcatgcctgtggtcggtttgctcgtgaagattgcttttgttcgctgtggaagcgggtgcaagtattacacagcagcaatatcgggactgttgtgaaggatgaagttgagagtcaacatctgagaaccatggagctcaccatacgccacaaaggaactaagctgctggtttaggcatggttaagagagtcagtgctggtcctttaggttaaataaaaactttgcggggctgcacggtgtgcagaaaaggttgagtctagggcactaggctgatggtctatgtatgtgatgtacgcagataggcagatacctatgcgttcaaagtagcgcatcaaattttggccccattattttcactgcagtatcatgatgtgatgttgatagtagagatagagcaagtatgatactccctccgtccaaaagtttgtcgttcttgctttttaaggagtcaaacatcttgaactttgaccatatttatataaaaatattattatttatagt

SEQ ID NO: 3773 - DNA, 3722 bp, Zea Mays
aattttcgcgcacagcagccgggcgccggcggatcttcccagtttcacaccacacgctccacggctggggatcacgctgtcacgctcacgcgcccctccccccgccgccaacgcccacgctgcgagcgcgaatccatcttctctacctcctcgtccattcctagggttcctcctctgccgaatcgcggggaactctgcgggcccaatttggtagggtaatctcctaccaggaggtcaaattccagtcaacgccgcttggttttgtagccgaccggtcgatttgaatccaggggcaccgattggctgggtgagagggcaggctcgatttgaacccgcctctgcccttttcgtggaagttttgggtcttattaggcgcggattactggggtctagggatgtggtagttactagctgcttgggttaggcggcgcgccgaggtgcttccgtgcttggctgactagtgtcaatggcgggatctgtcggcaaggccagggcggcgctgcggtcgtccccgaagcggtacagcggcacggacccaccgttgtctctggcggggccgacgttggcggatctgcagaggacggccgagctggagaagttcttggttgaagcgggcctctatgagggtaaagaggagtccgcgaagcgggaagatgtgctatccgagattggtctgatagtcaaggaatgggtgaagcagttgactcgtaagaaaggatatgctgagcaattggttgaacaagcaaatgcaatcctttttacttttgggtcttacagattgggggttcatggacctggagctgatattgataccctttgtgttggaccttcatatgtgaaccgagaggaggatttctttgtcacactgcatggcatattagctgagaaggaagaagttgctgagttgcaacctgtacctgatgctcatgtacctgtattgaaatttaagttccgtgggatatcaattgaccttctctatgctagcatctctctttcagtgataccagcggtaagtcattccattcatgcttatcatggtgccgcctagtcgccgccaaggtgtccagtcagccgagactggatgccatggctgttcgcctcgcccagaggaagttaggcaggtgcctgggtgggtccggattcaccgtgctgcctaggcgtccgctcagggacgccgtgacttcgccgcgccgccccagcccatttggcccacctcttatctctaattctccttcccctcaaacagcgcctccagcccttcactcaccctccagctgcctcccctcctctcctacccgccagcatccgccagcccctcctctccaactgccagccgccaccagcagatttcgatatttctcaaggatctgtactttgtgatgttgacgaagcaactgtgcgaagtcttaatggttgcagagtggcggatcagattcttcggcttgttccaaatgttgagaatttccggacaacactcagatgcttgaagtactgggcaaagagaaggggtgtttattctaacattactggtttccttgggggtgtgaactgggctctgctggttgctcgtgtatgccaactctatcctaatgctgtgccaagtatgctggtttctaggttcttcagagtttttactcagtggcaatggccaaatccagtgatgctatgtgcgattgagaataatgatcttggtttttctatatgggatccacgcaaaaatccacgtgacagaaaccatctcatgcccatcatcactccagcctacccatgcatgaactctagttacaatgtttcaaccagcacactgagggttataatggagcaatttcaatttggcaacaaagtttgtcaggtacttcctgaaaatttacagctgatagctaatgttcttggtatggtctcactgcgtatcttttatgcaggaaattgaacttaataaggccaattggaatgccttatttgagcctttccatttttttgaggcatacagaaagtttctagtggttgacatagttgcagaggatgacgatgatcttcgtctttggaagggatggatcgagtctcgtttgagacaacttactttaaagattgagcgggatactaaaggaattttgcagtgccatccgtacccatgcgagtattcagatcccacaatagagtgtgcacattgtgccttctacatgggcttatcaaggaaagaggggttgaaaaaacgtggtcaacagtttgatatccgtgggacagtagatgaatttatgcgtgaaattggcatgtattcattgtggaagcctgggatggatctggctgtcacccatgttcatagggagcaggtcccatcttatgtatttgagcaaggatacaagaaaccctgccctacaatgcatgcaaaccaacaagagcagtctgatggagatggaacatttagcccatatctggagagtcagcttaagagaaagtacatttccgatggagatggtcatgtggatctttgcaaatctgtaaaaagggcttcagtaagcccacctggtgtgggaaccccacctcatcttggaaatagtgtcagtaacgttgtttgtgacagtccagtcaaattcgtttcaagtgtcgtttgcagcggagcgcatgcttcctcatcacatgatgatataaatatagaacaagcacaattaactacttcaccatatggatctgaggatacctcagcatcaggtacaagctgtgcagcagtgggagcagttattttggctgatgaatccagcaagctcggtaacttgacatcagatcttgaagttgatacaattcagacaatgccactgcacacatctttagaatgcgtcgctcaaaagggtgaaacaaagcttgaggaaatcagaaggttggcgagcaacaattgtgctgagtttctagagagctaagttcttgctgacaaggtacacttagacttaggtgggcatgaagtgaattgaaacatcattccagacaaggtttttcttcctatacttcttgtcaaattaagattgtagtttgatatgatctgaactctatgcctgcctttctattcttttcattgattaactgtttggatccattaaaagtcaatgaaacatgtggttcgaagcggtttcgaaaggtgatgcaggggtgaagtttgcatagcatcgataggccggaaatcggatttgaggacccaatgatatgccgctgcatggaaagtttcatcatttcatgcctgtggtcggtttgctcgtgaagattgcttttgttcgctgtggaagcgggtgcaagtattacacagcagcaatatcgggactgttgtgaaggatgaagttgagagtcaacatctgagaaccatggagctcaccatacgccacaaaggaactaagctgctggtttaggcatggttaagagagtcagtgctggtcctttaggttaaataaaaactttgcggggctgcacggtgtgcagaaaaggttgagtctagggcactaggctgatggtctatgtatgtgatgtacgcagataggcagatacctatgcgttcaaagtagcgcatcaaattttggccccattattttcactgcagtatcatgatgtgatgttgatagtagagatagagcaagtatgatactccctccgtccaaaagtttgtcgttcttgctttttaaggagtcaaacatcttgaactttgaccatatttatataaaaatattattatttatagt

SEQ ID NO: 3774 - DNA, 4666 bp, Zea Mays
atgacctatctacctcttctagaaaaccctccaagcgcggccaaaaacattcaaagtgaaatcgcctcctcccttgggagaactcatgcaaacccagcagaagggggcaatggtctgaaatcgtggaccaacaatgatgatctgcggaaagatgctgcagaagcgctctgctgcctcgcacatgcccttggagaagactttactatcttcataccatcaatacgcaaaattcttgtgaagcaccacttgcggtacagaaaatgggatgagattgaaaatcggctactgaggcgagagctactcatcactgaaaacttgtctgtgcaaaagtacacacaatgtccacctgatgtcattagagacccccttgatgattgtgatggtacaccttctgagatagctgatgatacacagcgacaagcaagaagtcatcaagtcaatgatgtccggttgcggagtgccggtgaggcttctcaaaggagtactagggaagactgggctgaatggatgagacatttcagtattgcgcttctcaaagagtcaccatctccagctttacgcacctgtgcaaggctagctcagcttcagccttctgttggccgcgagttgtttgctgcaggttttgcaagttgctgggcccaaatgagtgaatcctcccaggaacagctagtgagaagtctcaagacagccttctcatctcagacattcctcctgaaattcttgccacgctgctgaacttagcagaatttatggaacatgatgagaagccacttcctattgatacaagactgcttggtgcacttgctgagaagtgtcgagcatttgcaaaggcactccattataaagaaatggaatttgaagctgtgtgcaccaagaagatgggtgcaaatcctgttacagtggttgaatcccttattcatattaacaatcaactacagcagcatgaggcagctattggcatattgacttactcacagcaaaattcggaagttcaattgaaagaatcatggtatgaaaagttgcaccgttgggatgaggctcttaaagcatacaccgtgaaatcatctcaaacatctggtccctttacaaaacttggatgctacattaggtcgaatgaggtgtctagcagctttggctcggctgcaaatgctgcttggcatatgggtgagtgggaccatatggcagactatgtttctcgcctggatgatgcagatgaaaataagctccgtatgttgggtaacgcaacagctagtggtgacggaagcagtaatggtgctttcttccgggcagttcttttagttcgttacaaaaagtatgatgacgctcggatgtatgttgagcgagctcggcggtgtttagctacagaacttgcagcactggtacttgagagttatgagcgagcgtataataacatggtgcgtgttcaacaactttcagaactggaagaggtgattgattactgcactcttcccatggaaagcccgattgctgacggacggagggaacttattcgcaatatgtggaatgaacggattaaaggaacaaaacggaatgtcgaggtgtggcaagccctacttgctgtcagggagttggttcttccccctaacgaagacagagacacctggataaagttcgctgaactttgctggaagaacggtcgtattagtcaggctagatctacgttagtcaaacttttacagtttgatcctgaatcttcccctgaattgacactgtatcatgcacatccacaagtagctctggcttatctaaaataccagtatgcagttggtgatgagcttaaaaggagggatgcattttctaaactgcaagagttgtctgtgcaggttgctaccaccatgggcaatttacctggaacatcagcaaaccatggcaccatgtcaaatgctggagtaccactcattgctcgtgtctacttgacacttggtagctggaagaaggcactatcacctgcattagatgacgattccattcaagaaattttgatttcttaccataatgccacgctaagtgcaaaggactgggggaaggcctggcacatatgggctttgttcaacacagaagtcatgtcacgctatactttccgaggccgaccagatattgctggaaaatatgttgttgcagcagtaactgggtatttttattctattgcttgtgcatctactacgaaaggggtcgatgatagcttgcaggatatccttcgtctgttaactctttggttcaaccatggggatacctcagaagttcaaacagcgttgcagaaaggtttttcccttgtcaagattgagatgtggctggttgtgctgccccagataattgctaggattcattcgaacaatagagtagttagagaactgatacaatctttgctagttcgaattggaaaggggcatccacaggctttgatgtatcctctcttggttgcctgcaaatcaataagtatattgagacaacgtgcagcgcaggaggtcgttgataagatccgccagcacagtggaggtcttgttgaccaggcacaacttgtgtcgaaggaactgatacgggtagcaattttgtggcatgaaatgtggcatgaggcactcgaggaagctagcaggatgtattttggtgagcacaatatcgaaggaatgcttgctgtacttgagccattgcatgcaatgcttgagaggggggatgagacaattaaagaaaatgccttcattcaggcttatgggcatgaattactggaagctcatgaatgctgtttgaaatatcgggctacaggagaggatgctgagctaactaaggcctgggatttgtattaccatgttttcagaagaatcgacaaacagcttccaagtcttacgaccctcgatctgcactctgtttcgcctgagctactcaaatgtcgaaagttggaacttgctgtgccaggaacttatgctgcagattcaccacttgtgacgattgagtattttgttccccaattgatttgttataacgtccaaacaaaggccaagaaagctgacaattcatggaagtgatggcaatgattatgcattcttgcttaaaggccacgaagatttgcggcaagatgaacgagtaatgcagctttttggtttggtgaatactctcctagagaactcaaggaaaacatcagagaaggatttatcaatccaaagatatgctgttatacctttgtcacctaacagtggtttaattggatgggttccaaactgtgacacacttcatgctctgatccgtgaatacagagatgccaggaagattttcttgaatcaggagcacagacttatgttggcttttgcacccgattatgatcacttacccctcattgcaaaggtggaagtgtttcagcatgctttgcaaaatactgagggaaatgaccttgcgaaggttctgtggctgaagagtcgaacttcggaagtatggcttgagcgccgcacaaactacgctagaagcctggctgttatgagcatggttgggtatttgcttggtttaggagatcggcatccaagcaaccttatgttagatcgctatagtggaaaaatattacacatcgacttcggagattgctttgaggcttcaatgaatcgagaaaagttccctgaaaaagtaccattccgtttgactcgaatgcttgtgaaagctatggaagttagcggtattgagggtacattccgaacaacttgtgaaaatgtgatgcaagtccttcgcacaaacagagacagcgttatggccatgatggaggcatttgtacatgacccgttaatcaattggcgtctgttcaatttcaatgaggttcctcaagtgtcgaactatggtaatgttcatgctcacacggttgtcagtagtgaagaagcagtggctaaccgagagctcatgcaacctcagcgaggagcacgtgagagggaactgctacaggctgtcaatcaactcggtgatgccaatgaggttttgaatgagcgtgctgtagctgtgatggcacggatgagtgacaaactaacagggcgtgacttctcttctgggtcagctttggctggagcaggtagctctatccaacatggcagtgagcatttggcttcaggagatgcccgggatgcccaacctggtctctcagtgaaggttcaggttcagaagctcatactccaagcgacttcacacgaaaatttgtgccaaaactatgtcgggtggtgtccgttctggtgagctctcttggaaacagtagcagtttataacatgtaaatattgtgaataccgtgtgcatagaagtttcgtggtgacagtttgtatgtgcagctttgtaattagcagaacttcaagatgccttggaccatccttttgtcagtttcttagaccgtgtttagcagttcacccttatggccatccaaaacactgtttttgtactgtagattgtattgtttgtagattgtactgttcgcagggtggatttttgaatatgagtataagaatgtgtaagctgttgaagatagccttaggttttcttccgtgccacttgagggtttgttcgattagctctcaatttatgtggattgagtgagatcggattggtttaaatctcaagcaagttaaattttcttcttaatttttctaatctcatcaaatccatgtgtaacgggaataaccgaac

SEQ ID NO: 3775 - DNA, 7956 bp, Zea Mays
cttctttccctttcttcttcgttcttccgttcaccgttctccgccaccgcggcccaaccgcgccgccgcacagccgcgccgccgccgagccgcgcgttctgcactcttcgcgccatcgctctcctcgcgccgtcgcccggccgcgccgtcgccctcctcggcctgccctgctcgcgtggagcgtccgcgtgagcgagacagggagacggagcaagacggcgtctcggtgggacgagcgcattcggccgatttgagagagcgagctcgtccattcctgcagtgcgcgttcgcatagttaaacccttgacagttcccctgcccccgcctctatccggcgcgccggccttgcagccgccaacatcgccatgaaaccctcgccgcacttcccggagatcggaaagaagcctaaagatttgattgctaaggaccacacatttaacatcgcggcttacatctcgtctggagcggatgttattgctgccgcgctccgtaaacatgttgaggaggaagcccgagatctcagcggtgaagcttttttaaggtttatggatcagctctatgagcagatatctagtttactgcagagcaacgatgttaatgaaaatttactggctctccgtgctatcgatgcattaattgatatgccctttggagaaggcgcttccaaagtttctaagtttgccagcttcttgagaaacgtatttgaagtgaagcgcgaccctgaaatcctagttcccgcaagtgaagtgctgggtcatttagcaaaagcgggaggagcaatgactgcagatgaagtggagcggcagattaaaacggctttggggtggcttactggtgaacgagtggaatatcgccgatttgcagctgtactcattctcaaagagatggcagaaaatgcgtcaacagttttcaatgttcatgttcctgagtttgttgatgctatatgggtagcactgagagaccctaaacaagctgttcgtgaaaaagcagttgaagccttgcgcgcttgtctccatgttattgaaaaacgggagacacgttggcgtgtacaatggtattaccggatgtgtgaagccgcacaagttgggcttggcagaaatgcttctgttcatagtattcatggatcattattggccgttggagaattgctgaggaatacaggggagtttatgatgtctcggtacagagaagtggctgatattgtcctcgattatttaaagcatcgagatcagcttgttcgacgtagtataacatcacttcttcctcgaattgcccacttcctgcgtgacagatttgtgactaattacctgaagatttgtatggatcatatcttgtttgttctacgtacaccagacgagcgcgctagtggttttgttgcccttggagagatggctggggctctgggtgttgaacttgtgccttatttaccagcaattacctcacatttgcaagatgcgattgctcctcgcagaggaaggccatctcttgaggcaatttcttgtgtaggaagctttgcaaaagctatgggtcctgcaatggaacctcatattcgtagcggacttctagatgctatgttttttgctggtctttctgataaacttatagatgcactcgagtctataagcacaagcatcccgtctttactacccacaatacaggagcgtttattggattgtatatctcaagcactaccaaagtcatcaataaggccaggtgcttctgttggtcgagcaagcaggtcaaacaatttgcaacagtttgtggactctaatagtcctgttcttgtgcaacttgcactgtggactctagcaaacttcaactttaagggccatgaacttctggaattcgctagagagagtgtcatactttatttggaagatgaagatagcagtaccagaaaagctgcctctttgtgctgttgcaaattagttgcacactccctttctgcttcttcagcttcacagttcggttcaaataggacaaatcgtattggaggagctaagcgccgccggcttgtagaggagatagtggagaaacttcttatggctgcagttgctgatgctgatgttggtgttagaagttcagtcttcaaggctttgtatcgaaatccagcttttgatgatttcttggcccaagctgacatcttgacttcaatttttgttgccttaaatgatgaggaatatgatgtcagagaattggcaatttctgttgctggtcgattgtctgaaaagaatcctgcatatgtactgcctgcccttcgtcgctatcttatacaattgctcacatatcttgaccagagtatggatagcaagtgtagagaggaaagtgctagattattgggttgtttaattaggagctgcgcgcggctcattcttccttacattgctccagttcacaaggcgctagtgactagattgtgtgaaggaacgggaccaaatgctaataatgctcttgctgcgggagtgcttgccactgttggagaactggccaaagtgggtggctttgctatgaggcaatatcttcctgagctgatgcctgtagttgtggattctcttttagatggaggtgctgttagtaaaagggaagtggcagtgtcaactctgggacagattatccagagcacaggctatgttattgccccctataatgagtacccgccattgcttggcttactcttgaagttgcttaatggtgaattggaatggtcaactagactagaagtgctgaaggttttagggattatgggtgcattggaccctcacgcacacaagcgaaatcagcacaatctacctggtcagcatagagaggtcctacggccaacaatcgagaccgcacaacatattgtttccatggaagagttaccgactgactactggccttctttttcagcatccgaggactactattcaacagttgcaattagctccctcatgcgaattcttcgagatccttctctttcaagttatcaccaaatggtggttggctcccttatctttatttttaagtcaatgggcctcggctgtgttccatacttaccaaaggttcttcctgatttattccgtgctgttcgcatgtgcgaggatggtgctttaaaagagttcataacctggaaacttggaacattgatatctattgtccggcagcacatccgaaaatatttacaagacatactttccctcatctctgagctgtggacttcctcattcagcttggctgcaccaaatcggaccatacagggcccacagggttcaccggttcttcaccttgtcgagcagctatgcttagctttaaatgatgagttcagaatgtatttacttcacattctaccgagttgtatccaagtcttaggtgacgctgaacgttgcaatgattattactatgttcctgacatattacacacacttgaagtttttggcggaaatttggatgagcacatgcacttggttgctccggtgcttgttcgtttatttaaagtggagctggttgatatcaggcggcgtgcaattgttactttgactaatcttatacctaaggttcaggttggtactcatgtttcggctttagtgcatcatctgaagcttgtcttggatggcaacaatgatgatctgcggaaagatgctgcagaagcgctctgctgcctcgcacatgcccttggagaagactttactatcttcataccatcaatacgcaaaattcttgtgaagcaccacttgcggtacagaaaatgggatgagattgaaaatcggctactgaggcgagagctactcatcactgaaaacttgtctgtgcaaaagtacacacaatgtccacctgatgtcattagagacccccttgatgattgtgatggtacaccttctgagatagctgatgatacacagcgacaagcaagaagtcatcaagtcaatgatgtccggttgcggagtgccggtgaggcttctcaaaggagtactagggaagactgggctgaatggatgagacatttcagtattgcgcttctcaaagagtcaccatctccagctttacgcacctgtgcaaggctagctcagcttcaggcagaatttatggaacatgatgagaagccacttcctattgatacaagactgcttggtgcacttgctgagaagtgtcgagcatttgcaaaggcactccattataaagaaatggaatttgaagctgtgtgcaccaagaagatgggtgcaaatcctgttacagtggttgaatcccttattcatattaacaatcaactacagcagcatgaggcagctattggcatattgacttactcacagcaaaattcggaagttcaattgaaagaatcatggtatgaaaagttgcaccgttgggatgaggctcttaaagcatacaccgtgaaatcatctcaaacatctggtccctttacaaaacttggatgctacattaggtcgaatgaggtgtctagcagctttggctcggtgggaagatttaagtgcattgtgtagagagcaatggacgggtgcagaaccatctgctcgactggaaatggctccaatggctgcaaatgctgcttggcatatgggtgagtgggaccatatggcagactatgtttctcgcctggatgatgcagatgaaaataagctccgtatgttgggtaacgcaacagctagtggtgacggaagcagtaatggtgctttcttccgggcagttcttttagttcgttacaaaaagtatgatgacgctcggatgtatgttgagcgagctcggcggtgtttagctacagaacttgcagcactgcccgattgctgacggacggagggaacttattcgcaatatgtggaatgaacggattaaaggaacaaaacggaatgtcgaggtgtggcaagccctacttgctgtcagggagttggttcttccccctaacgaagacagagacacctggataaagttcgctgaactttgctggaagaacggtcgtattagtcaggctagatctacgttagtcaaacttttacagtttgatcctgaatcttcccctgaattgacactgtatcatgcacatccacaagtagctctggcttatctaaaataccagtatgcagttggtgatgagcttaaaaggagggatgcattttctaaactgcaagagttgtctgtgcaggttgctaccaccatgggcaatttacctggaacatcagcaaaccatggcaccatgtcaaatgctggagtaccactcattgctcgtgtctacttgacacttggtagctggaagaaggcactatcacctgcattagatgacgattccattcaagaaattttgatttcttaccataatgccacgctaagtgcaaaggactgggggaaggcctggcacatatgggctttgttcaacacagaagtcatgtcacgctatactttccgaggccgaccagatattgctggaaaatatgttgttgcagcagtaactgggtatttttattctattgcttgtgcatctactacgaaaggggtcgatgatagcttgcaggatatccttcgtctgttaactctttggttcaaccatggggatacctcagaagttcaaacagcgttgcagaaaggtttttcccttgtcaagattgagatgtggctggttgtgctgccccagataattgctaggattcattcgaacaatagagtagttagagaactgatacaatctttgctagttcgaattggaaaggggcatccacaggctttgatgtatcctctcttggttgcctgcaaatcaataagtatattgagacaacgtgcagcgcaggaggtcgttgataagatccgccagcacagtggaggtcttgttgaccaggcacaacttgtgtcgaaggaactgatacgggtagcaattttgtggcatgaaatgtggcatgaggcactcgaggaagctagcaggatgtattttggtgagcacaatatcgaaggaatgcttgctgtacttgagccattgcatgcaatgcttgagaggggggatgagacaattaaagaaaatgccttcattcaggcttatgggcatgaattactggaagctcatgaatgctgtttgaaatatcgggctacaggagaggatgctgagctaactaaggcctgggatttgtattaccatgttttcagaagaatcgacaaacagcttccaagtcttacgaccctcgatctgcactctgtttcgcctgagctactcaaatgtcgaaagttggaacttgctgtgccaggaacttatgctgcagattcaccacttgtgacgattgagtattttgttccccaattgatttgttataacgtccaaacaaaggccaagaaagctgacaattcatggaagtgatggcaatgattatgcattcttgcttaaaggccacgaagatttgcggcaagatgaacgagtaatgcagctttttggtttggtgaatactctcctagagaactcaaggaaaacatcagagaaggatttatcaatccaaagatatgctgttatacctttgtcacctaacagtggtttaattggatgggttccaaactgtgacacacttcatgctctgatccgtgaatacagagatgccaggaagattttcttgaatcaggagcacagacttatgttggcttttgcacccgattatgatcacttacccctcattgcaaaggtggaagtgtttcagcatgctttgcaaaatactgagggaaatgaccttgcgaaggttctgtggctgaagagtcgaacttcggaagtatggcttgagcgccgcacaaactacgctagaagcctggctgttatgagcatggttgggtatttgcttggtttaggagatcggcatccaagcaaccttatgttagatcgctatagtggaaaaatattacacatcgacttcggagattgctttgaggcttcaatgaatcgagaaaagttccctgaaaaagtaccattccgtttgactcgaatgcttgtgaaagctatggaagttagcggtattgagggtacattccgaacaacttgtgaaaatgtgatgcaagtccttcgcacaaacagagacagcgttatggccatgatggaggcatttgtacatgacccgttaatcaattggcgtctgttcaatttcaatgaggttcctcaagtgtcgaactatggtaatgttcatgctcacacggttgtcagtagtgaagaagcagtggctaaccgagagctcatgcaacctcagcgaggagcacgtgagagggaactgctacaggctgtcaatcaactcggtgatgccaatgaggttttgaatgagcgtgctgtagctgtgatggcacggatgagtgacaaactaacagggcgtgacttctcttctgggtcagctttggctggagcaggtagctctatccaacatggcagtgagcatttggcttcaggagatgcccgggatgcccaacctggtctctcagtgaaggttcaggttcagaagctcatactccaagcgacttcacacgaaaatttgtgccaaaactatgtcgggtggtgtccgttctggtgagctctcttggaaacagtagcagtttataacatgtaaatattgtgaataccgtgtgcatagaagtttcgtggtgacagtttgtatgtgcagctttgtaattagcagaacttcaagatgccttggaccatccttttgtcagtttcttagaccgtgtttagcagttcacccttatggccatccaaaacactgtttttgtactgtagattgtattgtttgtagattgtactgttcgcagggtggatttttgaatatgagtataagaatgtgtaagctgttgaagatagccttaggttttcttccgtgccacttgagggtttgttcgattagctctcaatttatgtggattgagtgagatcggattggtttaaatctcaagcaagttaaattttcttcttaatttttctaatctcatcaaatccatgtgtaacgggaataaccgaac

SEQ ID NO: 3776 - DNA, 1577 bp, Zea Mays
gctcctgctcccgcaacaaatcccaaccccaagtccccccaaccaaagcagaggaaagagccgaggacgcgagggcgacgacccggaggagcaccggacccgaaggcggagccccccaagccagaacccggcgagggggtcggtgccgaccatgtcctcgcccgcgccctccccgcccgccggggcgccgtcggagccgctcctgctcccgctcccgcccccggagttctactgctaccagtgcgaggccacggtgtcgctgcccgagccggccgcgccctcctcggccaggctcctctgcccgctctgccatagcgacttcatcgaggagaaccctagcaccccgtctccaccaccacctccgccgccgccgcccccaccgcttttcctctccgactcctcctcctcctcgctctcggacgaccccgacgacgacttcgaccttgtcatggaccccgacgtggtgcgcgcctaccttagccgcttcgcccaccgccaccacctccagcagatcggccacggccccggcccgcacggccgaggggagccgcccgccacggccgcctccatcgccgcgctgcccacggtcgaggttgctgagcccaccgccgtctgcgccatctgcaaggacgacctgcccctcgcctccgaggcgcggaagctcccctgcgcccacctctatcactccttctgcatcgtcacctggctcgggatgcacaactcctgccccgtctgccgcttccgcatcccccccgccgacgaccccgaccaggccgcaccgtcgcagcaggacccgccgcccacgcggatcaccatccgcttcagcaccaccacacgccgccgcgtccgcatcggcagcgatgcgccactggcgtctcatatctcggcgtcgcccacgcagctcgcacaggctattaccggggatggagctggtggacctgccaatagcggcgagactgtgtcatctgagtggcctccgcaccccgaatcggatacagtcatgtcggaggcacgcgaggggggtggcttttttgattgagccagaggttccaattatcaggcgataaggtagctgctgttagctgtcagccaacaggagtaaaaggaggctaccacctaccatacgcttcctgtcttcgttcggacgaggtttctggcgagcgagaagatggcatgttggttacagctgaactaaagttgtcctgttaggagaacaagagcattcatcgcatgggttcccggtgtcttgtatattggttaaacgtatttattcgtaataaatatataggcatgtacaatgtgcagtactccgtttctggtgtccccgtgccctccatgcaacttggtaggtacatatgggaatgaatcgagtgctgtttggttcacatatttgtaacgtgaacggtaatcaataacgtcaaaccatgtttgttgcaatcagataatacactagaaactgatatcgtcctattcaaacttattacggccagaaattattacggcgaaccaaatgacactctagtagatatggattatactctgctgatgaaactgcctatttgcttgaaggcaagtta

SEQ ID NO: 3777 - DNA, 1975 bp, Zea Mays
ccattctaaaaaaaatccccgatctactacctttctcctcctctctcacggtctcacctctagtttccaggatgacaaaatatgggatcagattcgattcgtgagcctgtagaacaaggatgctcctccaatccatactaaattgaacccacgcagcagacatccgcgcgcagtacgtccccttcgcgaagcaccgccatcctcaccacgccgccgagtcgggcggcgcatgcgccatggcgttcctattcggcgcattcctgggcctggtggtgggcgtggccgtcgtgatggcgttcgcgcgattcgagaacagccgcgccgagcagcgccgtgagctggctgctacagctgcagctttctcgaagttgactgtacaggatttgaggaagctcatcccacccgagttttatccatcatgggtttcattcacacaaaagcagaagcttaaatggctgaatcaagagctgacaaaaatctggccatttgtcaatgaggctgcatcagagttgatcaaaacttctgtggagcctatttttgagcagtacaagtcattcatcctggcctccctccatttctcaaagttgacacttggtactgttgctcctcagtttactggtgtttcaatcttggagagtgatgattctgccatcatcatggaacttgagttgcaatgggatggcaatcccaatatagtacttgacatccaaacaacacttggaatttctcttcctgtacaggtgaaaaatattggattcacaggagtacttcggctcatatttaaaccgctggtgtctgaattcccctgttttggagctgtttgctgttctttaagggagaagagcaaggtggaatttaccctcaaggttattggtggcgaaatgactgctattccaggaatttctgatgcaattgaggggacaatacgtgatactattgaggatacactgacatggccgaatcgcataattgttcccattgtacctggagactatagtgacttggagttgaaacctactggggtattagaagtaaaactggtggaagctagggacctaaagaacaaggatcttgtgggaaagtcggacccttttgcattgatatacatacgtccattgcatgataaaacaaagaaaagcaaaacaattgttcacctggagctcctctactacccttacgcgaagcatgaaggggttcctaatccttttgctaatcagattcaactaacttcattggagaaggttctcaaaaccgagtctaatggatatgatattaatcagaggaaaaatgttattatgagaggagtcctttcggtgacggtcatatctgcagaggagttgccacctatggacattggtggcaaggctgacccatttgtggtcctgtacttaaagaagggagaaaccaaaaagaagacaagggttgtgacagacacgctaaatccaatatggaaccagacatttgatttcatggtagaagatgcactgcatgatttgctcatggtggaagtatgggaccatgatacatttggaaaggattacatagggaggtgcatcttgacactgacgagagttatactcgaaggtgaattccaagatacctttgtcttgcaaggtgccaaatcgggaaaactaaacttgcatttcaagtggacgccacagccaatctatcgtgatcgtgacagggatcagtgagacttgtaaacgaaaaaggccgataaacacttatccccaacggtgctatgtatattagtcgttctgtatttacaaaatcccacggttcttatagccacgtgaccaaaaagagatcaacccaccgacctgtattttctcctttgtgatgcaagtcagcaagtgcatggacctgtatatttgagtcgttaatgaataggaaatgctgttactatgctgcaagcacatatatgcttagtggtgccgtggtggtggttgcttctgtgctgctgtttgttcttccg

SEQ ID NO: 3778 - DNA, 2578 bp, Zea Mays
cacccacccatccaagcttccgtttctcgttctctccccccaccacaccacgaccccttccaaaacaacaaacagaaccgaagccgactagcgcgaccgaggaggcagagacgggtggaggaaaagggcaaagtcgccgcccgccgcccgccgctgatcggtcggtgagcccgatgcgctgtaccgctcggcctcgtcgtgttccgccgcgctgatctccgcctcccgcgacgcccgattccagaggatcgcttcttcggtttggccggccggtgcgtggggggttcaggaggcggggtctcggcggctgcaatgcatgctcgcatctcgtggcggcgtttcatcgcttcggtccgtttgtttttcggcttgttgcgctgaaattgagcgattcgtttccttgattcaaggactactagtggggcgggggcatcctgcgtggtggctctggctgtctggtctgtatctgtatgatagtgggcgttggcagttgtgccgtcccggctagctgcggacttgtcttggcctagcagggaagtgatggagcacaagaaagctagagcagtggaggatcctgcccggttgatttgcgacgatgccctcaccgaggtattccgcaggctgcctgcccgtgcgctcgcggcctgcagactggtgtgcaagtcatggatgtccgtgctcacagatccacacttcatccatgagcacctgagccgtggccagcagaagctgctgctctttgcgactgacaggggaaacgacaggtcgctcgccatggtgctcgcggacaacaacgcatccatgtaccagctgtcaaggcccgcggcgtctcggagcgtcttcgtgcacaattcttgcaatggcctgctctgcctaggtgacagcacaggagctgtcgaggtgctgaacccaacgactggtgaatctttaatgttgccgatgccaatgtacacggcagggagcagccagttctcgtcctgcaattggcactgcttggggttttgcccacaaaaaagggaacacaaggtggtgcatttctatccaggagctcacaatgacccgttcaaggtacactgtgagatatacacgattggagtcggtgtctggagacaagttgggagctgtcatggtgctccgactgacagaggggtgcatgtgaatgggatggtatactatctgacaaagttccgctacattgcttcatcgcgtatcaactgcttgaatcttgagagcgaaaaatttgatgtgatgatgcttcctccacacaaatcttatggaggtcattgctctttggcagagcttgagggaaagctatgcttgttgattgtcgatggtgcattggaaggtccgcctcgtacaatggacatactgatgctcaatagccatgataagcagggctggactcacagataccacttctccttgccttggttgatgccttcatgttattttactccgaaacacacactcttccacggtggaaaaatttgggtgcagttgttggctaggaatctatattgttttgacccaagttcaagttcagaagaactgacaacagcctggccagagcttgacttttcctttagcacacatactttcattgagagcatagttcctctgcgtaaagactactacttcaagcagatacagtgacagtggtgtgctgccccttgctttcaaggtagatgaagttcaatacctggaatagtatctgaagaattgttggctagctgcatcatttgctgtgatgctcactatgcacgtacagttacttccttggacttggagtattctttacaaacatgattttttttccgtaattgctatcggtttgttctgattttccttatgagctttttattacttccttgactcagatgtgctttgcttttcaaaaattgctgccccagatatcttatttaaaattgttagtatggaacactgccatttgttctgtttttcatgctctagtgttgaaggaaaatacttttctagtttgggtcatattcggggataaattggctaagaagcttgaaaaagatatttctgaaccacaaactccacaaggaccaactttgcttcgagttaagcaacaaaggtgataataaagcaaaagataaacatcttaattcaggcaagcacatagatcatacgaaggtcaaagttgttacatcacctttattctatgcccaaaagcttcatcaatgaagacacaatatgaagcctcaaaccacatgaagtctcacctacgaagactttgtatgaagcattaggagatatgaagcttcctaagaaaggcgatatcttcctacaattaagcaaagccacgaaagagtctttgccagaggtgaagacgtgcctgtgaagactggtcaccgacaagaattcaagcattgataaagatggaaacaaaccaaattgcccttgaatgggcaaacgattgtaactttatagtacagggtagttaggactttacagaagtgctaaaaggtgcccctataaatacccctgacatgtactatttatagacatgacatattttactgcaatttacctgtcggttaattcttccccaaca

SEQ ID NO: 3779 - DNA, 1703 bp, Zea Mays
tgtgcccaaaccatacccagtgaggaatcagtcaccaagagcgagcccgcagtactgggtcggcaggccacgagcgagcggtcagcatccgcaggtacagccacacacccacgcacgagcactcccagccggcccgccgagaatccactcacccgctggttcatgggctccacggaaacgatagcccacacgtcagtcccttccacaagacccaaaccgtctccggagtaaacccccgagatctatccccgtttccaacctcacacccccccttccattggagctccttcgtctgagttaaacctaaaccctaatcgcgacctgcgttcgtcaaaaccctacctggccatggacggcggaggaggaggcggtggaggaggaggtggagttggggcaggtgtcatggtgggtggcggagtcgtgccgggcggcgggggcggcgacgtggaactcgtcagcaagacgctgcagttcgagcacaagctgttctactttgatctgaaggagaacccgcgggggaggtacctcaagatctccgagaagacatcggccacgcgctccaccatcatcgtccccatcgacggcgtcgcctggttcctcgacctcttcgactactacatccgcaccgacgagcgcgacgtcttcagcaaggagctgcgactccagaccaaggtgttctatttcgatatcggggagaacaagaggggccgattcctcaagttggttactaagtgagtagtggtttcttttttagatccatataaagaaaaggaacagattgaaacaccaaattttgaatggtttggtttatgtccactacaacaagaagataatggaaagattcaaagagtgacgcgttgaagtgaaaaatctaaaccctttgatcttagagagttccaatggaagaatgagttcaaatggcaactaacaatcaataagttcatcctctagatcttgatcttttctggtcccatgttgataaagccattggtgcaacaacatcactacaacgtcgcagttttcctaggatgagtgggagctacactcgtcaaagtagtgttgtagttgctgcttcaacatccactacaaccacgatattagaacaagaacaaggattaggagaagaggaagaagctgaaattgactttgttgctcctgatgatctgcatgttgaggatgattatggccaagccgtacagatgctgaagctgctgcaactgcaagtgatatgggtggcataaatgagatgaacttagatatcgaataggccttacgggcttagggcagggcaatatgccatatttatcagctattcagtttatcatgtatttgatggatatatatagttgcttgctacttgctggaccttatattttatttgctagtttttgatgtatcatatggtatatgttgcatacctgctgtgggacaaatgggcgcctaggtgtccatgcgcccggccggcgacttgtcttgccttggtgccgtgataaataggattgtatggatatgctatcttttattgatgcaagtatgcaacagtttttttgtaatcactaatcatcagcgatattattctttctggagttgtgagtttatgttctggttagtttaattttattccttgacgcatgctcttaacatatacagtttcacattttcagattggggctccaaatagtgacatgtggtattctctgata

SEQ ID NO: 3780 - DNA, 1991 bp, Zea Mays
gttcctggcttgggccgaacaaccccgtattgggctaccgctgcagcggttcattttcaccacgcgtgcgctctctctgtctgcgacgactgggctacgccgccgccgccgtcctccgtctggtgccgaggtcttcgttggacccttcgcccgcgactagcgtccgccaggctgaaggcgatggcgacggagaggaggcgcgcgtcagtcgtggtactgggcgacatcggccgcagcccgcggatgcaataccactccctctcgctcgctaaccaggccagtatggaagtggacattgttgcaaatggaggaagtgatcctcacttgtcactgagagagaatccatcaattcacatccacgagatgaaaacagtgcagttaactggaatttcaaagatatctggtgctctgtcacttctacttaaagctgctgtccagttcattttgctggtttggtttctttgttttaagattcctcgccctgatgtcttttttgttcagaatccaccctctgttccaacactggctgctgtaaaactggcaagctggctgagaggtgctaaatttattgttgattggcataactttggatatacattgctggggttgtcgcatggcagaagtcacattattgtcaaaatctatttctggtttgagaagtactttgggcagatggctgatggtgccttttgtgttacaaaagcaatgcagcatgagcttgctcaaaattggggaatcagggcgacagttctttatgatcaatctcctgatttttttcaccctgcttcattgatggagaaacatgggttgtttagcaggctagggaattccatgtgtagtgctatgggcaatgctgattgcatatcagtggaggaagtaggggaagacatgaacactactgcctttaccagtaagattgatggccaagttttcttgaagcctaacaggccagcacttgttgtgagcagcacaagctggacgccagatgaagatttcagcatacttttggaagcagcactaatgtacgacagacgcgtcgctgcagctttaggtgaagatgattcaatggatgaggggcaactttggattgatatcaagaacgggaagcagtttgtctacccaagattactgttcattattacaggtataaaccattctgctatattaacatgaataaccaagtttgttttttcatgtattccattttcctaggtaaaggacctgataggaagaaatatgaggatcaaataaaaaggttgaagttgagacgtgttgccttgcggacaatgtggcttgcatcagaggactaccctttattgctcgggtcagctgatctaggagtgtcgttgcatacatcttcgtcagggctggacctaccaatgaaggtggttgatatgtttggatgcggattgcctgtttgtgctgcttcattctcctgcattgaggagcttgtaaaagtaaacaaaaatggtcttcttttctcaacatcttcggagcttgctgatgaacttatgatgctctttaaggggtttccagaagaatgcaatgccttgaaatccctcaaagaaggtgccatgaagtcagcatcatcttcgaaatggtcaacagaatgggaaaccaatgcactacctttggtggaccaggtcattggatgagatgtgtgcttacatacatcagatagaattgttgtattgcagagaaccagagatcggtgtactagagagaccagatgtacattaaaggagaggcgtgtaccaaacagaagtgtacaaggaatcaggatctctagcacgatgtctggagaatgaaaaggatatgtcagatgcatggtcctatcttatgtttacacactgctacaaatacactctgaatcagttctgatccatttgacctcttcgtcctcggcctctacctttcctttcggggccatctggactgcttggtcatcccctgttgcagtatcagggaacgctgggcttcagggtgtgcct

SEQ ID NO: 3781 - DNA, 2858 bp, Zea Mays
attgtctttgtgaataatctaaactatcaaacaactatatatggattataatatatttagattataatctagattatataatctataagctgaaacaaacggacctaaggctatacagctgagagatcgatggggggaggcggggacgcgcagcctttttgccctgccttcgcgagtcgcgccaaccccccccctccccccccccccccccaaaaaaaaacccccagaaccctagcagaggtctcgagcacgagcccgcgatggcgtcggacagcgaggcggcagcgcattctacctttaacgagcacgacagtggaggacggtggtgcgcacgagagcaagcaggaacacctcaatggcgcggtggggcacccccacggttgggcaggaggaagagataatcgggccgggcccagcgccggcgaagcagcggcggaagcgccctctccagttcgagcaggcgttcctcgacgccctcccctccgccgccatgtacgagaagagctatatgcatcgggatgtcgtcacgcacgtcgctgtatctcctgctgacttcttcatcactgggagcgcagatgggcatctgaagttttggaagaagaaacctgttggggttgaatttgctaaacattttcggtctcatctcagtcccatcgaaggtgagtgttgatggattgctttgctgcacgatatcaaacgatcggtctgtgaagatatatgatgttgtaaactatgacatgatgttcatgatacgtctctcatttgttcctggggctattgagtgggttcatcgagaaggagatgttaaaccaaaacttgccgttagtgaccgaaatacacctttcgttcacatatttgatacccattctggttcaaatgacccaatcatgtccaaagagattcatggtggccctgtcaaagttatgaaatataaccacattcatgatgttgttatatctgctgatgccaaaggactgttggaatattggtctccatctaccctcatgtttccagaaaatgaggtgaggtttcgcctgaaatcagatacaaatctatttgaaattgcgaaatgcaagactactgtgtctgctattgaggtaagcaatgatggcactcaatttgctgtcacatcccctgatcgcaggatacgtgtattttggttcaaaactggaaaattaagacgtgtatatgacgagtccctagatgtggcgcaagatcttcaaagaagtgatgttccattgtatcaccttgatgctattgattttggacgacgaatggctgtggagaaggaaatagagaaaacagaaaatgttccacaacctaatgctgtctttgatgagagttgcaattttcttatttatgctacccttttgggtgtaaagattgtgaatttgcacacaaataaggtttcccgtatcctggggaaggtagagaacaatgagaggtttctgagaattgcactataccaaggagacaaaggcaacaagaaggttagaaaaattccttcagtagctgccaatgtcaatgatagcaaggaaccattatcagacccaacgctgctgtgttgtgctttcaagaagcatcggatatatctctttagtcgtagggaaccagaagagcctgaagatgcaactaagggtagagatgttttcaatgaaaaaccaccgccagaagagcttttgtctgcatcagacctaggaaaaactgctacaacatcattgcctgataatttggtgctacatacttctatgggtgacattcacttgagactatatccagaagagtgtccaaaaactgttgaaaacttcactacccattgtcggaatggttattatgacaatcttatatttcatcgtgtgattaaaggattcatgattcagactggagatcctttgggggatggtactggtggacaatcaatctggggcacagaatttgaagatgaatttcacaagagcttgaggcatgataggccttttacactttccatggccaatgcgggacctaacaccaatggttctcaattcttcttcaccactgtagcaactccatggctagataacaaacacacagtgtttggtagagttgtgaaagggatggatgttgtccagcaaattgagaaggtcaagactgacaagaatgacaaaccatatcaagatgtaaaaatcttgaatgttacagttcccaagacataagcgcgtgatcagttgggttcggaaattgtgcctgcactccttggttggacatattgctaaacctgtagaagctggagtcttacgagatcagctgtaatgctatgggtgaattgagcacaccttgggctgctcttgacgtcggggtattggaaccttgcaattttcaggatcgatggtaccacaggaattttaggtttacttgctttgattgcagaattatagggcagaaggttgtagttttgtaacgttgagttaattttaagtttagctgctttgattctagaatcctggggccaccgggcctgcggcgtagacactcactggttttgggcgctgacctggccttcccccaatttctgcgtcagcaaatgtacggcctgggaagaatctttgatgggtcgtcgctgtctgcagggtgcagctggcagaatggcctttgattacactacactaaggtcttgttcagttattttaatttcatgtgaattgaagtgtattaaaatggattgggataaattttgacttgttatgtatttaaaacaacataatatcacttaatccacatggattaatgatgaaaccaacaatccataatgtgagccgtgtgtaccgtgtatcacgatgcaaaccttgactatggagaaggaatgcatcgctcggtgg

SEQ ID NO: 3782 - DNA, 2098 bp, Zea Mays
gttaaacctaactgcctctcctgtctcccagtctctcgccgctcgcctctcagccgccgcgtgcctcccagtctcccgccctcgcctctctcttcctctcctctctccctgcgcgccgccgccgtgcctcgccttgcccagagactaaggcgccaggatagtataaatttagttcacgtgattgtggacttctcgccttttggattcaacattttctgcttctcagctctggaatacagaagtgccattgtgggctcaagaggataatgtacgggaggcgtgcatcgcagctgctgaaggagatcgactcctctgaggctggccagctcgtgccattcaacgtaattccagcttctgtactcacttgtggttacgaatttggaatcatagggaatgctgcttgtatctcgtttatgtctattacaagccgcaattttgtattatctgatgtgttctgtgttcgatgggtgaattgagtgtcgaaaaactcctatatcctcagttgaaagttttactttacttccgtggtagtctggtagcacctcaaaaatcataaaccgtcagatcaaatattgttggtttggctgacagatgtgcctgcaattgtgtgccttttaaattcttctcccttctaaacatgttagttagtacgtgccatctagatttggaaaaaaatcatatgggacctggtttaattctctatcaagttaaaccctacccatacatatgaatttagataaaaaaagatcactacatgtttcattaattcataatcatatttttaccatgtgggtactactttgtcattatatagtgccagaaaacctaaaatggttcgaaatattttatacgtactacttttccattgtcagaggcagcgtgactttgatagccacagttcctttttagtttctttggtacataacatgcaatctctgaaatgtgcagagtgacgtgtttgatcaagtgattagagagtgcaatgagcacaactcacaatttcaatcgttgatcaggaaaatggtggagcaaaacttagatatcgagacaactagaaatgaagatcactatggtgcagctatccaccatctttccctgctccgtaacaaaagatgccttatggcttacatgtacaaccgagcagaagttatccagagttttagatggaaaattggccctgtgcttcctcatgacatacaagaaaagctccatttctcagaaaaggagtacttcaagaaccactctgcagccattaaatcatacatatcagagatggatatagatttgacagtggacatggttcctcccaaggatccttacattcaggttcgggtgctggaggacattggtgaagtatcgctcggtgaccattctgtgtcattgaccaagaactcactccatttcctaaggcgcacagacgctgaacagtttatatcacagggtcttatggaagaatttctggagtagggatcacatgtatgaatgtatgatggtacaataggatggtgcactgccctcgttctccccagcgatgctgcctgatgccctatttgcaacaatgaaaagacgcgttctgtaccaaggagcttcttaactagtcgctggacgatgatttcgaaagttgtgcaggcagtcctatactagattcattgcctctatttacatgtggatgacttttagttagtgtgccatccaagaaagcagatgttgcaaacattgtaacttgtgtattaacattggttttgctggtagatttcatatttgtgtttccaagattccatgtaatcaagaaaaaaaatgaaatcttggttgaaacagtctttcacagtgaggagttagtttcattttatagctaacatgcaagagacaatatgtctagttaacatttcatctatttctccattaattgcttgcctcatcatctaaactgttgacatgtcacatcatttattaatgagaatgaaacctttataaaactgtcattgagaaacttgattctcttttgtatttcttgcactcaatgtggtaattaggacagaccacttgtgtctgtatgtatcacctacctaggagatgcttgattggaaaccaccagacg

SEQ ID NO: 3783 - DNA, 1057 bp, Zea Mays
tgacaaagcaattcatcttaagtattcttccttggccgaggttgaagctgcaccacctactgccgagcttgagccaatacgagcaaactacaatcagttggatgaaatagacatgggaatgacatatgaggagctgtctatatatggaaggttaaggaaaattttccgatgtggtcctgtttcaatgtttcaggatctgaaggtcttcgtcggatatgtccaaactatctcaaccggtgtcgggcaagaacctgtgccacagttggtgtggaagattatctccgtctgaagtggctgacaaagtaaagcacttcttcaagtactacgccataaaccggcacaagatgactgttttgaccccatcttatcatgctgagagctattcaccagaagataataggttcgaccttcgccagtttctttacaactcaaggtggccctaccagtttcggaagatcaatgagcttgtgcaagagatggacaaagatggcaaatggggaacttctgcagaagggaagctgggagcgcagacaggtgcacagggaactggaatgggagtggtggcagcggggtctgccaatcccagtgccggcttctgaagagaaccatactaacgcgtggaagctagttcctccagtttttcggccttgacagaataatgcaccagccgtccagcccccaccccaggacacgggctgctaatgttaatttgtctgcttggttcccttgtactgcatcacttctccctgctagagagctggaatccccacaaaattttaggctaccagttctgtttcttccatttgtcatagtacgatctacaaagtatcaaccaaagaacatgtgaaaaataagatggaatccctttaatcagattgtttgtccgaagtggcatggcgatgaaaaggaaaacatcagtataaagaactagttactcataattctttgttctgtaaagagtcctttctaaataatgctgtgtgcatgatgatgatgatgtgatgtgatttctaccatgacttcaaagaactcaatatttgcaccttaactctccaat

SEQ ID NO: 3784 - DNA, 1095 bp, Zea Mays
cgaaggaccgccgccgccccttcacggaacccgcggccgactccccctccgccttccccgctcgtccgcttctccgccgtccgctcctccactgcatggcctccacccctccgaccctgcacctcggctcctccacccttcggccccacgcctcggctgctccgctcgtccagccttcggccccacgcgcaccgcggccgccgtatctcccgtcatctgatcacccacaacggtgatgtggacgacgtggtgcgtcttggaggcagttccatttctggcgttacggtgagggaatgccacaacgtggtggacgccactgccgtggcgctcccgttgcaggccggagtctggacgcctaagcttcttgttttgctgggtttggtgcaagtggcccatatgttgcgcagaggagcactggtgaagcctaagaaccctttatgtcgatgggggcggtctcgagggaggtgtcgtcagcatgtgagaggctctgcttcatttgcccatcactgcggacgaggtcccgccatccagtcaagcgctacaagaagttgcttgcagaaatcttccctcggacacaggatgaaggaccaaatgatcgcaagatagggaaactgtgcgaatatatttcaaggaatcctatgcgtgttccaaaggtttatttccttttatgctttgcccgtatagttttaagtgtaacatgagttcaattatgaaaaccatcgtgaagtcccattacagattacagtttacttagagcaaaaatgctacaaggaatttagggctgagcgctatggttcagtgaaagttgttatggcaatctatcgaaaggccactttttgccaacagcttgctaacaattgtagagacattattggagcaaaatagacaggatgacttgcggaaattagcatgtcaaacactttttgactttataaatagtcaggttgacagtacttacatgttcaatttagaaaaccagattcctaaactatgtcatctggcccaagagatgggtgaaaaggagaagatatgcattcttcatgcagctgggctacaagctctttcatctatggaaaagatatgttgcctcttagg

SEQ ID NO: 3785 - DNA, 1962 bp, Zea Mays
cgaaggaccgccgccgccccttcacggaacccgcggccgactccccctccgccttccccgctcgtccgcttctccgccgtccgctcctccactgcatggcctccacccctccgaccctgcacctcggctcctccacccttcggccccacgcctcggctgctccgctcgtccagccttcggccccacgcgcaccgcggccgccgtatctcccgtcatctgatcacccacaacggtgatgtggacgacgtggtgcgtcttggaggcagttccatttctggcgttacggtgagggaatgccacaacgtggtggacgccactgccgtggcgctcccgttgcaggccggagtctggacgcctaagcttcttgttttgctgggtttggtgcaagtggcccatatgttgcgcagaggagcactggtgaagcctaagaaccctttatgtcgatgggggcggtctcgagggaggtgtcgtcagcatgtgagaggctctgcttcatttgcccatcactgcggacgaggtcccgccatccagtcaagcgctacaagaagttgcttgcagaaatcttccctcggacacaggatgaaggaccaaatgatcgcaagatagggaaactgtgcgaatatatttcaaggaatcctatgcgtgttccaaagtcccattacagattacagtttacttagagcaaaaatgctacaaggaatttagggctgagcgctatggttcagtgaaagttgttatggcaatctatcgaaaggtgatatgttcttgtcaggagcagttgtaagtttttctacttgtaaacatatatgcattttctcttttgcatatgccacacatttatagtttcaaagcgttataatttgctctcttctgacagtttctaattttttcttcaatgattgttatttgtttttgtcaattttgatggaccttgctctatgacaccatttgaatttgtacttggagcaaaaatttagttctttttcgtataacgtgctcttactcatttttattggaactttaataagaattagtttataaacatgaacaattactgtaatgggtgaagccattgatttgcaggccactttttgccaacagcttgctaacaattgtagagacattattggagcaaaatagacaggatgacttgcggaaattagcatgtcaaacactttttgactttataaatagtcaggttgacagtacttacatgttcaatttagaaaaccagattcctaaactatgtcatctggcccaagagatgggtgaaaaggagaagatatgcattcttcatgcagctgggctacaagctctttcatctatgatttggtttatgggtgagcactcccatatgtctgcagagcttgataatttctggaaaattatgagagcccatatgcaaatgctgataatgatgctgctgttgaggatattcgaactcagtgggtggatgaagtgctcaaagccgaaggtcatgaacctcctgctgttaccattttgaccagggttccttcatggaaagttattagagctgttcatgagaagaatcaacaagcccaaatttttggtcagggatttgtctacataaccttgctagaatatccagggaaacaacaacaacgcgacgagttctggaagctatatttcgttattttgataataacaatctatggtcaccttctaaaggatttgcgctgtgtgtcctgctggatatgcagattgtgatggagaaatctgaatgctcatatattgttgtctatgttagtcaagcatcttgaacacaagaatgtattgaaacaaccagatatgaatctagatatcattgaagttacttcacgccttgctgaacactccaaagctcagtcttctatagcactaatgtcttcaataagtgatatggtcaggcatatgggtaaaagcatgcaatccttggccagtgatgcaggtcctggagacaac

SEQ ID NO: 3786 - DNA, 1572 bp, Zea Mays
aagcagagccgaggcgagcacccccacccaccgagatgcaatgcaatgcaaacatcctccctcttctcctgctcctcacagacatcttatcctagctcccggtcgaaggccgtaggtaggattcccttctattcctcgcccgcttcctcctccggcagccggacctagctagctagctttcttgccgttcgccgcccatatggctaggaagtgctctagctgtgggaacaacggccacaactccaggacctgcggcgggcacagcaggaccgcggcggccttcgagaacaacggcggcggcgtgaggctgttcggggtgcagctgcacgtggggtcctcgtcgcccgtagccgtagccatgaagaggtgcttcagcatggagtgcctgtcgccgccgccgccgctgccgccgccgcccgccgcgccggcgtactacgcggccgctctcgccgccgccaacagcagctcgccgtcggcgtcggcgtcggcgtcctcgtcctcgtcgctcgtctcggtggaggaggcacaggcacccgagaagatggccagcgggtacctctccgacgggctcgtgggcagggcgcaggcggagaggaagaagggtcttcttctctgggttttccgaccggccatcaccaggcgttccgtggacggaggacgagcaccggcggttcctggcgggcctggagaagctcggcaagggcgactggagaggcatctcccggcacttcgtcacgacgcggacgccgacgcaggtggccagccacgcccagaagtacttcctccggcagagcagcctggcgcacaagaagcgcaggtccagcctcttcgacgtggtggagaacgcagctgagagggcgacgacgacgagctccagggagcgcccgaggctcacggtcacggatgcgataatcgcgaccgcctctgctgcagcacccggaacaacgacggcagcactcccggccctgtcgctcggcatccgacggccagcgaggcctgagtaccacgccgcgctgcctccgaacagcctgtccctgcagctgccgcggtgctcggcggcaatgggtagcgcgtcgccgtcgccgagcctggcgctggcgctggcggggccgaaacacaagcacccttcgccttcgtccctgacggcggcaaaggctagtagtagtggccaggcaccggacctggagctgaagatctcgaccggccggcagagcgagcaccaggtccagacgggctcgccgccgaggacgccctttctgggcaccatcagggtcacgtaaccggaaagacggcggcggcggttagtcgggaatgacctgctggtaaaagaagagcttggccggggtgggaaaactgaaaaggaggagcttttggcagtggtgttggtgtgtgtgtgttgctgcccctgccagtggcagccgagacgacgatgcggtcgtttatcacgtgggtgtggtgttgtacatcatccatcagaaagatggaaactttactttagtggcctaattagaactctataaactttactgtcctaatttagcattcgtttgtttcttgcaaataaagaacgcc

SEQ ID NO: 3787 - DNA, 3654 bp, Zea Mays
aagcacgccgatccctctttctttccgtcgtcctcctcgtcccaagttctaacccggccgccgcacatcgccaaaccctaactagggttttgccaagccctctccttccctatcctcacccccatggaccccttttccaagaagcgcaagcccgacgagaacggtgccgtcaccgcctctcccgccggtggggctgccacgctgggcctcacccgcgacgacgtcatccgccttctcgagccgctctcccgggaccagcttgcggacatagcggccgccgccgcgctcgtctcctcgcaagcgctcgacgccgtgcgcgcagccgccgaccgtgacccggccctccgcaagctcttcgttcgggggcttggttgggagaccacatccgactcgctccgcgccatcttctccgcttacggggacctggaggaggccgtcgtcatcactgacaaacccacggggcggtccaagggctacgggttcgtcaccttccgccacgccgattccgccgtcctcgcgctcaaggagccatccaagaagatcgacggtcgcatgactgtcacgcagctcgccgccgccggctcggctggtgggcccgccggtgggcccgccggcagtggcggtgctcctgtgtctgatgtgtcgctccggaagatcttcgttggtaacgttccggcagacatggcatcagagcgtctccttgcgcattttgcctcctatggcgagattgaggaggggccgctgggttttgacaagcagacgggcaagttccggggttttgcactcttcgtatacaagacaccagaaggtgcgcaggcctccctagtggacacggtgaaggtaattgacggccaccagcttgtatgcaagcttgccttagacgggaagaaggagaagcaggggcaatcacagcaacctggacctggcaatcaccagcagcagcagatactgccgggtggtccgcaggacattcagggagggcttgggcttgggtcacaaatgggagcacagtatggtgtccctggtactggtggtttagggtcgatgggaggccaggtgcccagtggtttggctagtgctggggctggtgcatttgggcctggcggattgggtggtggttcatttggtgtatcatctcagttcggtgctgctgggatgggggcatatggtggccttggaattggtggaggctctatgtaccgcatacaacagggagcaggtgggctgcctgcaggcacatttggtgatggagggagctacccacctccaggttctggtttccggggccaggaccctcaaggtggaatgtctcctcctggtccaggtggcagggctcctcctatgtatcccaacgtgccaccttatttctaaggtgtttgcctcttgggagcatatccgtttcttgtgctgaattcagaagtgttgttacatggatgtcttgcatattctggctacttctgatctgaaatgtggaatgagtttgcactcctaaattttgctgctaagggatacatgaagctagtttgttgtgatagttgtgataatgcttatctgtgataatgcttcacatgtacttatgactgctttgcagtttcattttctatatagataaaagaccttgcatgaagtgtatgttgtgttgattatcattgtattatcatatgaaatccctttattttcatggtctgatgatgtgtttaatcttatggctttctatttgtgtatatttttggtggaccaagggcaatctatatgtatgattggtgattgtaatgcaccttctctttttttctataaggtccaatttatagttatatcccctgcgacacaaatatctcattatagttaatatggttattgttagattggaaccatgagccacactttggtggtaactggagattacaggtcatatcgaaacctgaagtcaactttttgttgctattttttatttgtagataggtctgatctgatctgctccatgattacaagtttagaaaaattatctcacgtttgtttgaagctaggtttgacatttgctgctatgaaaattttagtttgtgttgtggaggtgttagttttgcttaaaaggttacagtgattggattgtgttattgagggtaaatgatgcagttatctgccttggtcaatgtggtgatagttgtaatattcctaatttctgattgtgatttgttcttttctaggttcatgatttttgatatgcgtctagatatagattatgtctagatacatgagtatctcgaaaaagctagctacggagccttacaatttggaaagaagcaagttgtgtttttgtgtacattatcttatgtttaggtgaacaagaatggcctagaatttggaattgagcattttgcagtcttggttcttattgattgtttattagtagccaatttaaaagccactgaggtgtttttttcctgctatgagaattgtgccactatttatatatatagtggtacatgttcgatgtaaatttgtacctacgttgcaatgcctacatattatgattctttgttctttgtggtaatgcctttatatatcttggaatctttgtttgtacgtcttctgttttgatttggtttgctgttcactccgaaataatgtaatcgactgcccaaaaatgtttttaactctagcgaatatacgtgaggcatgaactacggaaaaatgttttttacccaagcagatatattcttgaggtctaatcaggaaattaaacagaagcacgttccatgtgcctggtagccctgtagacaccagtggctgcagtcgcaatatgttagtggtggttgttactgctctttgtaagtggtttccctttgctgagtaactcggtaaattgatgggtgtgcattaattcgtagcttgtagagatgatgttcatatgtatggtagtcgtttctgtcctctcgatgtttttctcgataatgattaccaaacttattggaaatgatggagcgatggttctcttagatggaaacaatttggttgtagcaccaatttgcgctgcataatactactagaagggacgtgtcgactgtcgatccacctagcccaggacatcaatgctccatcgaaagttttctcacctgccgtctgcgccacctttccgtcccactcgagatgaccccaactgcctacagatgagtaggctgtggcaagtgaaacttgacattttggagcttgtgtacatacggcctgagtttggcggtgagcccagtgcccggtgttgaagatgaggtcgtcaagtccactgcaacataggccctgagtttgatgcgttcgtcttttgtttccaacttcacgaggaaggggcaccagaagaacactgcggattctgtgttttttttaattgggtgtgtcagaacgaaatgtgttaattgattttaggtgcaagattgtagtcaattaaaagataaatagagagcgttgggactctaggatatgattattggtaattaatttgttgccatgctcaagaaggcatgaaatttgaaaacgcacccgggaattaatcacacgtgcaagccagagctgatcgatgcacacggagatgttgctcttttctggtagatgtcatacgtatcaggaggtggtgtatttactacaccaaatcaccaatatatttag

SEQ ID NO: 3788 - DNA, 4750 bp, Zea Mays
cctagcgtcacccccggcgcccaaagatcgaagctccgagcaggaaacgccaccgccctccatctcccccgtgtccctagccaggagcaccgtccccctcaccaccccgcctaactttcctatcctcatcccgacgcctggagatccatcctcaaacgccgctgctagggcaccgtcccgcgctaggaccccccgcgcctcgcaatcatgtcaccggcaactctgacgacctagggctcacaggaagttgactttcctctgctgctgttgtgctcagtgtggatgacattgtgctgcctcaggtacaactttccttttctgtgcttaagtaaaaaaatgttgttccattcgatacacagtcggattatttgatttaaagccttgctgaagttgacattgtgatatatcgtgaccctggtaaaaaatattttcaagttcagaaagcaggatacttcctttaatatgtctatcacacatgttcacggagataattctacacatggttttttatacctctttttgaccccacttggagatggaagcgagattttgaagttttaaggcctgcagtgccgtggtcttgcgttgatatctgtagttgtacatagaaattttctcatttggtgtatgtctttgctactttttccttaaacataaattatatttttataactatctggcagttattgatctatcactgccttactacatgatacctatctggcagttatgaaaatattcgaatccattttatatgtaaatcctaaaattttcgaatccaaagccacccattacaatattatgtactgaaattatatcttttacttatgtgtcactctgcatttttttaagatttaaaaaaatttcttccttattttatacatggttgaacaccaaccttcatgattcactggatcttcttagtattatctctaacaaaagaatttataaagttctttccccacaaatgcaaatataggtattagcttattgattttaaattggttattaaatgtctggcatggatctcctccctgctcacgggcctcaccatcctcaatggcgagtgtaaaacttcgcaccaacacactcgacaagcttgatggcgacccctacgtcaacatccgcatgggcaagggagtggacacaatcaggctcttgcgcaagtatcccctgaatttactacctgtagtttcgaaatgggcttacccaaaaaaatatttgcactaagaatatttatgtttgtttagttggtctggacaaaccacaagatcagtttaagcattgcttccaaatgccattaaatatttatcttgactgaaaattcgcacacaagaatagtaatattctatgaccaagtgactgtagtatgaagaagcatgtgtcattttcctgattaatttagctggttcaactttgttggggtcccaagtcttggccagaacttgatgtaattaaactcctttagacaattgagtacctttctatgtggatttacatatccctttgcttatttagtaacttctgcaaaatttgaatcctaggcaatgtcaacctcaacaccttgatgaacatgttcagtgtgcttggtgctggtggtggccttggtggtcgaaatgcttctaatggtccctttatgtggcacacatgaatacctacaactccataatgttgctgaatgattaattatggaatgtggacaatgcaagatacattttgagtacccttttgatctaggctctggaccgccatgcttgcgtcggacgcgggacgtccacgccgccatcgcccgtgagcagctccgacagcctcatcgccgcgttgcacctgctcttgtgtcgcaggctcgggttaccgtcggtgctgacaccgaggaaggcatgatccatgcggagcagcccaaggcgcgatgccacctccgctgtcacgcatgatgagctgcttcgcctctggcaccgccttgttccttcgcgatctcacattggacggtggatgaacttgggcttccaagatccgtaatacaaggtaaattgagtaccttttgtgacctcttctgtatttctaggcctttgtataacagctgtggacaaaacctgtaaacatgttggatgaactggagcagctattgaaaggtaactctatggtgaaagagctaacgcctaggacaaatgactaccttgtttcatttcgagaatgtatgtccaccaggattttatctgttaatttgaacaaaattcatatcaaagcacgacaggtacttcttgatatttccttgatttgcacagtgattgagtgagcttttaagggtacgaatgtagcagcctagaataattctatatttacttactactataaagagcgggagcaaaatatagctatacaattgatgtatatttagcatatcaaacaatgctcaagatacttaattaattgcatactatagttaggctgtatataccaatgcaatggtcactagcaagataatgcagcctcacagtcttatgacatcagccaatatataaattagaccatttttgttgctgcaactgcaactaatactatgttgaagtgtttttcgttaactctgctctgaaaatgctttttgcttcactctttgacatatctatatgactatatagccgatgcctgtttttactatatgcttatcatgaatctcatgttttccatatgaataatgctagctgttgcaacatctttgtttggagctaatgatacatttaatcctagacttgatggcaaagaacgggtgcaattttttgtctctctatttcctatttatgttgcacaaataattgtttccttttgttatccaaataaataattacttccttctccacccttttctccagttgtagcgagtgagttttagtaagggataaacaatagtaggaagaactctgttgtgtttcaatctcgagtatttgatggatggggcattgttctatagatggtgtatacagaaatgatcttaactgtcattttggtcaaaaccacaatagttctacttatgttagaaaatcaaaagatttaagtgtcttccatggtttaaagttcatgatgagcaaatttgacttatttttaattgtttatcatattttgagaataattttgctgcctattcaacagataccatggggggagcatttgatccagctagctggcaaacaagatttggtggtaactgtttatgatgaaacaaatatttcgaatcattaattgctatgtttgtgtctgcatcctgtcagcaattaggatgtgacaggacatggcctccctccaatgcaaaaatcccaaaagctccttgcagacacacttatttgcattctttgcgctgacatgcagttaggatgcgacagggcctccctccaatgcaaaatcacattaaccatgtcaccgctgtcaattgttttcttgagtttgttcccaaaacctcttaattattattgcccacggatagtcatgttatctacataatccgttttgccactcttcagggttctgcattgtgaatagaggttcatctttgtgattagattgccaccgccgctgctttctactcattcgacgaatgttttgcaaagaagaaatctggtttatcttaccctcgattccttcctatgatacaactaacaaaatgaattggtacattcaggtatctttaaaaccttttcacttccaaattagaatgatatcatgctcaagaggtaacattttctgatgttttttattttaatagtaattattggtcgctgactttttaaaactatttgtgttgtacttcaagcatcttctacactgcatctaagctttgaagagttacggacaattttgtactaattgttttctttattttcccaaatgtgtgccacttcctttagtatttttgcagtgcagacgattgaaaactactgttttacatcacctctctgtcataggaatagtttactactctaatgctcattctattaacactaaaaaaagatatatcgcttgaaaacaggtatgtatttcaatcttctagatttatatttctttctttatatatacaaaacaggtaagtttgtaccatttgttttattttttaaaaaaagaaaaggtatgacacttacattagtattttttcccaccagaaacgattgaaaactattgtttcccgtcacctcctgtcatagtaagtgtttcccgtcacctgaggatttccaattttctacaatggtgggagagatcttcaactattgtttctgacacttgaaaggatggcttggaccctcttattatcctgggagcctcggtggtttggaagcatagaaacagagtggtgttcggtagagtttcttccaacctcactcttattctggagtctgctaatgaggaaagcgagaaatgacaagttgcaggagccaagggttatcctttctggctgctccaagccatataatttagggtggttggatccttcatggatattttaatgtacttctgttgttggcctccgtaagaagtgcatgtatcccgggcgtctttcagctctttgtattcttcgtcttttaatatagtggggcgcagttctcctgtgcttttcgagaaaaaaaaatatgtgcatctatttaagtctcttaccaataagtgtttataaaatatgtttcattgttcttagcttgatatgtggtaaggtcttcttctttcttgatcatctatgtatgccttaattcatatactccgaaataat

SEQ ID NO: 3789 - DNA, 5272 bp, Zea Mays
atcgaagctccgagcaggaaacgccaccgccctccatctcccccgtgtccctagccaggagcaccgtccccctcaccaccccgcctaactttcctatcctcatcccgacgcctggagatccatcctcaaacgccgctgctagggcaccgtcccgcgctaggaccccccgcgcctcgcaatcatgtcaccggcaactctgacgacctagggctcacaggtctttgatgctgctgcttcaccaaacaatgaaatgctcttgatgcatgattcaggagctaggaggatatctattgtcgtcgagttacatgaagttgactttcctctgctgctgttgtgctcagtgtggatgacattgtgctgcctcaggtacaactttccttttctgtgcttaagtaaaaaaatgttgttccattcgatacacagtcggattatttgatttaaagccttgctgaagttgacattgtgatatatcgtgaccctggtaaaaaatattttcaagttcagaaagcaggatacttcctttaatatgtctatcacacatgttcacggagataattctacacatggttttttatacctctttttgaccccacttggagatggaagcgagattttgaagttttaaggcctgcagtgccgtggtcttgcgttgatatctgtagttgtacatagaaattttctcatttggtgtatgtctttgctactttttccttaaacataaattatatttttataactatctggcagttattgatctatcactgccttactacatgatacctatctggcagttatgaaaatattcgaatccattttatatgtaaatcctaaaattttcgaatccaaagccacccattacaatattatgtactgaaattatatcttttacttatgtgtcactctgcatttttttaagatttaaaaaaatttcttccttattttatacatggttgaacaccaaccttcatgattcactggatcttcttagtattatctctaacaaaagaatttataaagttctttccccacaaatgcaaatataggtattagcttattgattttaaattggttattaaatgtctggcatggatctcctccctgctcacgggcctcaccatcctcaatggcgagtgtaaaacttcgcaccaacacactcgacaagcttgatggcgacccctacgtcaacatccgcatgggcaaggtcatgtaatttttatcttcatttcaatagtgattgaagcaaatgaaaattttaaaattttggcagtgagtatgcaacacttccaagcaatggataatgtattaatgtggggctgtgggcgttggaacgtgcgtgttgactagctttgattagcttgtcgatatacatacttagccatctattttttcttctcctttcaaatgctatgctattgctactgctgttggagtgtaccatttaacttgatatatgatttaatagatgctttgtgtgcataaatcgtctacagttaccatctggacttttttagccatgtttgagagatgtgacggagtttggatttcacttaaaaatgcaggtccagttgatgtttaatgtgcctgaactgcagttacagtcataaagctcaaacaatcttgagcatttggttttacattatattctctggtttctgtttttgtgatttgtgttctgatgatgcaaacgcttccattttttatgttgctcctgcacaagatttcctgcacaaccaactgttttttgaattctttatgttatttgatccagggagtggacacaatcaggctcttgcgcaagtatcccctgaatttactacctgtagtttcgaaatgggcttacccaaaaaaatatttgcactaagaatatttatgtttgtttagttggtctggacaaaccacaagatcagtttaagcattgcttccaaatgccattaaatatttatcttgactgaaaattcgcacacaagaatagtaatattctatgaccaagtgactgtagtatgaagaagcatgtgtcattttcctgattaatttagctggttcaactttgttggggtcccaagtcttggccagaacttgatgtaattaaactcctttagacaattgagtacctttctatgtggatttacatatccctttgcttatttagtaacttctgcaaaatttgaatcctaggcaatgtcaacctcaacaccttgatgaacatgttcagtgtgcttggtgctggtggtggccttggtggtcgaaatgcttctaatggctctggaccgccatgcttgcgtcggacgcgggacgtccacgccgccatcgcccgtgagcagctccgacagcctcatcgccgcgttgcacctgctcttgtgtcgcaggctcgggttaccgtcggtgctgacaccgaggaaggcatgatccatgcggagcagcccaaggcgcgatgccacctccgctgtcacgcatgatgagctgcttcgcctctggcaccgccttgttccttcgcgatctcacattggacggtggatgaacttgggcttccaagatccgtaatacaaggtaaattgagtaccttttgtgacctcttctgtatttctaggcctttgtataacagctgtggacaaaacctgtaaacatgttggatgaactggagcagctattgaaaggtaactctatggtgaaagagctaacgcctaggacaaatgactaccttgtttcatttcgagaatgtatgtccaccaggattttatctgttaatttgaacaaaattcatatcaaagcacgacaggtacttcttgatatttccttgatttgcacagtgattgagtgagcttttaagggtacgaatgtagcagcctagaataattctatatttacttactactataaagagcgggagcaaaatatagctatacaattgatgtatatttagcatatcaaacaatgctcaagatacttaattaattgcatactatagttaggctgtatataccaatgcaatggtcactagcaagataatgcagcctcacagtcttatgacatcagccaatatataaattagaccatttttgttgctgcaactgcaactaatactatgttgaagtgtttttcgttaactctgctctgaaaatgctttttgcttcactctttgacatatctatatgactatatagccgatgcctgtttttactatatgcttatcatgaatctcatgttttccatatgaataatgctagctgttgcaacatctttgtttggagctaatgatacatttaatcctagacttgatggcaaagaacgggtgcaattttttgtctctctatttcctatttatgttgcacaaataattgtttccttttgttatccaaataaataattacttccttctccacccttttctccagttgtagcgagtgagttttagtaagggataaacaatagtaggaagaactctgttgtgtttcaatctcgagtatttgatggatggggcattgttctatagatggtgtatacagaaatgatcttaactgtcattttggtcaaaaccacaatagttctacttatgttagaaaatcaaaagatttaagtgtcttccatggtttaaagttcatgatgagcaaatttgacttatttttaattgtttatcatattttgagaataattttgctgcctattcaacagataccatggggggagcatttgatccagctagctggcaaacaagatttggtggtaactgtttatgatgaaacaaatatttcgaatcattaattgctatgtttgtgtctgcatcctgtcagcaattaggatgtgacaggacatggcctccctccaatgcaaaaatcccaaaagctccttgcagacacacttatttgcattctttgcgctgacatgcagttaggatgcgacagggcctccctccaatgcaaaatcacattaaccatgtcaccgctgtcaattgttttcttgagtttgttcccaaaacctcttaattattattgcccacggatagtcatgttatctacataatccgttttgccactcttcagggttctgcattgtgaatagaggttcatctttgtgattagattgccaccgccgctgctttctactcattcgacgaatgttttgcaaagaagaaatctggtttatcttaccctcgattccttcctatgatacaactaacaaaatgaattggtacattcaggtatctttaaaaccttttcacttccaaattagaatgatatcatgctcaagaggtaacattttctgatgttttttattttaatagtaattattggtcgctgactttttaaaactatttgtgttgtacttcaagcatcttctacactgcatctaagctttgaagagttacggacaattttgtactaattgttttctttattttcccaaatgtgtgccacttcctttagtatttttgcagtgcagacgattgaaaactactgttttacatcacctctctgtcataggaatagtttactactctaatgctcattctattaacactaaaaaaagatatatcgcttgaaaacaggtatgtatttcaatcttctagatttatatttctttctttatatatacaaaacaggtaagtttgtaccatttgttttattttttaaaaaaagaaaaggtatgacacttacattagtattttttcccaccagaaacgattgaaaactattgtttcccgtcacctcctgtcatagtaagtgtttcccgtcacctgaggatttccaattttctacaatggtgggagagatcttcaactattgtttctgacacttgaaaggatggcttggaccctcttattatcctgggagcctcggtggtttggaagcatagaaacagagtggtgttcggtagagtttcttccaacctcactcttattctggagtctgctaatgaggaaagcgagaaatgacaagttgcaggagccaagggttatcctttctggctgctccaagccatataatttagggtggttggatccttcatggatattttaatgtacttctgttgttggcctccgtaagaagtgcatgtatcccgggcgtctttcagctctttgtattcttcgtcttttaatatagtggggcgcagttctcctgtgcttttcgagaaaaaaaaatatgtgcatctatttaagtctcttaccaataagtgtttataaaatatgtttcattgttcttagcttgatatgtggtaaggtcttcttctttcttgatcatctatgtatgccttaattcatatactccgaaataat

SEQ ID NO: 3790 - DNA, 5905 bp, Zea Mays
taggaattaataaacgaggagggttccatccgagagaacaagcaattccaagcagtaaatgggatcgaatcgaagcacttgcatgcatgggtggtgcaggaggagcgaggaaggaagcataagcatcttcttttgaggaaaggcagatggagtgttgctgcgttcctgtcctgtcatagcgtcggcggcgtcggcaacaccaatctggggatactggaatgaaacggcgacgatgatctagctagatagttcatggtctgcgccggccagccgggcggtcgactggtggctgggcgcatctatccgcctatttatagccacagtcgtcaaacggaacagcagtggcagcgtacgtagtagaggcaagcaaaagggcagggatagagcgccgccgagatatctagctagaagagcctagaagccggtgtagaggatcaggaggatgtctgggtcgtccggctccggcgtgtgggtgttcaagaacggcgtgatgcagctggagcagccggccgcggcggcgagccggaaggcgctggtgtacgtgccgacgaacgaggtggtgcggtcggtggaggcgctggagcggcggctgggcacgctgggctgggagcgctactacgagaaccgcagcatcgtgcagctccacaagcgcgacggcggcgccgacctcatcaccatcccgcgcgacttcgccagcctccgctccacccacatgtacgacgtcgtcgtcaagaaccgcgaccacttcaaggtcgtcgacgcttagccgccgcatcccgcataagctacgaccagaccaagcagctagctactagctagctccatcgtcgtcgaccaccgtcgtcgatctcgacatgcatgcgtgtgcactgcacaacggactgctagctgatgccagaaattatagtctttgatgctgctgcttcaccaaacaatgaaatgctcttgatgcatgattcaggagctaggaggatatctattgtcgtcgagttacatgaagttgactttcctctgctgctgttgtgctcagtgtggatgacattgtgctgcctcaggtacaactttccttttctgtgcttaagtaaaaaaatgttgttccattcgatacacagtcggattatttgatttaaagccttgctgaagttgacattgtgatatatcgtgaccctggtaaaaaatattttcaagttcagaaagcaggatacttcctttaatatgtctatcacacatgttcacggagataattctacacatggttttttatacctctttttgaccccacttggagatggaagcgagattttgaagttttaaggcctgcagtgccgtggtcttgcgttgatatctgtagttgtacatagaaattttctcatttggtgtatgtctttgctactttttccttaaacataaattatatttttataactatctggcagttattgatctatcactgccttactacatgatacctatctggcagttatgaaaatattcgaatccattttatatgtaaatcctaaaattttcgaatccaaagccacccattacaatattatgtactgaaattatatcttttacttatgtgtcactctgcatttttttaagatttaaaaaaatttcttccttattttatacatggttgaacaccaaccttcatgattcactggatcttcttagtattatctctaacaaaagaatttataaagttctttccccacaaatgcaaatataggtattagcttattgattttaaattggttattaaatgtctggcatggatctcctccctgctcacgggcctcaccatcctcaatggcgagtgtaaaacttcgcaccaacacactcgacaagcttgatggcgacccctacgtcaacatccgcatgggcaaggtcatgtaatttttatcttcatttcaatagtgattgaagcaaatgaaaattttaaaattttggcagtgagtatgcaacacttccaagcaatggataatgtattaatgtggggctgtgggcgttggaacgtgcgtgttgactagctttgattagcttgtcgatatacatacttagccatctattttttcttctcctttcaaatgctatgctattgctactgctgttggagtgtaccatttaacttgatatatgatttaatagatgctttgtgtgcataaatcgtctacagttaccatctggacttttttagccatgtttgagagatgtgacggagtttggatttcacttaaaaatgcaggtccagttgatgtttaatgtgcctgaactgcagttacagtcataaagctcaaacaatcttgagcatttggttttacattatattctctggtttctgtttttgtgatttgtgttctgatgatgcaaacgcttccattttttatgttgctcctgcacaagatttcctgcacaaccaactgttttttgaattctttatgttatttgatccagggagtggacacaatcaggctcttgcgcaagtatcccctgaatttactacctgtagtttcgaaatgggcttacccaaaaaaatatttgcactaagaatatttatgtttgtttagttggtctggacaaaccacaagatcagtttaagcattgcttccaaatgccattaaatatttatcttgactgaaaattcgcacacaagaatagtaatattctatgaccaagtgactgtagtatgaagaagcatgtgtcattttcctgattaatttagctggttcaactttgttggggtcccaagtcttggccagaacttgatgtaattaaactcctttagacaattgagtacctttctatgtggatttacatatccctttgcttatttagtaacttctgcaaaatttgaatcctaggcaatgtcaacctcaacaccttgatgaacatgttcagtgtgcttggtgctggtggtggccttggtggtcgaaatgcttctaatggtccctttatgtggcacacatgaatacctacaactccataatgttgctgaatgattaattatggaatgtggacaatgcaagatacattttgagtacccttttgatctaggctctggaccgccatgcttgcgtcggacgcgggacgtccacgccgccatcgcccgtgagcagctccgacagcctcatcgccgcgttgcacctgctcttgtgtcgcaggctcgggttaccgtcggtgctgacaccgaggaaggcatgatccatgcggagcagcccaaggcgcgatgccacctccgctgtcacgcatgatgagctgcttcgcctctggcaccgccttgttccttcgcgatctcacattggacggtggatgaacttgggcttccaagatccgtaatacaaggtaaattgagtaccttttgtgacctcttctgtatttctaggcctttgtataacagctgtggacaaaacctgtaaacatgttggatgaactggagcagctattgaaaggtaactctatggtgaaagagctaacgcctaggacaaatgactaccttgtttcatttcgagaatgtatgtccaccaggattttatctgttaatttgaacaaaattcatatcaaagcacgacaggtacttcttgatatttccttgatttgcacagtgattgagtgagcttttaagggtacgaatgtagcagcctagaataattctatatttacttactactataaagagcgggagcaaaatatagctatacaattgatgtatatttagcatatcaaacaatgctcaagatacttaattaattgcatactatagttaggctgtatataccaatgcaatggtcactagcaagataatgcagcctcacagtcttatgacatcagccaatatataaattagaccatttttgttgctgcaactgcaactaatactatgttgaagtgtttttcgttaactctgctctgaaaatgctttttgcttcactctttgacatatctatatgactatatagccgatgcctgtttttactatatgcttatcatgaatctcatgttttccatatgaataatgctagctgttgcaacatctttgtttggagctaatgatacatttaatcctagacttgatggcaaagaacgggtgcaattttttgtctctctatttcctatttatgttgcacaaataattgtttccttttgttatccaaataaataattacttccttctccacccttttctccagttgtagcgagtgagttttagtaagggataaacaatagtaggaagaactctgttgtgtttcaatctcgagtatttgatggatggggcattgttctatagatggtgtatacagaaatgatcttaactgtcattttggtcaaaaccacaatagttctacttatgttagaaaatcaaaagatttaagtgtcttccatggtttaaagttcatgatgagcaaatttgacttatttttaattgtttatcatattttgagaataattttgctgcctattcaacagataccatggggggagcatttgatccagctagctggcaaacaagatttggtgttaggatgcgacagggcctccctccaatgcaaaatcacattaaccatgtcaccgctgtcaattgttttcttgagtttgttcccaaaacctcttaattattattgcccacggatagtcatgttatctacataatccgttttgccactcttcagggttctgcattgtgaatagaggttcatctttgtgattagattgccaccgccgctgctttctactcattcgacgaatgttttgcaaagaagaaatctggtttatcttaccctcgattccttcctatgatacaactaacaaaatgaattggtacattcaggtatctttaaaaccttttcacttccaaattagaatgatatcatgctcaagaggtaacattttctgatgttttttattttaatagtaattattggtcgctgactttttaaaactatttgtgttgtacttcaagcatcttctacactgcatctaagctttgaagagttacggacaattttgtactaattgttttctttattttcccaaatgtgtgccacttcctttagtatttttgcagtgcagacgattgaaaactactgttttacatcacctctctgtcataggaatagtttactactctaatgctcattctattaacactaaaaaaagatatatcgcttgaaaacaggtatgtatttcaatcttctagatttatatttctttctttatatatacaaaacaggtaagtttgtaccatttgttttattttttaaaaaaagaaaaggtatgacacttacattagtattttttcccaccagaaacgattgaaaactattgtttcccgtcacctcctgtcatagtaagtgtttcccgtcacctgaggatttccaattttctacaatggtgggagagatcttcaactattgtttctgacacttgaaaggatggcttggaccctcttattatcctgggagcctcggtggtttggaagcatagaaacagagtggtgttcggtagagtttcttccaacctcactcttattctggagtctgctaatgaggaaagcgagaaatgacaagttgcaggagccaagggttatcctttctggctgctccaagccatataatttagggtggttggatccttcatggatattttaatgtacttctgttgttggcctccgtaagaagtgcatgtatcccgggcgtctttcagctctttgtattcttcgtcttttaatatagtggggcgcagttctcctgtgcttttcgagaaaaaaaaatatgtgcatctatttaagtctcttaccaataagtgtttataaaatatgtttcattgttcttagcttgatatgtggtaaggtcttcttctttcttgatcatctatgtatgccttaattcatatactccgaaataat

SEQ ID NO: 3791 - DNA, 5973 bp, Zea Mays
ttggagcggattccagcggcatccgccatggactggagcatcgacctcgacaggggtctccgctcccgccaaccagcaacgcgcgtccgcgccgtcgacgccgccggcccacgcctccgccagctctgcacttgcgccaccgcccccgcgcccgtcgcctccgcgtacggcgtcttgcccggggaggcgcgcgtcttcgcggagaccatgctcctccgcctcgccaccgaattcaggagcgccgacgtcgccatgcgggtccgcatcatcaagaccctcctcaattctgccacgggtccaggggcgctagccggggcgcgcatcacggagcctgaccagctgctcaggagggtcaaggtggtctacgacactgggaacaagcgggacagggcgcttgcactgcgcatgttcgggtgcttcgccgacatcgccaaggacagcgtgcacgtccgctctctcatactttccagtttgagtgcctccagtgctttggaggttggaaaacagatggttctaggcacactggaagacgtcttcaaatctgaaatgctcttttcactctcaagactgtcatccaagtcgatcattttgttttctgaccaggtggatttattgttactgtttatggatcataattcctcttctatgaagtctgtggcgttaaaatgcatgtgttttatgtttcggagaaatatctgccattttccagttattaggaatgtttttggcagattgtttccattaattgatgatgaggattttccacttgactgtaagagcgatgtgttaaggattctgcagaagatgttatgcagtaaaacgtcaagtaatcatcgtgccaatggttctgagttatctaagctacttctagctgctgaaagttctttagattcttcttgtttggaggtgcaaggtaccgctctggaaattcttgtggaaatcttttgtattctcaaggaagttgggtcagataacatatcagttctcaagggttcgtcatttgcacatgctgagtggcaaggaataacgaacaatgtaccattaactgaagataatagtatgaacggacctctgtgtaagatcattgcaatgattgtgaatcatattatatccctggccaatgaagttgctagcagagatatctgcatatcatctgcagtggataaggcatacaaaactcctttcagacttatgctaaagcttgtttcatgctacccttctgctgctgctgtaactcttcatatactgaaaagccttgtaaaagaactgtttctaattaatggaagtgattactctgaagtttctgttacatctgttgaaccattccagacaagtgttgcccttaaagaattgagtacttcagatgacaatgttcaactgttagctacatgcatcaaagcttcctgcattggaacacttattggcaatggaaaactggattttctcaaaattgattgcaagaatagaaagtccataatgcatgatctaatttgttgcatgctcaaatttgcaaatgcttgtcatgaggtgctatgtgaaacatctggtgctagatacaatcttcatgatagcatcaagggtctaatcaagtatgtgcgtcaggatgcccctcagcactggagcacatatgaatccttccatttgataatgtgtgcttgtgttacccggaatacttgtaaaatcaatcgtggtaatcaagaatctggtgattcaaaagagcatcataatacactattcactccttctgtttggataactcaggaattatgtgcacttcgaatgaccaaaatgcttataaagaagcagaaatactgggaagcttataggtcttctatgtactgttgttgtaaaggtctttggttcacagcttcttttgtcttcagaaaactggcagatgcttttgaagcaggctctttcagtttttggctcaaatcgttgctacttttttctgctggcgaaattgagatgaagctattgtttttttcctcagcaactataaagttagttggtgagctaaaaatggagggtgatttaagtgaggatctttactgtaatgaaacagatgctgatagcaccctcagtagatcatcagagttacatggtttccaagcaaagatatctgatatttgtggcagaacattattagcaaataatgctcttgcatccagtgcctcttcagatcatgacttcgtattccagaggtggttcatcagccttaggtcatcatttcttgaggtcctaacaaaagttcttgatatccttaatgcacactcttcctatgaagcaagaggagaccatttatctttgtctggagagtttgtcaaagaccaagtgcttgctttggatcattgctctctaagattaagtgacttggcaaaaagttatgaccttcttgctgcatcccatatggacctggagcgacatggctcaagtagtatagccaggcttgctttcatgtgctcacttttggcattttgtactgcatattctgtttatttctcaaaggcatgtaactacgtagagtactgcaagcttccaaagaggttttcccatgcttcaatcctacaagatttgtatggaagagtagatgggtctgactggcaggttgtttcccagctgcgacagtttatgtccacttcttttgacgaacttgacagcttacagtccagcacatggatcagtggttcatgtaatctggagaaggatttgtattctctttgtcattttgctgtggcatctttgcttggtgtatgtgatagtgctgaagctgaaaaaatacaaaatggagaggattgtttatctgctttgcaaggaggattgcaagtgttgtccagcatcttgcagaagtatttggaattgccttttgtggttcccaagtactttttcagagtaaagccttgccttggtgctgaactttacatatttgattcaaatcatttgaatgaaaaaggaatgtctatagagcctggttttctattgtctctaaccctctgcatgaagtggaagtgtgtgttagaaagaagcaccattcgcatcgtgaaattgtactgcattttggccgcaagcttagagacctgcttggatacagcaggaacaagaagcaagcagtttgatcagcacaggaccgctgaaatggtcgaattgaactccaagctgctacagtacataaagaatgatctgaggaaggctaggaatgagaagaagaattcccatagtgtcatggagatggtgactgcctttgcatgctttgaaccaacagatagtgggcaggggttctcaggatgcctgctggatgtctcctcgttccctgaaggctcttatcagataaagtggcaggcgtgctgtgtcgatgagaatgggtcctattttagtctcctgcccctgaacgatggttccatattttctgtccagaagtcctaactctaactgaatggccgctgcggttatgggaatggaagatggaacatactcttcttgctcgcagtgtctgttcctgagttcatttttatgcacacagaaggcttgtgtgtctatgatccgcctatatggtctgggtttgacatgttcactctattacttgtgttgtggcagtaaattacagaggcctggtgctgaggcttgtaggcagcatgaactgatgaatgagcagatgttgctgctgatcttcaccttgctgctattctgaacagaatcagcactagcagataacatagatcgtttgatgaattgacacagaaccggtttaccaccttccgtttgctagaaacggggaccaatttatcaatgttattatacaaatgactgggtgtgctgtcaattatataatatttgggattacttgaatcacttctatgtcacatttatcagccagaggcagatgtttttcagctggttaatgtgcattctctgtctctgtgggcaacctgaccgatgacaattcacattgtacacctgtttgtagcgctgattattcttttaatgcagattgtgtataggcctggcgaaaaattgaatctacgagatttccagtatcctgtaaataacgtatctcatatctctggatgactttattgctgaccaacctggtggatctctgactactggaggatgcaacagaacagagtgttgctgtggattttataatgttggaagtagaagctgcattcatgtgcgatggtgcttctaaaatgccaattcttttgtaaacagaatttgtgatcttgaaaactttgtggtacggagatacaattctggtaatgagacccaaggtcatgggctagtgaagagatggttagaacttagaagagcttaaggatgacaaggaggatacactgtaagctgtatttgtgtttagagatcacattatcgattctgttaaacacatatattgcaacatgtatgcatcagcagaccagatagctgatggttttccaccttgccaggcatgcaagtaccgtggtcaccctattgagcttgtcaccccaaataacgcaaaatggacttgtccaataaatgaacagcttgcagcttctgatgttactgacactgctgtgagaattgaagaacaaacagtgttgtttctgcctacttcggaagacagtccaaacttgcagggagcctctgcggttgggttgatagcccagtggtgaaggcggcgttgtccctttcaccaggtcaggggttcgaccgttggttccgcacccataaaaaaaatcccctcactgtcccgcctgctcttggggatcgatgtcctgtgcgccaccttccgtttgggccgctgcagagtggacagttgtactcgggccgttagtgatgtgggccaaggttcagaggttttctcagccaggaccagtggtttgggtcctttagtattataccacaagagcggtcattcccttcccggccgttttttttgcagtgagcctctccttccatttcttttgatgtaattgatagcctcaacaaacgaaggagtcataatggggaggttttatgttgtgattcccagttcaaacgatgttgaagcttctctaactgatgagagctcagatgggaacactcaaattttctatggtctatatgaaacccttttcgagcttgaccagggacttgtttgctcctcatcatgcaatattggaaagatgaaaattggaactcttcagtgttactacctactatcttcttgaacaatctgaaaaaggaccagtgctccccctgtcagggacggatctagcggtgggtgggcggggctcgagtctccctaccgtttcggatcccatgaagccccactacagtctcctctaatctaaaatgtatacaatataatgtagaatgagcttttatactgcagcaatttagttcagtccctcctaaacttttttctggctctgtccctgcccctgttctattttgatttgtgatgtagtgagagacatattttttatttttgtgaaatgtatatttcaccgcttgtagtaagtagcctaaaaccatattggattggattcctaccgctgaataactatctttgtcataatgcttgtacttcagatgcttataagttgccagaatagaaagtattccctccgtcctaaaatacaatttgttttagactaaatatacattcattcaataacctatgaatatagtttataggtatgtctatatacattcattcattcggggacataaaaaagagagctagaaagaactataactatattttgatacagagggagtattttgtggtctgttattggaacatatcatgctgcaattttgtggtctgttattggaacatatcatgctgcagaggcttgctggatttgaagagatattgcctctcctagacgtgactcgagattgcagctctaaggttaccatggatgagaaggcttcaaggattctggagaggctggagcccccaagggcgaagaaacagagagcgagcttcagcaaggccagcacaaacgc

SEQ ID NO: 3792 - DNA, 6761 bp, Zea Mays
ttggagcggattccagcggcatccgccatggactggagcatcgacctcgacaggggtctccgctcccgccaaccagcaacgcgcgtccgcgccgtcgacgccgccggcccacgcctccgccagctctgcacttgcgccaccgcccccgcgcccgtcgcctccgcgtacggcgtcttgcccggggaggcgcgcgtcttcgcggagaccatgctcctccgcctcgccaccgaattcaggagcgccgacgtcgccatgcgggtccgcatcatcaagaccctcctcaattctgccacgggtccaggggcgctagccggggcgcgcatcacggagcctgaccagctgctcaggagggtcaaggtggtctacgacactgggaacaagcgggacagggcgcttgcactgcgcatgttcgggtgcttcgccgacatcgccaaggacagcgtgcacgtccgctctctcatactttccagtttgagtgcctccagtgctttggaggttggaaaacagatggttctaggcacactggaagacgtcttcaaatctgaaatgctcttttcactctcaagactgtcatccaagtcgatcattttgttttctgaccaggtggatttattgttactgtttatggatcataattcctcttctatgaagtctgtggcgttaaaatgcatgtgttttatgtttcggagaaatatctgccattttccagttattaggaatgtttttggcagattgtttccattaattgatgatgaggattttccacttgactgtaagagcgatgtgttaaggattctgcagaagatgttatgcagtaaaacgtcaagtaatcatcgtgccaatggttctgagttatctaagctacttctagctgctgaaagttctttagattcttcttgtttggaggtgcaaggtaccgctctggaaattcttgtggaaatcttttgtattctcaaggaagttgggtcagataacatatcagttctcaagggttcgtcatttgcacatgctgagtggcaaggaataacgaacaatgtaccattaactgaagataatagtatgaacggacctctgtgtaagatcattgcaatgattgtgaatcatattatatccctggccaatgaagttgctagcagagatatctgcatatcatctgcagtggataaggcatacaaaactcctttcagacttatgctaaagcttgtttcatgctacccttctgctgctgctgtaactcttcatatactgaaaagccttgtaaaagaactgtttctaattaatggaagtgattactctgaagtttctgttacatctgttgaaccattccagacaagtgttgcccttaaagaattgagtacttcagatgacaatgttcaactgttagctacatgcatcaaagcttcctgcattggaacacttattggcaatggaaaactggattttctcaaaattgattgcaagaatagaaagtccataatgcatgatctaatttgttgcatgctcaaatttgcaaatgcttgtcatgaggtgctatgtgaaacatctggtgctagatacaatcttcatgatagcatcaagggtctaatcaagtatgtgcgtcaggatgcccctcagcactggagcacatatgaatccttccatttgataatgtgtgcttgtgttacccggaatacttgtaaaatcaatcgtggtaatcaagaatctggtgattcaaaagagcatcataatacactattcactccttctgtttggataactcaggaattatgtgcacttcgaatgaccaaaatgcttataaagaagcagaaatactgggaagcttataggtcttctatgtactgttgttgtaaaggtctttggttcacagcttcttttgtcttcagaaaactggcagatgcttttgaagcaggctctttcagtttttggctcaaatcgttgctacttttttctgctggcgaaattgagatgaagctattgtttttttcctcagcaactataaagttagttggtgagctaaaaatggagggtgatttaagtgaggatctttactgtaatgaaacagatgctgatagcaccctcagtagatcatcagagttacatggtttccaagcaaagatatctgatatttgtggcagaacattattagcaaataatgctcttgcatccagtgcctcttcagatcatgacttcgtattccagaggtggttcatcagccttaggtcatcatttcttgaggtcctaacaaaagttcttgatatccttaatgcacactcttcctatgaagcaagaggagaccatttatctttgtctggagagtttgtcaaagaccaagtgcttgctttggatcattgctctctaagattaagtgacttggcaaaaagttatgaccttcttgctgcatcccatatggacctggagcgacatggctcaagtagtatagccaggcttgctttcatgtgctcacttttggcattttgtactgcatattctgtttatttctcaaaggcatgtaactacgtagagtactgcaagcttccaaagaggttttcccatgcttcaatcctacaagatttgtatggaagagtagatgggtctgactggcaggttgtttcccagctgcgacagtttatgtccacttcttttgacgaacttgacagcttacagtccagcacatggatcagtggttcatgtaatctggagaaggatttgtattctctttgtcattttgctgtggcatctttgcttggtgtatgtgatagtgctgaagctgaaaaaatacaaaatggagaggattgtttatctgctttgcaaggaggattgcaagtgttgtccagcatcttgcagaagtatttggaattgccttttgtggttcccaagtactttttcagagtaaagccttgccttggtgctgaactttacatatttgattcaaatcatttgaatgaaaaaggaatgtctatagagcctggttttctattgtctctaaccctctgcatgaagtggaagtgtgtgttagaaagaagcaccattcgcatcgtgaaattgtactgcattttggccgcaagcttagagacctgcttggatacagcaggaacaagaagcaagcagtttgatcagcacaggaccgctgaaatggtcgaattgaactccaagctgctacagtacataaagaatgatctgaggaaggctaggaatgagaagaagaattcccatagtgtcatggagatggtgactgcctttgcatgctttgaaccaacagatagtgggcaggggttctcaggatgcctgctggatgtctcctcgttccctgaaggctcttatcagataaagtggcaggcgtgctgtgtcgatgagaatgggtcctattttagtctcctgcccctgaacgatggttccatattttctgtccagaagtcctaactctaactgaatggccgctgcggttatgggaatggaagatggaacatactcttcttgctcgcagtgtctgttcctgagttcatttttatgcacacagaaggcttgtgtgtctatgatccgcctatatggtctgggtttgacatgttcactctattacttgtgttgtggcagtaaattacagaggcctggtgctgaggcttgtaggcagcatgaactgatgaatgagcagatgttgctgctgatcttcaccttgctgctattctgaacagaatcagcactagcagataacatagatcgtttgatgaattgacacaggtgtagctccaccttttcctattctgaatttgactttctaatggctttagttgagttttagttgagtttcaacttgtgtagaagcagtacaggttccagttcccctgtaacttgtagtttagagaaaaatagtatagtgctactcctacacggctagtacaaggcaatggctctgagcttctggatacaattttggatagtactatttatcatactttaactcgaattcgagtagaaatacatatattgtcgaatactaatgcaaaatggatatcgtaaatttgaatccaaattcagatgtctaaattttgaagataacatgttttttattgatagtttcgtagtctaataaaatcatcatagatgaaggaatttaaaacatagctatacaacaccgtgtataaagacaactaaaatattttaataattaaatatataaaatagaagaaaattatagataatataaattgagtactaaattcaaataaattttagaagtatataaataaaacaaaatactaatttagctgctttatccatctgtccctgccgtggatctgtttgtttagtgtttgcatgcgtgcacaactgcttgctgattccaaattaatcacatcaccaactccctatcggcatgtagtgcctccctccctttgtttgtttgggatcgaattgggcactgatacacaccactgatgcttgatatgcagtgctcccttcgtttgcattgccgcctatataggtcccatagttaacttcgtgtgctccctttcattctcctatggcagaaccggtttaccaccttccgtttgctagaaacggggaccaatttatcaatgttattatacaaatgactgggtgtgctgtcaattatataatatttgggattacttgaatcacttctatgtcacatttatcagccagaggcagatgtttttcagctggttaatgtgcattctctgtctctgtgggcaacctgaccgatgacaattcacattgtacacctgtttgtagcgctgattattcttttaatgcagattgtgtataggcctggcgaaaaattgaatctacgagatttccagtatcctgtaaataacgtatctcatatctctggatgactttattgctgaccaacctggtggatctctgactactggaggatgcaacagaacagagtgttgctgtggattttataatgttggaagtagaagctgcattcatgtgcgatggtgcttctaaaatgccaattcttttgtaaacagaatttgtgatcttgaaaactttgtggtacggagatacaattctggtaatgagacccaaggtcatgggctagtgaagagatggttagaacttagaagagcttaaggatgacaaggaggatacactgtaagctgtatttgtgtttagagatcacattatcgattctgttaaacacatatattgcaacatgtatgcatcagcagaccagatagctgatggttttccaccttgccaggcatgcaagtaccgtggtcaccctattgagcttgtcaccccaaataacgcaaaatggacttgtccaataaatgaacagcttgcagcttctgatgttactgacactgctgtgagaattgaagaacaaacagtgttgtttctgcctacttcggaagacagtccaaacttgcagggagcctctgcggttgggttgatagcccagtggtgaaggcggcgttgtccctttcaccaggtcaggggttcgaccgttggttccgcacccataaaaaaaatcccctcactgtcccgcctgctcttggggatcgatgtcctgtgcgccaccttccgtttgggccgctgcagagtggacagttgtactcgggccgttagtgatgtgggccaaggttcagaggttttctcagccaggaccagtggtttgggtcctttagtattataccacaagagcggtcattcccttcccggccgttttttttgcagtgagcctctccttccatttcttttgatgtaattgatagcctcaacaaacgaaggagtcataatggggaggttttatgttgtgattcccagttcaaacgatgttgaagcttctctaactgatgagagctcagatgggaacactcaaattttctatggtctatatgaaacccttttcgagcttgaccagggacttgtttgctcctcatcatgcaatattggaaagatgaaaattggaactcttcagtgttactacctactatcttcttgaacaatctgaaaaaggaccagtgctccccctgtcagggacggatctagcggtgggtgggcggggctcgagtctccctaccgtttcggatcccatgaagccccactacagtctcctctaatctaaaatgtatacaatataatgtagaatgagcttttatactgcagcaatttagttcagtccctcctaaacttttttctggctctgtccctgcccctgttctattttgatttgtgatgtagtgagagacatattttttatttttgtgaaatgtatatttcaccgcttgtagtaagtagcctaaaaccatattggattggattcctaccgctgaataactatctttgtcataatgcttgtacttcagatgcttataagttgccagaatagaaagtattccctccgtcctaaaatacaatttgttttagactaaatatacattcattcaataacctatgaatatagtttataggtatgtctatatacattcattcattcggggacataaaaaagagagctagaaagaactataactatattttgatacagagggagtattttgtggtctgttattggaacatatcatgctgcaattttgtggtctgttattggaacatatcatgctgcagaggcttgctggatttgaagagatattgcctctcctagacgtgactcgagattgcagctctaaggttaccatggatgagaaggcttcaaggattctggagaggctggagcccccaagggcgaagaaacagagagcgagcttcagcaaggccagcacaaacgc

SEQ ID NO: 3793 - DNA, 6838 bp, Zea Mays
ttggagcggattccagcggcatccgccatggactggagcatcgacctcgacaggggtctccgctcccgccaaccagcaacgcgcgtccgcgccgtcgacgccgccggcccacgcctccgccagctctgcacttgcgccaccgcccccgcgcccgtcgcctccgcgtacggcgtcttgcccggggaggcgcgcgtcttcgcggagaccatgctcctccgcctcgccaccgaattcaggagcgccgacgtcgccatgcgggtccgcatcatcaagaccctcctcaattctgccacgggtccaggggcgctagccggggcgcgcatcacggagcctgaccagctgctcaggagggtcaaggtggtctacgacactgggaacaagcgggacagggcgcttgcactgcgcatgttcgggtgcttcgccgacatcgccaaggacagcgtgcacgtccgctctctcatactttccagtttgagtgcctccagtgctttggaggtcaaggctgcaatttttgcggctagttgcatttgtcatctgtcagatgacttctcaaggataattcttgaagtgttcagaagattgatatgttctcagacatcagagccacaagtcatcatgtcagcagctaaggctttctggaagcttggttctacgttggctgttatccataaagttcatgaggttggaaaacagatggttctaggcacactggaagacgtcttcaaatctgaaatgctcttttcactctcaagactgtcatccaagtcgatcattttgttttctgaccaggtggatttattgttactgtttatggatcataattcctcttctatgaagtctgtggcgttaaaatgcatgtgttttatgtttcggagaaatatctgccattttccagttattaggaatgtttttggcagattgtttccattaattgatgatgaggattttccacttgactgtaagagcgatgtgttaaggattctgcagaagatgttatgcagtaaaacgtcaagtaatcatcgtgccaatggttctgagttatctaagctacttctagctgctgaaagttctttagattcttcttgtttggaggtgcaaggtaccgctctggaaattcttgtggaaatcttttgtattctcaaggaagttgggtcagataacatatcagttctcaagggttcgtcatttgcacatgctgagtggcaaggaataacgaacaatgtaccattaactgaagataatagtatgaacggacctctgtgtaagatcattgcaatgattgtgaatcatattatatccctggccaatgaagttgctagcagagatatctgcatatcatctgcagtggataaggcatacaaaactcctttcagacttatgctaaagcttgtttcatgctacccttctgctgctgctgtaactcttcatatactgaaaagccttgtaaaagaactgtttctaattaatggaagtgattactctgaagtttctgttacatctgttgaaccattccagacaagtgttgcccttaaagaattgagtacttcagatgacaatgttcaactgttagctacatgcatcaaagcttcctgcattggaacacttattggcaatggaaaactggattttctcaaaattgattgcaagaatagaaagtccataatgcatgatctaatttgttgcatgctcaaatttgcaaatgcttgtcatgaggtgctatgtgaaacatctggtgctagatacaatcttcatgatagcatcaagggtctaatcaagtatgtgcgtcaggatgcccctcagcactggagcacatatgaatccttccatttgataatgtgtgcttgtgttacccggaatacttgtaaaatcaatcgtggtaatcaagaatctggtgattcaaaagagcatcataatacactattcactccttctgtttggataactcaggaattatgtgcacttcgaatgaccaaaatgcttataaagaagcagaaatactgggaagcttataggtcttctatgtactgttgttgtaaaggtctttggttcacagcttcttttgtcttcagaaaactggcagatgcttttgaagcaggctctttcagtttttggctcaaatcgttgctacttttttctgctggcgaaattgagatgaagctattgtttttttcctcagcaactataaagttagttggtgagctaaaaatggagggtgatttaagtgaggatctttactgtaatgaaacagatgctgatagcaccctcagtagatcatcagagttacatggtttccaagcaaagatatctgatatttgtggcagaacattattagcaaataatgctcttgcatccagtgcctcttcagatcatgacttcgtattccagaggtggttcatcagccttaggtcatcatttcttgaggtcctaacaaaagttcttgatatccttaatgcacactcttcctatgaagcaagaggagaccatttatctttgtctggagagtttgtcaaagaccaagtgcttgctttggatcattgctctctaagattaagtgacttggcaaaaagttatgaccttcttgctgcatcccatatggacctggagcgacatggctcaagtagtatagccaggcttgctttcatgtgctcacttttggcattttgtactgcatattctgtttatttctcaaaggcatgtaactacgtagagtactgcaagcttccaaagaggttttcccatgcttcaatcctacaagatttgtatggaagagtagatgggtctgactggcaggttgtttcccagctgcgacagtttatgtccacttcttttgacgaacttgacagcttacagtccagcacatggatcagtggttcatgtaatctggagaaggatttgtattctctttgtcattttgctgtggcatctttgcttggtgtatgtgatagtgctgaagctgaaaaaatacaaaatggagaggattgtttatctgctttgcaaggaggattgcaagtgttgtccagcatcttgcagaagtatttggaattgccttttgtggttcccaagtactttttcagagtaaagccttgccttggtgctgaactttacatatttgattcaaatcatttgaatgaaaaaggaatgtctatagagcctggttttctattgtctctaaccctctgcatgaagtggaagtgtgtgttagaaagaagcaccattcgcatcgtgaaattgtactgcattttggccgcaagcttagagacctgcttggatacagcaggaacaagaagcaagcagtttgatcagcacaggaccgctgaaatggtcgaattgaactccaagctgctacagtacataaagaatgatctgaggaaggctaggaatgagaagaagaattcccatagtgtcatggagatggtgactgcctttgcatgctttgaaccaacagatagtgggcaggggttctcaggatgcctgctggatgtctcctcgttccctgaaggctcttatcagataaagtggcaggcgtgctgtgtcgatgagaatgggtcctattttagtctcctgcccctgaacgatggttccatattttctgtccagaagtcctaactctaactgaatggccgctgcggttatgggaatggaagatggaacatactcttcttgctcgcagtgtctgttcctgagttcatttttatgcacacagaaggcttgtgtgtctatgatccgcctatatggtctgggtttgacatgttcactctattacttgtgttgtggcagtaaattacagaggcctggtgctgaggcttgtaggcagcatgaactgatgaatgagcagatgttgctgctgatcttcaccttgctgctattctgaacagaatcagcactagcagataacatagatcgtttgatgaattgacacaggtgtagctccaccttttcctattctgaatttgactttctaatggctttagttgagttttagttgagtttcaacttgtgtagaagcagtacaggttccagttcccctgtaacttgtagtttagagaaaaatagtatagtgctactcctacacggctagtacaaggcaatggctctgagcttctggatacaattttggatagtactatttatcatactttaactcgaattcgagtagaaatacatatattgtcgaatactaatgcaaaatggatatcgtaaatttgaatccaaattcagatgtctaaattttgaagataacatgttttttattgatagtttcgtagtctaataaaatcatcatagatgaaggaatttaaaacatagctatacaacaccgtgtataaagacaactaaaatattttaataattaaatatataaaatagaagaaaattatagataatataaattgagtactaaattcaaataaattttagaagtatataaataaaacaaaatactaatttagctgctttatccatctgtccctgccgtggatctgtttgtttagtgtttgcatgcgtgcacaactgcttgctgattccaaattaatcacatcaccaactccctatcggcatgtagtgcctccctccctttgtttgtttgggatcgaattgggcactgatacacaccactgatgcttgatatgcagtgctcccttcgtttgcattgccgcctatataggtcccatagttaacttcgtgtgctccctttcattctcctatggcagaaccggtttaccaccttccgtttgctagaaacggggaccaatttatcaatgttattatacaaatgactgggtgtgctgtcaattatataatatttgggattacttgaatcacttctatgtcacatttatcagccagaggcagatgtttttcagctggttaatgtgcattctctgtctctgtgggcaacctgaccgatgacaattcacattgtacacctgtttgtagcgctgattattcttttaatgcagattgtgtataggcctggcgaaaaattgaatctacgagatttccagtatcctgtaaataacgtatctcatatctctggatgactttattgctgaccaacctggtggatctctgactactggaggatgcaacagaacagagtgttgctgtggattttataatgttggaagtagaagctgcattcatgtgcgatggtgcttctaaaatgccaattcttttgtaaacagaatttgtgatcttgaaaactttgtggtacggagatacaattctggtaatgagacccaaggtcatgggctagtgaagagatggttagaacttagaagagcttaaggatgacaaggaggatacactgcatgcaagtaccgtggtcaccctattgagcttgtcaccccaaataacgcaaaatggacttgtccaataaatgaacagcttgcagcttctgatgttactgacactgctgtgagaattgaagaacaaacagtgttgtttctgcctacttcggaagacagtccaaacttgcagggagcctctgcggttgggttgatagcccagtggtgaaggcggcgttgtccctttcaccaggtcaggggttcgaccgttggttccgcacccataaaaaaaatcccctcactgtcccgcctgctcttggggatcgatgtcctgtgcgccaccttccgtttgggccgctgcagagtggacagttgtactcgggccgttagtgatgtgggccaaggttcagaggttttctcagccaggaccagtggtttgggtcctttagtattataccacaagagcggtcattcccttcccggccgttttttttgcagtgagcctctccttccatttcttttgatgtaattgatagcctcaacaaacgaaggagtcataatggggaggttttatgttgtgattcccagttcaaacgatgttgaagcttctctaactgatgagagctcagatgggaacactcaaattttctatggtctatatgaaacccttttcgagcttgaccagggacttgtttgctcctcatcatgcaatattggaaagatgaaaattggaactcttcagtgttactacctactatcttcttgaacaatctgaaaaaggaccagtgctccccctgtcagggacggatctagcggtgggtgggcggggctcgagtctccctaccgtttcggatcccatgaagccccactacagtctcctctaatctaaaatgtatacaatataatgtagaatgagcttttatactgcagcaatttagttcagtccctcctaaacttttttctggctctgtccctgcccctgttctattttgatttgtgatgtagtgagagacatattttttatttttgtgaaatgtatatttcaccgcttgtagtaagtagcctaaaaccatattggattggattcctaccgctgaataactatctttgtcataatgcttgtacttcagatgcttataagttgccagaatagaaagtattccctccgtcctaaaatacaatttgttttagactaaatatacattcattcaataacctatgaatatagtttataggtatgtctatatacattcattcattcggggacataaaaaagagagctagaaagaactataactatattttgatacagagggagtattttgtggtctgttattggaacatatcatgctgcaattttgtggtctgttattggaacatatcatgctgcagaggcttgctggatttgaagagatattgcctctcctagacgtgactcgagattgcagctctaaggttaccatggatgagaaggcttcaaggattctggagaggctggagcccccaagggcgaagaaacagagagcgagcttcagcaaggccagcacaaacgc

SEQ ID NO: 3794 - DNA, 6893 bp, Zea Mays
ttggagcggattccagcggcatccgccatggactggagcatcgacctcgacaggggtctccgctcccgccaaccagcaacgcgcgtccgcgccgtcgacgccgccggcccacgcctccgccagctctgcacttgcgccaccgcccccgcgcccgtcgcctccgcgtacggcgtcttgcccggggaggcgcgcgtcttcgcggagaccatgctcctccgcctcgccaccgaattcaggagcgccgacgtcgccatgcgggtccgcatcatcaagaccctcctcaattctgccacgggtccaggggcgctagccggggcgcgcatcacggagcctgaccagctgctcaggagggtcaaggtggtctacgacactgggaacaagcgggacagggcgcttgcactgcgcatgttcgggtgcttcgccgacatcgccaaggacagcgtgcacgtcaaggctgcaatttttgcggctagttgcatttgtcatctgtcagatgacttctcaaggataattcttgaagtgttcagaagattgatatgttctcagacatcagagccacaagtcatcatgtcagcagctaaggctttctggaagcttggttctacgttggctgttatccataaagttcatgaggttggaaaacagatggttctaggcacactggaagacgtcttcaaatctgaaatgctcttttcactctcaagactgtcatccaagtcgatcattttgttttctgaccaggtggatttattgttactgtttatggatcataattcctcttctatgaagtctgtggcgttaaaatgcatgtgttttatgtttcggagaaatatctgccattttccagttattaggaatgtttttggcagattgtttccattaattgatgatgaggattttccacttgactgtaagagcgatgtgttaaggattctgcagaagatgttatgcagtaaaacgtcaagtaatcatcgtgccaatggttctgagttatctaagctacttctagctgctgaaagttctttagattcttcttgtttggaggtgcaaggtaccgctctggaaattcttgtggaaatcttttgtattctcaaggaagttgggtcagataacatatcagttctcaagggttcgtcatttgcacatgctgagtggcaaggaataacgaacaatgtaccattaactgaagataatagtatgaacggacctctgtgtaagatcattgcaatgattgtgaatcatattatatccctggccaatgaagttgctagcagagatatctgcatatcatctgcagtggataaggcatacaaaactcctttcagacttatgctaaagcttgtttcatgctacccttctgctgctgctgtaactcttcatatactgaaaagccttgtaaaagaactgtttctaattaatggaagtgattactctgaagtttctgttacatctgttgaaccattccagacaagtgttgcccttaaagaattgagtacttcagatgacaatgttcaactgttagctacatgcatcaaagcttcctgcattggaacacttattggcaatggaaaactggattttctcaaaattgattgcaagaatagaaagtccataatgcatgatctaatttgttgcatgctcaaatttgcaaatgcttgtcatgaggtgctatgtgaaacatctggtgctagatacaatcttcatgatagcatcaagggtctaatcaagtatgtgcgtcaggatgcccctcagcactggagcacatatgaatccttccatttgataatgtgtgcttgtgttacccggaatacttgtaaaatcaatcgtggtaatcaagaatctggtgattcaaaagagcatcataatacactattcactccttctgtttggataactcaggaattatgtgcacttcgaatgaccaaaatgcttataaagaagcagaaatactgggaagcttataggtcttctatgtactgttgttgtaaaggtctttggttcacagcttcttttgtcttcagaaaactggcagatgcttttgaagcaggctctttcagtttttggctcaaatcgttgctacttttttctgctggcgaaattgagatgaagctattgtttttttcctcagcaactataaagttagttggtgagctaaaaatggagggtgatttaagtgaggatctttactgtaatgaaacagatgctgatagcaccctcagtagatcatcagagttacatggtttccaagcaaagatatctgatatttgtggcagaacattattagcaaataatgctcttgcatccagtgcctcttcagatcatgacttcgtattccagaggtggttcatcagccttaggtcatcatttcttgaggtcctaacaaaagttcttgatatccttaatgcacactcttcctatgaagcaagaggagaccatttatctttgtctggagagtttgtcaaagaccaagtgcttgctttggatcattgctctctaagattaagtgacttggcaaaaagttatgaccttcttgctgcatcccatatggacctggagcgacatggctcaagtagtatagccaggcttgctttcatgtgctcacttttggcattttgtactgcatattctgtttatttctcaaaggcatgtaactacgtagagtactgcaagcttccaaagaggttttcccatgcttcaatcctacaagatttgtatggaagagtagatgggtctgactggcaggttgtttcccagctgcgacagtttatgtccacttcttttgacgaacttgacagcttacagtccagcacatggatcagtggttcatgtaatctggagaaggatttgtattctctttgtcattttgctgtggcatctttgcttggtgtatgtgatagtgctgaagctgaaaaaatacaaaatggagaggattgtttatctgctttgcaaggaggattgcaagtgttgtccagcatcttgcagaagtatttggaattgccttttgtggttcccaagtactttttcagagtaaagccttgccttggtgctgaactttacatatttgattcaaatcatttgaatgaaaaaggaatgtctatagagcctggttttctattgtctctaaccctctgcatgaagtggaagtgtgtgttagaaagaagcaccattcgcatcgtgaaattgtactgcattttggccgcaagcttagagacctgcttggatacagcaggaacaagaagcaagcagtttgatcagcacaggaccgctgaaatggtcgaattgaactccaagctgctacagtacataaagaatgatctgaggaaggctaggaatgagaagaagaattcccatagtgtcatggagatggtgactgcctttgcatgctttgaaccaacagatagtgggcaggggttctcaggatgcctgctggatgtctcctcgttccctgaaggctcttatcagataaagtggcaggcgtgctgtgtcgatgagaatgggtcctattttagtctcctgcccctgaacgatggttccatattttctgtccagaagtcctaactctaactgaatggccgctgcggttatgggaatggaagatggaacatactcttcttgctcgcagtgtctgttcctgagttcatttttatgcacacagaaggcttgtgtgtctatgatccgcctatatggtctgggtttgacatgttcactctattacttgtgttgtggcagtaaattacagaggcctggtgctgaggcttgtaggcagcatgaactgatgaatgagcagatgttgctgctgatcttcaccttgctgctattctgaacagaatcagcactagcagataacatagatcgtttgatgaattgacacaggtgtagctccaccttttcctattctgaatttgactttctaatggctttagttgagttttagttgagtttcaacttgtgtagaagcagtacaggttccagttcccctgtaacttgtagtttagagaaaaatagtatagtgctactcctacacggctagtacaaggcaatggctctgagcttctggatacaattttggatagtactatttatcatactttaactcgaattcgagtagaaatacatatattgtcgaatactaatgcaaaatggatatcgtaaatttgaatccaaattcagatgtctaaattttgaagataacatgttttttattgatagtttcgtagtctaataaaatcatcatagatgaaggaatttaaaacatagctatacaacaccgtgtataaagacaactaaaatattttaataattaaatatataaaatagaagaaaattatagataatataaattgagtactaaattcaaataaattttagaagtatataaataaaacaaaatactaatttagctgctttatccatctgtccctgccgtggatctgtttgtttagtgtttgcatgcgtgcacaactgcttgctgattccaaattaatcacatcaccaactccctatcggcatgtagtgcctccctccctttgtttgtttgggatcgaattgggcactgatacacaccactgatgcttgatatgcagtgctcccttcgtttgcattgccgcctatataggtcccatagttaacttcgtgtgctccctttcattctcctatggcagaaccggtttaccaccttccgtttgctagaaacggggaccaatttatcaatgttattatacaaatgactgggtgtgctgtcaattatataatatttgggattacttgaatcacttctatgtcacatttatcagccagaggcagatgtttttcagctggttaatgtgcattctctgtctctgtgggcaacctgaccgatgacaattcacattgtacacctgtttgtagcgctgattattcttttaatgcagattgtgtataggcctggcgaaaaattgaatctacgagatttccagtatcctgtaaataacgtatctcatatctctggatgactttattgctgaccaacctggtggatctctgactactggaggatgcaacagaacagagtgttgctgtggattttataatgttggaagtagaagctgcattcatgtgcgatggtgcttctaaaatgccaattcttttgtaaacagaatttgtgatcttgaaaactttgtggtacggagatacaattctgagacccaaggtcatgggctagtgaagagatggttagaacttagaagagcttaaggatgacaaggaggatacactgtaagctgtatttgtgtttagagatcacattatcgattctgttaaacacatatattgcaacatgtatgcatcagcagaccagatagctgatggttttccaccttgccaggcatgcaagtaccgtggtcaccctattgagcttgtcaccccaaataacgcaaaatggacttgtccaataaatgaacagcttgcagcttctgatgttactgacactgctgtgagaattgaagaacaaacagtgttgtttctgcctacttcggaagacagtccaaacttgcagggagcctctgcggttgggttgatagcccagtggtgaaggcggcgttgtccctttcaccaggtcaggggttcgaccgttggttccgcacccataaaaaaaatcccctcactgtcccgcctgctcttggggatcgatgtcctgtgcgccaccttccgtttgggccgctgcagagtggacagttgtactcgggccgttagtgatgtgggccaaggttcagaggttttctcagccaggaccagtggtttgggtcctttagtattataccacaagagcggtcattcccttcccggccgttttttttgcagtgagcctctccttccatttcttttgatgtaattgatagcctcaacaaacgaaggagtcataatggggaggttttatgttgtgattcccagttcaaacgatgttgaagcttctctaactgatgagagctcagatgggaacactcaaattttctatggtctatatgaaacccttttcgagcttgaccagggacttgtttgctcctcatcatgcaatattggaaagatgaaaattggaactcttcagtgttactacctactatcttcttgaacaatctgaaaaaggaccagtgctccccctgtcagggacggatctagcggtgggtgggcggggctcgagtctccctaccgtttcggatcccatgaagccccactacagtctcctctaatctaaaatgtatacaatataatgtagaatgagcttttatactgcagcaatttagttcagtccctcctaaacttttttctggctctgtccctgcccctgttctattttgatttgtgatgtagtgagagacatattttttatttttgtgaaatgtatatttcaccgcttgtagtaagtagcctaaaaccatattggattggattcctaccgctgaataactatctttgtcataatgcttgtacttcagatgcttataagttgccagaatagaaagtattccctccgtcctaaaatacaatttgttttagactaaatatacattcattcaataacctatgaatatagtttataggtatgtctatatacattcattcattcggggacataaaaaagagagctagaaagaactataactatattttgatacagagggagtattttgtggtctgttattggaacatatcatgctgcaattttgtggtctgttattggaacatatcatgctgcagaggcttgctggatttgaagagatattgcctctcctagacgtgactcgagattgcagctctaaggttaccatggatgagaaggcttcaaggattctggagaggctggagcccccaagggcgaagaaacagagagcgagcttcagcaaggccagcacaaacgc

SEQ ID NO: 3795 - DNA, 6947 bp, Zea Mays
ttggagcggattccagcggcatccgccatggactggagcatcgacctcgacaggggtctccgctcccgccaaccagcaacgcgcgtccgcgccgtcgacgccgccggcccacgcctccgccagctctgcacttgcgccaccgcccccgcgcccgtcgcctccgcgtacggcgtcttgcccggggaggcgcgcgtcttcgcggagaccatgctcctccgcctcgccaccgaattcaggagcgccgacgtcgccatgcgggtccgcatcatcaagaccctcctcaattctgccacgggtccaggggcgctagccggggcgcgcatcacggagcctgaccagctgctcaggagggtcaaggtggtctacgacactgggaacaagcgggacagggcgcttgcactgcgcatgttcgggtgcttcgccgacatcgccaaggacagcgtgcacgtccgctctctcatactttccagtttgagtgcctccagtgctttggaggtcaaggctgcaatttttgcggctagttgcatttgtcatctgtcagatgacttctcaaggataattcttgaagtgttcagaagattgatatgttctcagacatcagagccacaagtcatcatgtcagcagctaaggctttctggaagcttggttctacgttggctgttatccataaagttcatgaggttggaaaacagatggttctaggcacactggaagacgtcttcaaatctgaaatgctcttttcactctcaagactgtcatccaagtcgatcattttgttttctgaccaggtggatttattgttactgtttatggatcataattcctcttctatgaagtctgtggcgttaaaatgcatgtgttttatgtttcggagaaatatctgccattttccagttattaggaatgtttttggcagattgtttccattaattgatgatgaggattttccacttgactgtaagagcgatgtgttaaggattctgcagaagatgttatgcagtaaaacgtcaagtaatcatcgtgccaatggttctgagttatctaagctacttctagctgctgaaagttctttagattcttcttgtttggaggtgcaaggtaccgctctggaaattcttgtggaaatcttttgtattctcaaggaagttgggtcagataacatatcagttctcaagggttcgtcatttgcacatgctgagtggcaaggaataacgaacaatgtaccattaactgaagataatagtatgaacggacctctgtgtaagatcattgcaatgattgtgaatcatattatatccctggccaatgaagttgctagcagagatatctgcatatcatctgcagtggataaggcatacaaaactcctttcagacttatgctaaagcttgtttcatgctacccttctgctgctgctgtaactcttcatatactgaaaagccttgtaaaagaactgtttctaattaatggaagtgattactctgaagtttctgttacatctgttgaaccattccagacaagtgttgcccttaaagaattgagtacttcagatgacaatgttcaactgttagctacatgcatcaaagcttcctgcattggaacacttattggcaatggaaaactggattttctcaaaattgattgcaagaatagaaagtccataatgcatgatctaatttgttgcatgctcaaatttgcaaatgcttgtcatgaggtgctatgtgaaacatctggtgctagatacaatcttcatgatagcatcaagggtctaatcaagtatgtgcgtcaggatgcccctcagcactggagcacatatgaatccttccatttgataatgtgtgcttgtgttacccggaatacttgtaaaatcaatcgtggtaatcaagaatctggtgattcaaaagagcatcataatacactattcactccttctgtttggataactcaggaattatgtgcacttcgaatgaccaaaatgcttataaagaagcagaaatactgggaagcttataggtcttctatgtactgttgttgtaaaggtctttggttcacagcttcttttgtcttcagaaaactggcagatgcttttgaagcaggctctttcagtttttggctcaaatcgttgctacttttttctgctggcgaaattgagatgaagctattgtttttttcctcagcaactataaagttagttggtgagctaaaaatggagggtgatttaagtgaggatctttactgtaatgaaacagatgctgatagcaccctcagtagatcatcagagttacatggtttccaagcaaagatatctgatatttgtggcagaacattattagcaaataatgctcttgcatccagtgcctcttcagatcatgacttcgtattccagaggtggttcatcagccttaggtcatcatttcttgaggtcctaacaaaagttcttgatatccttaatgcacactcttcctatgaagcaagaggagaccatttatctttgtctggagagtttgtcaaagaccaagtgcttgctttggatcattgctctctaagattaagtgacttggcaaaaagttatgaccttcttgctgcatcccatatggacctggagcgacatggctcaagtagtatagccaggcttgctttcatgtgctcacttttggcattttgtactgcatattctgtttatttctcaaaggcatgtaactacgtagagtactgcaagcttccaaagaggttttcccatgcttcaatcctacaagatttgtatggaagagtagatgggtctgactggcaggttgtttcccagctgcgacagtttatgtccacttcttttgacgaacttgacagcttacagtccagcacatggatcagtggttcatgtaatctggagaaggatttgtattctctttgtcattttgctgtggcatctttgcttggtgtatgtgatagtgctgaagctgaaaaaatacaaaatggagaggattgtttatctgctttgcaaggaggattgcaagtgttgtccagcatcttgcagaagtatttggaattgccttttgtggttcccaagtactttttcagagtaaagccttgccttggtgctgaactttacatatttgattcaaatcatttgaatgaaaaaggaatgtctatagagcctggttttctattgtctctaaccctctgcatgaagtggaagtgtgtgttagaaagaagcaccattcgcatcgtgaaattgtactgcattttggccgcaagcttagagacctgcttggatacagcaggaacaagaagcaagcagtttgatcagcacaggaccgctgaaatggtcgaattgaactccaagctgctacagtacataaagaatgatctgaggaaggctaggaatgagaagaagaattcccatagtgtcatggagatggtgactgcctttgcatgctttgaaccaacagatagtgggcaggggttctcaggatgcctgctggatgtctcctcgttccctgaaggctcttatcagataaagtggcaggcgtgctgtgtcgatgagaatgggtcctattttagtctcctgcccctgaacgatggttccatattttctgtccagaagtcctaactctaactgaatggccgctgcggttatgggaatggaagatggaacatactcttcttgctcgcagtgtctgttcctgagttcatttttatgcacacagaaggcttgtgtgtctatgatccgcctatatggtctgggtttgacatgttcactctattacttgtgttgtggcagtaaattacagaggcctggtgctgaggcttgtaggcagcatgaactgatgaatgagcagatgttgctgctgatcttcaccttgctgctattctgaacagaatcagcactagcagataacatagatcgtttgatgaattgacacaggtgtagctccaccttttcctattctgaatttgactttctaatggctttagttgagttttagttgagtttcaacttgtgtagaagcagtacaggttccagttcccctgtaacttgtagtttagagaaaaatagtatagtgctactcctacacggctagtacaaggcaatggctctgagcttctggatacaattttggatagtactatttatcatactttaactcgaattcgagtagaaatacatatattgtcgaatactaatgcaaaatggatatcgtaaatttgaatccaaattcagatgtctaaattttgaagataacatgttttttattgatagtttcgtagtctaataaaatcatcatagatgaaggaatttaaaacatagctatacaacaccgtgtataaagacaactaaaatattttaataattaaatatataaaatagaagaaaattatagataatataaattgagtactaaattcaaataaattttagaagtatataaataaaacaaaatactaatttagctgctttatccatctgtccctgccgtggatctgtttgtttagtgtttgcatgcgtgcacaactgcttgctgattccaaattaatcacatcaccaactccctatcggcatgtagtgcctccctccctttgtttgtttgggatcgaattgggcactgatacacaccactgatgcttgatatgcagtgctcccttcgtttgcattgccgcctatataggtcccatagttaacttcgtgtgctccctttcattctcctatggcagaaccggtttaccaccttccgtttgctagaaacggggaccaatttatcaatgttattatacaaatgactgggtgtgctgtcaattatataatatttgggattacttgaatcacttctatgtcacatttatcagccagaggcagatgtttttcagctggttaatgtgcattctctgtctctgtgggcaacctgaccgatgacaattcacattgtacacctgtttgtagcgctgattattcttttaatgcagattgtgtataggcctggcgaaaaattgaatctacgagatttccagtatcctgtaaataacgtatctcatatctctggatgactttattgctgaccaacctggtggatctctgactactggaggatgcaacagaacagagtgttgctgtggattttataatgttggaagtagaagctgcattcatgtgcgatggtgcttctaaaatgccaattcttttgtaaacagaatttgtgatcttgaaaactttgtggtacggagatacaattctggtaatgagacccaaggtcatgggctagtgaagagatggttagaacttagaagagcttaaggatgacaaggaggatacactgtaagctgtatttgtgtttagagatcacattatcgattctgttaaacacatatattgcaacatgtatgcatcagcagaccagatagctgatggttttccaccttgccaggcatgcaagtaccgtggtcaccctattgagcttgtcaccccaaataacgcaaaatggacttgtccaataaatgaacagcttgcagcttctgatgttactgacactgctgtgagaattgaagaacaaacagtgttgtttctgcctacttcggaagacagtccaaacttgcagggagcctctgcggttgggttgatagcccagtggtgaaggcggcgttgtccctttcaccaggtcaggggttcgaccgttggttccgcacccataaaaaaaatcccctcactgtcccgcctgctcttggggatcgatgtcctgtgcgccaccttccgtttgggccgctgcagagtggacagttgtactcgggccgttagtgatgtgggccaaggttcagaggttttctcagccaggaccagtggtttgggtcctttagtattataccacaagagcggtcattcccttcccggccgttttttttgcagtgagcctctccttccatttcttttgatgtaattgatagcctcaacaaacgaaggagtcataatggggaggttttatgttgtgattcccagttcaaacgatgttgaagcttctctaactgatgagagctcagatgggaacactcaaattttctatggtctatatgaaacccttttcgagcttgaccagggacttgtttgctcctcatcatgcaatattggaaagatgaaaattggaactcttcagtgttactacctactatcttcttgaacaatctgaaaaaggaccagtgctccccctgtcagggacggatctagcggtgggtgggcggggctcgagtctccctaccgtttcggatcccatgaagccccactacagtctcctctaatctaaaatgtatacaatataatgtagaatgagcttttatactgcagcaatttagttcagtccctcctaaacttttttctggctctgtccctgcccctgttctattttgatttgtgatgtagtgagagacatattttttatttttgtgaaatgtatatttcaccgcttgtagtaagtagcctaaaaccatattggattggattcctaccgctgaataactatctttgtcataatgcttgtacttcagatgcttataagttgccagaatagaaagtattccctccgtcctaaaatacaatttgttttagactaaatatacattcattcaataacctatgaatatagtttataggtatgtctatatacattcattcattcggggacataaaaaagagagctagaaagaactataactatattttgatacagagggagtattttgtggtctgttattggaacatatcatgctgcaattttgtggtctgttattggaacatatcatgctgcagaggcttgctggatttgaagagatattgcctctcctagacgtgactcgagattgcagctctaaggttaccatggatgagaaggcttcaaggattctggagaggctggagcccccaagggcgaagaaacagagagcgagcttcagcaaggccagcacaaacgc

SEQ ID NO: 3796 - DNA, 1222 bp, Zea Mays
attctgttttaactgaaatagtttgtcgatttttgcgtgggaacaacaaatacatgatggtaccccttccatccaaaaaatgcaaggcctctatttgacaaacagtcgaactcttagtagaggcggtccagaggtcgttagtggatagtcaagaagagattcacagttgatgtcgaacaaataaaggaatccaataaacttactgcaacattgagaagggaaaatcctacatcagctacatgtataatcgaattatttgtataaacaagataggtacaggcagagcaattcggtagagagaagggagggtgcatgcttgcagcctcattagattactcagttactattttaggctgtcttattgcgccttcatagttggaagtagtatagattttaatcttctctgtatgagcttaatatacttttatttagcttcttgcaagcttgaatttcctggtgctcaaatgccacctgccacttttgtagtctctgctcggaactgtgttttcttactctaattatacatatacgttcatatagagatggaatcaccacccctcacggttgaagcgaccgcttttaccgagaaaatgatggacatgactttggatgtgaaagaaaaagaatcctggaggcaagaaaccccctaggcggccggtaaactctaagtctgaaggtttagggttttcatgctctcgactctgatagctaactcaggaacgaaccaatggtaacaattttcttcatttaatggtggattaaatgaaactatcttcggtctttggtacttgctcaacatctacaataagtaggtcagtggaacatatgtcctgtcaccgttagattgggcgatcgaaccatgaactgatattcaatgtaaaatattcagtgtgatagaaaaaagaagattagtcgagtatgatctttatttcaatctgccaatgctcttgcgtgtcaatggatgtttgcaaagacaacagatgccaatgcagactggcttcttcctaacaacaaacctcaacaagccaagagagacgacaattggcgacgtaggaaaaaagacgcattaatcaataacgtgtggattcctggcagtggcgtagacaaggggctctaaggtttgtacaaacatataaatacatattaattactactattttttaaatagttaagtatataaaaacagtgactgattcaataaagatttgttatttcttttgtt

SEQ ID NO: 3797 - DNA, 2707 bp, Zea Mays
ctacctctcccgtcgcacctcgccctctcccttgccctgccccagatctcggcctccagtcctcgctgccgccgcgacttgctcgccccgtctccctccggccctgcctcatcgcggccgtggtggccaaggaacacgagctcattggaaacactcttaaataaagcttcaatgaacaagacaggagctcgacttcgcctagctccgaacaagcggttgacgaggcggaggtctcgcgtcctacggatggcaaccgatagtgaagcctcgaaggcagctgaggttgtggttgactggcataaacaggacagcaagaggatgctccatgcagtttaccgtgttggggatctggaccgcacaatcaagtactacacagaatgctttgggatgaaactgctgaggaaaagggatgttcctgatgagaagtacaccaacgccttccttggctttgggccagagaacaccaactttgcagttgaattgaccaactttgcggaggtctcgcgtcctacgtgcgtcgcgccgttgcctggctccgtcctcgccgttcctctgtagaagctggccgctgacccccgccgtggtggccgtcgcgccgttttttattagatgaagaatgaatcaacccttgtagaagctaaagatagaagataacactactctgtttttgaatgtctgaagtgtaattttgcagccttgcaactataaaacaaacaatgtatggctaaattattgcagttgcacagtgtgaagatttaaaattgaagtgctatgaagagatggataagaggaagaaactttataatattgttcaagagacaaaaggaaattatcagggttttttgtcgatgccgacccttaagcaaaaatgaggtgtcatcaggcctgaatgcaaatggcggaacaactaaaaagacatttaagtttgatagagtattcacgccgaaggatgatcaaggtgtgggcgtctccggcggcccgactatacgaagcgagggcgtatcggggctaaggacacgaaaggccaagcgcaaagggcgtacggcagtaagcccgcctgcaccgcaccagaccgccacccgcgacgtgcccatgtcatgacgccacggtggcggcacgctgacccatcgacgtcaccctcttcctcgcttccgctcgacagcctccagtttcctggtcagtcttcgtgccgcctctctaccacacaccgtctctcagagatggaatcaccacccctcacggttgaagcgaccgcttttaccgagaaaatgatggacatgactttggaggatataatcaagatgtgaaagaaaaagaatcctggaggcaagaaaccccctaggcggccggtaaactctaagtctgaaggtttagggttttcatgctctcgactctgatagctaactcaggtatgtacaacattatcttattttcctattattaaattatctataaagctgctaggaaattacgcaacatttatatttctatatagagtagcttcttatgtccttaattgtaattagttatttaatttgatgattaccatcttgtaatatttgtataggaacgaaccaatggtaacaattttcttcatttaatggtggattaaatgaaactatcttcggtctttggtacttgctcaacatctacaataagtaggtcagtggaacatatgtcctgtcaccgttagattgggcgatcgaaccatggtacatcagtcaccttctttaatgatttttttgttctacttactaatctgctgctttactcttccctggtgtttgtactgacctttttaggaaatcttgcagaactgatattcaatgtaaaatattcagtgtgatagaaaaaagaagattagtcgagtatgatctttatttcaatctgccaatgctcttggtaattccagtttgcctaatagtcaacttgtttttttgtaatgttcgagcattcgctgaaattactgatcgtattcaaaattgttgctaaattgacgattaacccttgtttccatggatagcgagaggtgtgacgtggtatgtttatagctattgtgcagtatacaccttgcttacaggttgccacaactccgccggttggatccactaaacttccaatgtgtcctgtttgcattggtgtgcttacagttttgtatttttgtttcttagggcccacgccaccatgatgtcacatttcaattcattttgtgacctctgatgaagagatttaaacacatctgttctatcctatccatagttttaacttcaaatattgttctatttaatgccacaacaacatatatctttactatgtcatattatatatgattttgttggcttacaacctctcgatagggcgcccgaatgggcgcctcatgttctagttatatttatgacgtatcttatataattttccctccgtaatccatgcagcgtgtcaatggatgtttgcaaagacaacagatgccaatgcagactggcttcttcctaacaacaaacctcaacaagccaagagagacgacaattggcgacgtaggaaaaaagacgcattaatcaataacgtgtggattcctggcagtggcgtagacaaggggctctaaggtttgtacaaacatataaatacatattaattactactattttttaaatagttaagtatataaaaacagtgactgattcaataaagatttgttatttcttttgtt

SEQ ID NO: 3798 - DNA, 3392 bp, Zea Mays
ctacctctcccgtcgcacctcgccctctcccttgccctgccccagatctcggcctccagtcctcgctgccgccgcgacttgctcgccccgtctccctccggccctgcctcatcgcggccgtggtggccaaggaacacgagctcattggaaacactcttaaataaagcttcaatgaacaagacaggagctcgacttcgcctagctccgaacaagcggttgacgaggcggaggtctcgcgtcctacgtgcgtcgcgccgttgcctggctccgtcctcgccgttcctctgtagaagctggccgctgacccccgcccgcctccgcttggccgtctggccgccccccgcgtggtcacctagatggctggccgcgcccctagatttgggttcctaccttgttaggacttccatcttcgttcattttgctgtgtgtccgtcggatagatgactaatgcatcctcaaagttctccaaggcggagccttgcatctttgtgtgtttgatttggttgagctgcaacccgtgctgctgtccttttcagtataaaaaaagatttagatgtaggttggcattcggatgaaaaatggaccgtgaaaaaaaaggaggtccattcaccttgtgttctgtcatttgagcacggatcctttagtgtataggaaagcgtgatatttctgataatcttctgcttttcagagaaaagctttgagtaattgagatgtatattcctctattgaaagaaaaagaggggttttcaagcaatatgaaagcttgatgctttcgttcttcgttttatttaagatcactttcctcccttgttcttatgaaatgtgcaactctttaatcagggatggcaaccgatagtgaagcctcgaaggcagctgaggttgtggttgactggcataaacaggacagcaagaggatgctccatgcagtttaccgtgttggggatctggaccgcacaatcaagtactacacagaatgctttgggatgaaactgctgaggaaaagggatgttcctgatgagaagtacaccaacgccttccttggctttgggccagagaacaccaactttgcagttgaattgaccaactttgcggaggtctcgcgtcctacgtgcgtcgcgccgttgcctggctccgtcctcgccgttcctctgtagaagctggccgctgacccccgccgtggtggccgtcgcgccgttttttattagatgaagaatgaatcaacccttgtagaagctaaagatagaagataacactactctgtttttgaatgtctgaagtgtaattttgcagccttgcaactataaaacaaacaatgtatggctaaattattgcagttgcacagtgtgaagatttaaaattgaagtgctatgaagagatggataagaggaagaaactttataatattgttcaagagacaaaaggaaattatcagggttttttgtcgatgccgacccttaagcaaaaatgaggtgtcatcaggcctgaatgcaaatggcggaacaactaaaaagacatttaagtttgatagagtattcacgccgaaggatgatcaaggtgtgggcgtctccggcggcccgactatacgaagcgagggcgtatcggggctaaggacacgaaaggccaagcgcaaagggcgtacggcagtaagcccgcctgcaccgcaccagaccgccacccgcgacgtgcccatgtcatgacgccacggtggcggcacgctgacccatcgacgtcaccctcttcctcgcttccgctcgacagcctccagtttcctgagatggaatcaccacccctcacggttgaagcgaccgcttttaccgagaaaatgatggacatgactttggaggatataatcaagatgtgaaagaaaaagaatcctggaggcaagaaaccccctaggcggccggtaaactctaaggtctataactctggatgtgtggtggtgttgaaattagttttgtgtataactgttccaacttcaaatagcttcgttttaggtgctatgtttgggaataaattttccagttaaaagtacatgacgtccacgatggactttcttggttttccaaggctcagttacttgctgcgatatattcctttggtgaagttttgccgtgcaccatgtgtgtatcttcaagattaaactaaattttgcattattcatcggttttcttaattcttgtagttgaatagctttaacctgaaacaatacaccagtcgctttcgctgttgtttactttggtggatagtttctattgggaagtgatttgacaccagcaaaggcatttacttctcttttttatttgtagtctgaaggtttagggttttcatgctctcgactctgatagctaactcaggaacgaaccaatggtaacaattttcttcatttaatggtggattaaatgaaactatcttcggtctttggtacttgctcaacatctacaataagtaggtcagtggaacatatgtcctgtcaccgttagattgggcgatcgaaccatgaactgatattcaatgtaaaatattcagtgtgatagaaaaaagaagattagtcgagtatgatctttatttcaatctgccaatgctcttggtaattccagtttgcctaatagtcaacttgtttttttgtaatgttcgagcattcgctgaaattactgatcgtattcaaaattgttgctaaattgacgattaacccttgtttccatggatagcgagaggtgtgacgtggtatgtttatagctattgtgcagtatacaccttgcttacaggttgccacaactccgccggttggatccactaaacttccaatgtgtcctgtttgcattggtgtgcttacagttttgtatttttgtttcttagggcccacgccaccatgatgtcacatttcaattcattttgtgacctctgatgaagagatttaaacacatctgttctatcctatccatagttttaacttcaaatattgttctatttaatgccacaacaacatatatctttactatgtcatattatatatgattttgttggcttacaacctctcgatagggcgcccgaatgggcgcctcatgttctagttatatttatgacgtatcttatataattttccctccgtaatccatgcagcgtgtcaatggatgtttgcaaagacaacagatgccaatgcagactggcttcttcctaacaacaaacctcaacaagccaagagagacgacaattggcgacgtaggaaaaaagacgcattaatcaataacgtgtggattcctggcagtggcgtagacaaggggctctaaggtttgtacaaacatataaatacatattaattactactattttttaaatagttaagtatataaaaacagtgactgattcaataaagatttgttatttcttttgtt

SEQ ID NO: 3799 - DNA, 1734 bp, Zea Mays
aatttaggcaggaggtgatttgttcgtgccttcgtgggataatgggcagattaccacagttgatgaagctaaggaattctacccgttatttggccttggggctaatattgcccttatcttttctgggcgcactgtgaagtatttctcaaatttgcgcaagacattgggtcctggaattgatggctgggaagtatctttgaaaggaatgatgagcatagtcgtacttcttggacttgtcataacttccatctattggggagtaaacaaatttgttttgaatgatccttcacttccaaagtctgatcgtaagaagaaaaaggaaaagcctaaacttggcatgaaagagagtctgaaggttctgctctcctcgaggtatgtgagggatctagctaccctagtggttgcttatggcattagtatcaatcttgtcgaagtcacatggaaatcaaaactcaaggcacagttccctagtccaaatgaatactcatctttcatgggtgatttctcaaccgcaactggaattgcaactttcacgatgatgctgttaggacgtattatactacggaaatttggctggggtgtggccgcaatgatcacccccaccgttctgttgctaactggtgttggattcttctctctgattttgtttggacagccgctgactcctatgcttgccactatgggtatgacccccctactggcagccgtttatgtgggcgccatgcagaatatatttagcaagagtgcaaagtacagtttatttgacccatgcaaggagatggcttatattcctttggatgaagatatgaaggtaaaaggaaaggcagccattgatgttgtttgcaacccactgggcaagtccggcggtgcacttatccaacaattcatgatcctgacgttcggatccctggcgaattcaactccataccttgggggcatactgctggtcatcgttctcgcgtggctaggcgcggcgagctcattggacaagcagttctcgagcttggctaaggaggacctgaagaaggataaggctgcccgagagaaagtagaaccctcgctgctcaaggcgcctgcagagggcagtgatgatgtactggcggagcagacaaatggatctgtgacgccccaagcaaccggaacggagagctcgccgtcgaactcatcccccattcaataatagctccagcatcataagttgtactagctaggagagttattacagcgagcagaaataattggtactccctccggttttttttatatatttggcgttggttagtgtaagggggtgtttggtttctagggactaatgtttagtccctagattttattccattttagttccaaaattgccaaatatagaaactaaaactttattttattttctatatttagcaatttatacactaaaaaggaataaaatgaagggactaaacattagtccctagaaaccaaacacccactaaatttgactagctagcgtcaaataaaaaaatggaaatggaggtaatattaaaataactcatggttttcaagtctgtaacggcgtgcagcttcaggctgctagtgatttttgtttgtaacatgagcaaattttgacggccggcggcgaacgtcgttctgggaatggccccgcccctttgtgccgatgtcaaatgcataaactgtgtgttttgagccgatatgaagcatggttctctctcaagagtgttagctgaatgttcagtagga

SEQ ID NO: 3800 - DNA, 1366 bp, Zea Mays
atggtaaaaccgccactccctaggcgacgcacggcgtgcgtgacgggcgccggcgggtacatcgcctcgtggctcgtcaagctcctcctctcccgtggctacaccgtccacggcaccgtccgcgacctcagtgacaataaaaccgctcatctgaagcggttagagaatgcttccgaaaacctcaagcttttcaaggctgatgtccttgactacgacgctatggcgggtgcagtcgcagggtgccagggagtctttcatgtcgccactcctgtgccttcagggaagatcaccgatccagagcgagagatgctgggtcctgctgttaccggcaccataaacgcactcaaggctgcgtctgctgcaaatgctcgtcgagtggtcgtcgtttcatccatggttgccgttgagatcaacccgaaagactggcccagagacaagatcaaagatgagaactgctggtcagataaagagttctgcaggaacgaagagaactggtattctgtcgccaagatctcgtcagaagaggccgcacttgaatacgcgaagcagaccgggctggatgttgtgacggtcaatccagctgtggtctttggccctcttctgcagccgacgctcaacacgagctgccagttcctcgtctacttcctgaaaggaggacctgatcgaatgagggacaagctttggcacatcgtcgacgtcagggacactgccgatgctctcctgcttgtgtacgagacaccacaagcctccggcaggcacatctgcgctcctcatttcatcagcgcgcgtgacctgctggagctgctgaagacgatggagagcatctacgacatggagcacccagctccaatgacgtccgacaagctcaagaaactgggatggaaggtcaggccgctgaaggaaacaattgcggaaaccgttgagttctgccagcatgctgggtttctcgaggacgtggagggattccgttttcctcccctgtacaacataatctagtttacaataacgtcagtagtgtaagagcaactccaacggaatccgtaaaatttacacaaaaactttgatttggaggctctctaaaataaatagctcgctggaaagcaagctctgatagatccgtcatttatcgctgttttttttttaatcccgcggcaaggaagatgcaggttctgtttgattgccctagaccagctaggtatggctaggccaggatcctgttcgtttcccaataaagctttatttaggtaatctagtattaacccaatccacttgttgagctggattaggtgtaaattagcttaagcacctcaatacgtacctatgtattgagctcaatactacaatttcagcaacgagcgccaagagc

SEQ ID NO: 3801 - DNA, 1507 bp, Zea Mays
cttttataacggactttaaatatattctatattatactgggcacacctcacacgagcagcagcggacgataagagatgtgctgaagctgaacggtggccatgtccaccggacgcacagaggaggccgccgggagcgcggagacggcgtgcgtgacgggcgccggcgggtacatcgcctcgtggctcgtcaagctcctcctctcccgtggctacaccgtccacggcaccgtccgcgacctcagtgacaataaaaccgctcatctgaagcggttagagaatgcttccgaaaacctcaagcttttcaaggctgatgtccttgactacgacgctatggcgggtgcagtcgcagggtgccagggagtctttcatgtcgccactcctgtgccttcagggaagatcaccgatccagagcgagagatgctgggtcctgctgttaccggcaccataaacgcactcaaggctgcgtctgctgcaaatgctcgtcgagtggtcgtcgtttcatccatggttgccgttgagatcaacccgaaagactggcccagagacaagatcaaagatgagaactgctggtcagataaagagttctgcaggaacgaagagaactggtattctgtcgccaagatctcgtcagaagaggccgcacttgaatacgcgaagcagaccgggctggatgttgtgacggtcaatccagctgtggtctttggccctcttctgcagccgacgctcaacacgagctgccagttcctcgtctacttcctgaaaggaggacctgatcgaatgagggacaagctttggcacatcgtcgacgtcagggacactgccgatgctctcctgcttgtgtacgagacaccacaagcctccggcaggcacatctgcgctcctcatttcatcagcgcgcgtgacctgctggagctgctgaagacgatgtaccctgatgattaccctttcattagcaaggagagcatctacgacatggagcacccagctccaatgacgtccgacaagctcaagaaactgggatggaaggtcaggccgctgaaggaaacaattgcggaaaccgttgagttctgccagcatgctgggtttctcgaggacgtggagggattccgttttcctcccctgtacaacataatctagtttacaataacgtcagtagtgtaagagcaactccaacggaatccgtaaaatttacacaaaaactttgatttggaggctctctaaaataaatagctcgctggaaagcaagctctgatagatccgtcatttatcgctgttttttttttaatcccgcggcaaggaagatgcaggttctgtttgattgccctagaccagctaggtatggctaggccaggatcctgttcgtttcccaataaagctttatttaggtaatctagtattaacccaatccacttgttgagctggattaggtgtaaattagcttaagcacctcaatacgtacctatgtattgagctcaatactacaatttcagcaacgagcgccaagagc

SEQ ID NO: 3802 - DNA, 2153 bp, Zea Mays
gtacagtgtacatatcatgggttaacacctcgattcgcgccgagagccttccagagcaaagaagccggccaccaacaaaacccgacccgacgacgacgagcaagtagctgccagaacccagcacagctctacccaccaattctgattctggaagacagacagtagtcgatcgcatcgcatcgcatggcgacgaggccggcagcggaggagaagccgtgggagctggcggcgcacccgcggctgcccaagggcaggacggtggccgtggtggtgctggacggctggggcgaggcggcgcccgaccccttcaactgcatccacgtcgccgacacgcccacgctcgacgccctcaagaaggcagctccggagagatggaggctcatcaaggcgcacgggacggcggtggggctgccgacggacgacgacatggggaacagcgaggtcggccacaatgcgctcggagcgggacagatatacgcgcagggcgcgaaactggtcgatctggcgctgggttccgggaagatatacgagggcgaaggtttcaagtacatccagcagtccttccaggacggcactctgcacctcatcggcctgctcagcgacggaggcgtgcactccagctgctgctccaaggtgctagcgagcgcggggcgaagaggatacgtgtgcacgtcctcacggatgggcgggacgtggcggacggcagcagcgtcaggttcgtggagatgcttgaggaggacctcgctaggcttcgggagaagggcgtcgatgcgagaatagcgtctggcggtggcaggatgtatgtgacgatggaccgttacgagaacgactggcaggtcgtgaagcgaggctgggacgcgcacgtcctgggcgaagccccgcacaggttcaggagcgcgctcgaggccctgaggaagctgagggaggaggaccccaagaaggccagcgaccagtacctgccccccttcgtcgtagtcgacgggagcggggagccggtcggcccggtgcgggacggagacgccgtggtgacgttcaacttcagggccgaccggatggtgatgctcgccaaggcgctggagtacgagggcttcgacaggttcgaccgcgtcaggttccccaggacgcggtacgccggcatgctccagtacgacggcgagctcaagctcccgcgccactacctcgttgctcccccggagatccagaggacgtccggcgagtacttggcgcgcaacggcgtccgcacctacgcttgcagcgagacggtcaagtttgggcacgtcacttttttctggaacgggaatcggtctggttacttcgaccagaacctggaaaaatacgaggagattcccagcgatgccggcatccccttcaatgtccagccgaagatgaaggccttggaaatcgcgcagaaggcgagggacgccatcctgagccaaaaattcgatcaggtaagggtcaacattgcaaacggagatatggttggccatacaggagacatggaggcaaccattgttgggtgcaaggcagctgatgaggctgttaagatcatcctcgacgccgttgagcaagtgggcggcgttttcgtggtgactgccgaccacggcaacgccgaggacatggcgaaaagagacaagtctggagaaccactccgggacaaggacggcaaggtgcagaccctgacttcgcacacgctgaatccggtcccaatcgcgataggaggccccgggcttgcgcctggcgtcaggttccgtacagacctcgcaagtgccggcctcgccaatgttgcggcgacggtcatgaaccttcatgggtttcaggcacccgatcactatgagccaacgctgatccaagtcgtcgacgagtgatttccgctttgctggttgctgcgttgcagttttcagacattatctgaactaactcctaccacagttgtccggcatgtaatcgtactcaaactagactacctgggcaattacctgtgccaattaccgtgtcgaatgttcaaaaatgttttcgttaaggccttgttcgtttgtattacactcgtaattgttgtagctaatcaaagtttatataaattagagaaacaatccggataggaatcgttccgatttactaatccggcacaaatgaacaaggtaagtatttttttc

SEQ ID NO: 3803 - DNA, 2214 bp, Zea Mays
gtctcacgaaaaaagaaaatgagagaacgctcgttcgttacacctgtacagtgtacatatcatgggttaacacctcgattcgcgccgagagccttccagagcaaagaagccggccaccaacaaaacccgacccgacgacgacgagcaagtagctgccagaacccagcacagctctacccaccaattctgattctggaagacagacagtagtcgatcgcatcgcatcgcatggcgacgaggccggcagcggaggagaagccgtgggagctggcggcgcacccgcggctgcccaagggcaggacggtggccgtggtggtgctggacggctggggcgaggcggcgcccgaccccttcaactgcatccacgtcgccgacacgcccacgctcgacgccctcaagaaggcagctccggagagatggaggctcatcaaggcgcacgggacggcggtggggctgccgacggacgacgacatggggaacagcgaggtcggccacaatgcgctcggagcgggacagatatacgcgcagggcgcgaaactggtcgatctggcgctgggttccgggaagatatacgagggcgaaggtttcaagtacatccagcagtccttccaggacggcactctgcacctcatcggcctgctcagcgacggaggcgtgcactccaggttcgaccagctgcagctgctgctccaaggtgctagcgagcgcggggcgaagaggatacgtgtgcacgtcctcacggatgggcgggacgtggcggacggcagcagcgtcaggttcgtggagatgcttgaggaggacctcgctaggcttcgggagaagggcgtcgatgcgagaatagcgtctggcggtggcaggatgtatgtgacgatggaccgttacgagaacgactggcaggtcgtgaagcgaggctgggacgcgcacgtcctgggcgaagccccgcacaggttcaggagcgcgctcgaggccctgaggaagctgagggaggaggaccccaagaaggccagcgaccagtacctgccccccttcgtcgtagtcgacgggagcggggagccggtcggcccggtgcgggacggagacgccgtggtgacgttcaacttcagggccgaccggatggtgatgctcgccaaggcgctggagtacgagggcttcgacaggttcgaccgcgtcaggttccccaggacgcggtacgccggcatgctccagtacgacggcgagctcaagctcccgcgccactacctcgttgctcccccggagatccagaggacgtccggcgagtacttggcgcgcaacggcgtccgcacctacgcttgcagcgagacggtcaagtttgggcacgtcacttttttctggaacgggaatcggtctggttacttcgaccagaacctggaaaaatacgaggagattcccagcgatgccggcatccccttcaatgtccagccgaagatgaaggccttggaaatcgcgcagaaggcgagggacgccatcctgagccaaaaattcgatcaggtaagggtcaacattgcaaacggagatatggttggccatacaggagacatggaggcaaccattgttgggtgcaaggcagctgatgaggctgttaagatcatcctcgacgccgttgagcaagtgggcggcgttttcgtggtgactgccgaccacggcaacgccgaggacatggcgaaaagagacaagtctggagaaccactccgggacaaggacggcaaggtgcagaccctgacttcgcacacgctgaatccggtcccaatcgcgataggaggccccgggcttgcgcctggcgtcaggttccgtacagacctcgcaagtgccggcctcgccaatgttgcggcgacggtcatgaaccttcatgggtttcaggcacccgatcactatgagccaacgctgatccaagtcgtcgacgagtgatttccgctttgctggttgctgcgttgcagttttcagacattatctgaactaactcctaccacagttgtccggcatgtaatcgtactcaaactagactacctgggcaattacctgtgccaattaccgtgtcgaatgttcaaaaatgttttcgttaaggccttgttcgtttgtattacactcgtaattgttgtagctaatcaaagtttatataaattagagaaacaatccggataggaatcgttccgatttactaatccggcacaaatgaacaaggtaagtatttttttc

SEQ ID NO: 3804 - DNA, 680 bp, Zea Mays
aacgaaaaccagctctcatattggcataattccaaatttctctcgtccgcaccgccgccactcgccttttcattccgcaccgccgccaacccgccgcctcttctttccatggaagtggacgacggtagccgcgccaccccgccactggacgccgtggccgccgccttcaagtcccaagtcatggagttgcaggacctcgtcctcgcccgcagcatgttcccggccacggcgctgcccgacctcgccaacgtggacgcgttggtgacggcgatggagtcgcaggtggaaaccatcagccgccgccttcaggaggagcttgacgccatccctaaggccaagaagctagtccagcggtccttgaaggaggaagagaagctgcagcatatgcttgcgaacttaccttctggaatgcgcaagaatgattttgctaatcagcacgaacagagctcatcaaggatgctgcctcattttaactcttcttttactgaagctaatgaatgtgaactgaagattaaggatgaaccagttgcagctcctagggtacatgaggggaagactgactttggaaaaggttaatatcgcaataaatgaagtggcttcatatgcagatgccaatgctcatcttgttacatgccctaagaaaaagttgtcagaagatacatgggaaaaagctttggtaa

SEQ ID NO: 3805 - DNA, 2895 bp, Zea Mays
gggagaggagcgtcgccggccggaccacccgagccagaagcgcgtcgccagctgataactaacccaacccaacccaaataagctcgatcctgctctctgccgacgcggccggattcgaatccgaggacgatcgatgacggtgggcgccggcatcgccgtccaggacggcagcctcctggcgctgggcgccaaggtcctgcgggaggtgcgcggcaacgtgctcgtgacgccggccgccggcgggggcctaaccaacggcgcgttcctcggcgtccggtccgcgcccgccgccagccgcagcatcttccccgtcgggaagctccgcggttcgtgtgcacgttccggttcaagatgtggtggatgacgcagaggatgggctccgcaggccgcgacatcccctccgagacgcagttcctgctcgtggaagtgtccggcggcggcgagcagcccgccgtcgtgtacaccgtcttcctccccgtgctggagggctcattccgtgccgttcttcaggggaacgccgacgacgagctggagatctgcctggagagcggcgacccggacgtggaatctttccaaggctcccatctggtcttcgttggcgccggatcggacccgttcgaggtcatcacaagttcagtcaaggctgtcgagaggcacttgcagacgttctctcacagggagaagaaaaagatgccagacattctgaactggtttggctggtgcacgtgggacgcgttctacaccaatgtcaccgcccagggagtgaagcaaggattgcagagcttggagaaaggcggggtttctcctaggttcgtcataatcgacgacggatggcagtccgtcgccatggaccctgtgggaatcgcttgcctatctgacaactcagccaacttcgcaaacaggctgactcacatcagggagaaccacaagtttcagaaaaatggcagggagggtcacagggaagatgacccagcgaagggcctagcacacgtcgtcaatgagattaaggggaagcatcagctcaagtatgtgtacgtatggcatgccatcaccggatactggggcggagtgaggccgggtgcagctggaatggagcactacggatcaaagatgcagcggcccgtgccatcgccgggggttcagaagaacgagcgctgcgaagccctggacagcatgacggccaacgggctgggcctcgtgaaccttgacagggcgttcagtttctacgacgagctccactcgtacctcgcgtctgccgggatcgacggggtgaaggtggacgtgcagaacgtcctcgagacgctgggcgccggccatggcgggagggtgatgctggcgaggaagtaccagcaggctctggaagcgtccgtcgccaggaacttccccgacaatggcatcatatcgtgcatgagccacagcacggacaacttgtacagctcgaaacggagcgcggtgattagagcctctgacgatttctggccgagagaccctgcttcccataccatacacgtcgcgtccgtcgcttataacaccgtctttcttggggagttcatgcagccagactgggacatgttccatagtgttcatcccatggctgagtaccatgctgcggctcgagcggttggtggctgtgccatatatgtcagcgacaagcctgggagccatgacttcaatctgctcaagaagctcgtgcttcccgacggatcgatcctgcgcgcaaagctccccgggaggccaaccagagactgcctcttctctgaccccgcaagggacggcaaaagcgttctcaagatatggaacctgaacgaacactccggcgtcgttggcgccttcaactgccaaggcgccggctggtgccgggtagccaagaagaacctcatccatgaccagcagcccggaacggtgagcggcgtcatccgggcgcaggacgtggagcaccttgcaagggtggctgatcacggctggaacggcgacgtggtcgtgggaggtggtgtacctgccgaagaacgccttgctgcctgtgacgttgagatcgcgcgagtacgaggtgttcaccgtcgtccctctcaagcacctgccaaacggtgcctctttgcggcgatcggccttctcggcatgttcaactccggtggcgcgatgagggagctgagattcggtggtgaggatgccgacgtcgagctcaaagtgcggggctcgggcacggtcggagcttattcctcgacgaagccaacgtgtgtcgccgtcgattctaaggcggttggtttctcctacgatggcacctgtggcctcatcagcttcgagctcggcatccccgaccaagaaatgtacttgtggacgatggatccctacggcctaagggcccccggatctgtcacaccatccgaaccccctccccttcagtgttctcaagatatggaacctgaacgaacactcaggcatcgttggcgccttcaactgtcaaggcactggttggtgccgggtagccaagaagtacctcatccacgaccaccagcccagaacggggaggtggtgtacctgccgaagaacaccttgctgcctgtgacgctgagatcgcgcgagtatgaggtgttcaccgtcgtccctctcaagcacctgccaaatggtgtctcctttgcggagatcggccttctcggcatgttcaactccagtggcgcggtgagggagctgagattcagtggtgaggatgccgacgtcgagctcagagtgcggggctcgggcacggtcggagcttattcctcaaccaagccaaggtgtgtcgccgtcaactccaaggcggttggtttctcctacgatggcacatgtggcctcatcagcttcgagctcgacatccccgaccaagaaatgtacttgtggacggttacagtagggtattga

SEQ ID NO: 3806 - DNA, 1837 bp, Zea Mays
ttttgtggtttgtgctaggcctggaaggttttggaaggaatccaagatgggtgtaatcagcacagtgctgggtttctctggttttggctttgggttctcggctggcattgttattggttacttcctcttcatctacgtccagccaactgatgtcaaggctatctgcagaactgcacaggatatcgcgaagccaattattgctgagaacactgcaaagtataagatagactctgttgagtttgaatcacttactttgggtagcttaccacccacctttcaagggatgaaagtctatgtcacagaggagcaagagctgataatggaaccatctcttaaatgggctgcaaacccaaatattactgttgctgtaaaagcctatggtttgaaagctactatccagattgtggatctacaagtctttgcatcacctcgcattactctgaagccattggtgcctacatttccttgctttgcaaaaatccttgtctcactcatggagaagccacatgttgactttgggctaaaacttcttggagcagatgtaatggctattcctggtctttacagatttgttcaggagaccatcaagaaacaagtagcaagcatgtatttgtggccgaagacactagaagtacctataatggatccctcaaaagcatcaaaaaggcctgttggaattctacttgtgaaggttgtgagagcccaaaatctgcggaagaaggatctgctgggtaaatctgacccatacgtgaaacttaagatgtcagatgataaacttccatccaagaagacaactgtaaagcgcagcaatctcaatccagagtggggtgaagacttcaagtttgttgtgacagatccagaaaaccaggctcttgaagttaatgtcttcgactgggaacaggttgggaaacatgaaaagatgggaatgaacatgatcccacttagagaactcctaccagaggggactaaagttactaccctcaacttgcttaagaccatggacccaaacgatgtacaaaatgagaagtctcgtggtgagcttactctagagctcacatacaagcctttcaaggaagaagatatagagaaagaagatacacagggtgctgatgtgatagagaaagctccagatggcactccagctggtggtggcttgctttatgttgttgttcatgaagcccaagatcttgaggggaagcaccatacaaacccatatgcaaaaataattttcaaaggcgaggagaagaaaactaaggtcatcaagaagaatagggatccaagatgggaggatgagtttgagttcgtgtgtgaggagcctcctgtgaatgataaactgcatgttgaagtcataagtaaagccccgaaggcagggctgatacatggcaaggaaactttgggctatattgatattagccttgcagacgtgatcagcaacaagcggattaatgaaaagtaccatctcatagactcgaaaaatggtcagatccagatcgagttgcagtggagaacttcctagacaggaaggagccagaatgccttgatgttcctctattcagtttgcgtatatctgtgattgagattgaggtcatgtagatatttcttttttttatagacatctgttgttcggatcttctcttaatcgatcaagtttccgacaagaactatgcagacatgttacagaccctgagaatggaactgaacaaatgacacgtcatacaattacactcggcattctggcatactgagaatttacaccatgctccaaatatatttcactgctatcttctaagagcatttagcgtgtgccgtgtggcatgcgtaccgaaatggttcgatg

SEQ ID NO: 3807 - DNA, 1839 bp, Zea Mays
tgggggatattgctctggaagtcgcttgcgttttggaaggaatccaagatgggtgtaatcagcacagtgctgggtttctctggttttggctttgggttctcggctggcattgttattggttacttcctcttcatctacgtccagccaactgatgtcaaggctatctgcagaactgcacaggatatcgcgaagccaattattgctgagaacactgcaaagtataagatagactctgttgagtttgaatcacttactttgggtagcttaccacccacctttcaagggatgaaagtctatgtcacagaggagcaagagctgataatggaaccatctcttaaatgggctgcaaacccaaatattactgttgctgtaaaagcctatggtttgaaagctactatccagattgtggatctacaagtctttgcatcacctcgcattactctgaagccattggtgcctacatttccttgctttgcaaaaatccttgtctcactcatggagaagccacatgttgactttgggctaaaacttcttggagcagatgtaatggctattcctggtctttacagatttgttcaggagaccatcaagaaacaagtagcaagcatgtatttgtggccgaagacactagaagtacctataatggatccctcaaaagcatcaaaaaggcctgttggaattctacttgtgaaggttgtgagagcccaaaatctgcggaagaaggatctgctgggtaaatctgacccatacgtgaaacttaagatgtcagatgataaacttccatccaagaagacaactgtaaagcgcagcaatctcaatccagagtggggtgaagacttcaagtttgttgtgacagatccagaaaaccaggctcttgaagttaatgtcttcgactgggaacaggttgggaaacatgaaaagatgggaatgaacatgatcccacttagagaactcctaccagaggggactaaagttactaccctcaacttgcttaagaccatggacccaaacgatgtacaaaatgagaagtctcgtggtgagcttactctagagctcacatacaagcctttcaaggaagaagatatagagaaagaagatacacagggtgctgatgtgatagagaaagctccagatggcactccagctggtggtggcttgctttatgttgttgttcatgaagcccaagatcttgaggggaagcaccatacaaacccatatgcaaaaataattttcaaaggcgaggagaagaaaactaaggtcatcaagaagaatagggatccaagatgggaggatgagtttgagttcgtgtgtgaggagcctcctgtgaatgataaactgcatgttgaagtcataagtaaagccccgaaggcagggctgatacatggcaaggaaactttgggctatattgatattagccttgcagacgtgatcagcaacaagcggattaatgaaaagtaccatctcatagactcgaaaaatggtcagatccagatcgagttgcagtggagaacttcctagacaggaaggagccagaatgccttgatgttcctctattcagtttgcgtatatctgtgattgagattgaggtcatgtagatatttcttttttttatagacatctgttgttcggatcttctcttaatcgatcaagtttccgacaagaactatgcagacatgttacagaccctgagaatggaactgaacaaatgacacgtcatacaattacactcggcattctggcatactgagaatttacaccatgctccaaatatatttcactgctatcttctaagagcatttagcgtgtgccgtgtggcatgcgtaccgaaatggttcgatg

SEQ ID NO: 3808 - DNA, 570 bp, Zea Mays
ctaaactacagctaacactgcagccccaagatcgatcgagcgtccacagccccaaggaacatagtataacatggccccagccatttccaagcctctccttaccgatctcgttgcacagatcgggaaggtcccatcgagccacatcaggcctgtcggagaccgcccggacctcgccaatgtcgacaacgagtccggcgccgggatcccgctcatcgacctcaagaagctcaacggcccggagcgccgtaaggtggtggaggccatcggcaaggcctgcgaatccgacggcttcttcatggtgacgaaccacggcatcccggcggcggtcgtggagggcatgctgcgcgtggcgcgggagttcttccacctgccggagtcggagcggctcaagtgctactccgacgaccccaacaaggcgatccggctgtccaccagcttcaacgtgcgcacggagaaggtcagcaactggcgcgacttcctgcgcctgcattgctaccccctccagagcttcgtcgaccagtggccgtcaaacccgccgtccttcaggaaggacttgtcaaaccgaaactt

SEQ ID NO: 3809 - DNA, 3111 bp, Zea Mays
attaagcaggattcatcaaacagtcaacagttgggcctttcggcttatgcatgacataagtcctcccagggtttatgcatgacagcccctgtgtctcttccaaatgagctagaagcggtctcccattctgcaagggttgagttattccgagacgctagttgcaacatagaaaatgaggtgttggccagtttgggaaatggccaagattcaactgctgttggagcaactcctggtttcagagttggagagatcaggtttgctaatggagatatttattctggcacattgttggggaacacaccagagggttcaggccagtatcgctggtcagatggttgcacctatgatggtgagtggaataaagggatgaggcatgggcaaggaaagacggaatggccatctggagccacctatgagggtgagtattctggtggctatgtatatggtgaaggtacctataagggtccagataaaatcatttacaagggacgatggaagttgaatcacaagcatggacttggacatcagacatatccaaatggagacatgtttgaaggttcgtggattcagggagaaatagtaggtcatgggaagtacacgtgggcaaacggggacacttacgttggcaacatgaaaagtggcaagatgtcagggaaaggaactcttacatggaaaaatggggactcgtatgagggtaactggatagatggcatgatgcatgggtatggaatctatacatggaatgaatgtgggtattatattggaacatggacaaggggactgaaggatgggaaaggtaaattctttccgaaaggttgtagagtacctgttaacgacgagatgtatatcaataatctaagaaatcgtggtgtactgcctgatattagaaggcagaatcatggttcacgcatacttcactcttcctcggttgacatggggaacatgaaggttggtatggctaggcaatcttcagatgttttgttcaaaaggaattcagctgagcaatcttctttgaagaatgtgtctttggaaagacggtggagtcttgaggtggctattgaaaaatttattggccatgaatccagcgaaagttctggtctagaaagcttggaaaacttgagtgattctcgtttgcccatactggaaagagaatacatgcaaggtgttctaatcagtgaggtggttcttgacaggagtttttcagactcctcaaagaagacaaaacgccgccagaagaaaacggtgagggacacaaaaaagcctggagagacaataattaagggacacagaagctatgatttaatgctcagcctgcagcttggaatcaggtacacagttggaaagatcacaccaattcaaaaacgtgaagttcgtgcttcagattttggaccaagagcaagtttctggatgaacttcccaaaagaaggatctcggcttactccttcacattcagcggaagattttaaatggaaagactactgtcccatggttttcaggaatttgagagagatgttcaagattgatgctgcagactatatgatctccatatgtggaaattctgctcttaggcaactatcttcccctggaaagagtggaagtgtctttttcctgtcacaagatgatagattcatgattaagactctccgaaaatctgaagtgcagggtgaaaccttctagtggtcaaaagtttcggtttgttgtaatgggaaacatgttttgcactgaattgagaatccaccggaggtttgatttgaaaggatcatctttaggccgttctactgataaaattgaaattgacgagaacacaactctgaaggatttggatcttaactattccttttatcttgaaccttcctggcgtgaggctcttcttaaacagattgaaacagacagtgattttttgagaacacagcggataatggattacagcctactgcttggtgtccattatagagctccacagcacttgcggacacgtgcatcttatcaccggagcatggcagcagatagattgactgttgtttcagaagaagatgctcaggaagatgatgcccttagccatccagaaggactagtcttggttcaaagcagtggtgagaacagtgttattgttggccctcacataagaggcagccgcttgcgtgcatcggctgctggatttggcgaagtagacctactgctgcctggaacagccaggcttcagatccagctaggagttaacatgcctgcaagggcagagcagacccctaaggaagatgaaagcaaaccgttccgtgaggtgtacgatgtggtcctctacctgggcatcattgacatactgcaagagtacaacatgacaaagaaaatcgagcacgctgtcaagtccatgcagtatgactcggtctcgatctcggctgtggacccccagttctactcggagcgtttcttgaacttcatccagaccgtcttccctgagaattcgtagctccatccaccaatacttttcttggaagatgcccgcccactaccacttgctgagaacttcatccagacgacagtccatgtcttcgaatttggagcttgcgagcatcataagaacattgcactctcttcagtgcgtgcctgttccttcctggatgaactggcaggaagagtggccaacaaaatgagattcgttagtgaaattgtgcagaagcaaatcgatcttctctaggctattttgccccgatccctggggtcaccggatcagccgtctggcttcctggagtaggcttggcgtattgggactcgagcaggaagtagatgtgagttgcgaggattctagtgacagcggcgccatagagctctgggattcactgttatgtctcggcagttgcagaaagctgaagcgcctgttgcctctggctcgtgtttcatctgttaaggtgctatggaggatatgtttaataagtccctgaaaacacgcatcaagctccgatacatttttttgtaggacaaacaaaagagtactatgtattttatcgcaaaaacgaaaagaaatggaagcaacagatgaaaatcgcgcgtggtgacggaggaattacgagtgcggcctagttagcatatgtttcctcgtttccatggtgtgagtat

SEQ ID NO: 3810 - DNA, 3501 bp, Zea Mays
cctagcttttcgccccttttttttcccccacgaccaggatcggtgagcgagtccaagcggccaaatccaatcgctaaccaccgccggcgtcctcgtctacgtctactacctgctctgctctctctcccccacaggccccgcagcatccacacgaggacttcagaatcagcagcagccagcaggcagcagctcagcgagacagacgcgtccggggctcccctccgcgcgcccgccgatcaaggatcaacaacacacggggacgcctcccgtctccttcattcccagcctgcactgcgccgccccagacgcccgcgaccctctccacctcctccggcgaataccgttcctccccggcaagctaccctccgatcctttgttccgggtctgcgaggtagtaccgtcgacgaggcctccctcccctccggcgagccccccttccgaagtcgtgagtcctcccagggtttatgcatgacagcccctgtgtctcttccaaatgagctagaagcggtctcccattctgcaagggttgagttattccgagacgctagttgcaacatagaaaatgaggtgttggccagtttgggaaatggccaagattcaactgctgttggagcaactcctggtttcagagttggagagatcaggtttgctaatggagatatttattctggcacattgttggggaacacaccagagggttcaggccagtatcgctggtcagatggttgcacctatgatggtgagtggaataaagggatgaggcatgggcaaggaaagacggaatggccatctggagccacctatgagggtgagtattctggtggctatgtatatggtgaaggtacctataagggtccagataaaatcatttacaagggacgatggaagttgaatcacaagcatggacttggacatcagacatatccaaatggagacatgtttgaaggttcgtggattcagggagaaatagtaggtcatgggaagtacacgtgggcaaacggggacacttacgttggcaacatgaaaagtggcaagatgtcagggaaaggaactcttacatggaaaaatggggactcgtatgagggtaactggatagatggcatgatgcatgggtatggaatctatacatggaatgaatgtgggtattatattggaacatggacaaggggactgaaggatgggaaaggtaaattctttccgaaaggttgtagagtacctgttaacgacgagatgtatatcaataatctaagaaatcgtggtgtactgcctgatattagaaggcagaatcatggttcacgcatacttcactcttcctcggttgacatggggaacatgaaggttggtatggctaggcaatcttcagatgttttgttcaaaaggaattcagctgagcaatcttctttgaagaatgtgtctttggaaagacggtggagtcttgaggtggctattgaaaaatttattggccatgaatccagcgaaagttctggtctagaaagcttggaaaacttgagtgattctcgtttgcccatactggaaagagaatacatgcaaggtgttctaatcagtgaggtggttcttgacaggagtttttcagactcctcaaagaagacaaaacgccgccagaagaaaacggtgagggacacaaaaaagcctggagagacaataattaagggacacagaagctatgatttaatgctcagcctgcagcttggaatcaggtacacagttggaaagatcacaccaattcaaaaacgtgaagttcgtgcttcagattttggaccaagagcaagtttctggatgaacttcccaaaagaaggatctcggcttactccttcacattcagcggaagattttaaatggaaagactactgtcccatggttttcaggaatttgagagagatgttcaagattgatgctgcagactatatgatctccatatgtggaaattctgctcttaggcaactatcttcccctggaaagagtggaagtgtctttttcctgtcacaagatgatagattcatgattaagactctccgaaaatctgaagtgcagggtgaaaccttctagtggtcaaaagtttcggtttgttgtaatgggaaacatgttttgcactgaattgagaatccaccggaggtttgatttgaaaggatcatctttaggccgttctactgataaaattgaaattgacgagaacacaactctgaaggatttggatcttaactattccttttatcttgaaccttcctggcgtgaggctcttcttaaacagattgaaacagacagtgattttttgagaacacagcggataatggattacagcctactgcttggtgtccattatagagctccacagcacttgcggacacgtgcatcttatcaccggagcatggcagcagatagattgactgttgtttcagaagaagatgctcaggaagatgatgcccttagccatccagaaggactagtcttggttcaaagcagtggtgagaacagtgttattgttggccctcacataagaggcagccgcttgcgtgcatcggctgctggatttggcgaagtagacctactgctgcctggaacagccaggcttcagatccagctaggagttaacatgcctgcaagggcagagcagacccctaaggaagatgaaagcaaaccgttccgtgaggtgtacgatgtggtcctctacctgggcatcattgacatactgcaagagtacaacatgacaaagaaaatcgagcacgctgtcaagtccatgcagtatgactcggtctcgatctcggctgtggacccccagttctactcggagcgtttcttgaacttcatccagaccgtcttccctgagaattcgtagctccatccaccaatacttttcttggaagatgcccgcccactaccacttgctgagaacttcatccagacgacagtccatgtcttcgaatttggagcttgcgagcatcataagaacattgcactctcttcagtgcgtgcctgttccttcctggatgaactggcaggaagagtggccaacaaaatgagattcgttagtgaaattgtgcagaagcaaatcgatcttctctaggctattttgccccgatccctggggtcaccggatcagccgtctggcttcctggagtaggcttggcgtattgggactcgagcaggaagtagatgtgagttgcgaggattctagtgacagcggcgccatagagctctgggattcactgttatgtctcggcagttgcagaaagctgaagcgcctgttgcctctggctcgtgtttcatctgttaaggtgctatggaggatatgtttaataagtccctgaaaacacgcatcaagctccgatacatttttttgtaggacaaacaaaagagtactatgtattttatcgcaaaaacgaaaagaaatggaagcaacagatgaaaatcgcgcgtggtgacggaggaattacgagtgcggcctagttagcatatgtttcctcgtttccatggtgtgagtat

SEQ ID NO: 3811 - DNA, 2637 bp, Zea Mays
atggggggtctgtgcgattatgtgggagctgtagcttggacccaatttagatctgtcctcaacttcaacttcaaccctcaagatcagtatttaaaaatcaagatggttaacttcgggaagaaattgatggcagatcaaattccagaatggaaaggatattatatcaattacaagttgatgaagaagaaagttaaacagtatggccagcagctccagcagggggaaaaagatcgtcgtcgggttctgaaggatttctcgaagatgcttgatgatcagatagagaagatcgtcctgtttctgttggaacaacaaggactattggcaagcaggattgagaagttaggaaagcaaagggcaatactacaagagcagccagatatatctggcattgctgagttacgagaagcttatagggaagttggtatcaatctcatcaaacttctcaagttcgttgaccttaatgcaactggcattcggaaaatcttgaagaagtttgataagcgttttggctatagatttactgattactatgtgacaagtagatcgaatcacccttactctcagctgcaacaggtctttaagcatgtggagctgttgtaggagctttgtcacgtaaccttgctgaactccaagaacgtcaaggaagctacttatctatttatgatcagccatcttctgctcttaaggaccccatcattgatatgataaattcttcagttgataagttgacaaggtcaactaattttcttcgctttttggggcaacatgccatgattgtggatgaggagtctcctagcactgcaggagaggaagaaatagaagatcagaaataccatttcatgtcccttatgctgaacctggtgaacacattcctttacatggtcaacacgtacatcattgtgccaactgcagatgactattcagtgagccttggggcagcttctactgtttgtggtgtggtcattggttcaatggctgttgcgcaaatattttcctctatttacttcagtgcatggtccaacaagtcatatttcaaaccgcttgttttcagtagcattgttttgttcttggggaatatatgctatgctatggcatatgatatgaagtctctaacggtccttattatcggccgtttactctgtgggatgggttctgcaagagctgtcaatcgccgatatattagtgattgtgtccctgcaaggatacgcatgcaagcttcggctggatttgttagcgcaagtgcacttggcatggcctgtgggccagcgctagctggtttacttcagtggaaattcaaggtctacatggttacattcaatcaatcgactctaccgggttgggtgatggcagttgcatggctattgtatttgatttggctatggttctcattcaaagaaccgaaccgtgctaccgaggtgaatgaagccccacaaaatcctgcttctggacaaactgttgatattggacgactagagaatggaattgcacagcctctgctcaaggattccgtggataaacaaaatgaagatgaagacgaagttgatgatattgaagaaactgcagatgattctcgcaaacctgcaacatcaattggctcagcataccgattgcttaccccgtcagtgaaggtccagttgttgatatacttcatgctcaaatacgcaatggagattttgctttcggagtcgagtgttatcaccaatcactatttcagttggaatacaagcgcagtggcaatatttctagcaatcctagggttgacagtccttcctgtaaacgctgttgttggaacatacatcagcaatatgtttgaggacaggcaactcctcatggtgtctcaaattacgttgctagtaggcattatcttcagcttcaaagtcacgagcacatactatgtcgtccagtatgttgtctcagcactggtcacatttgtttctgccgaagttcttgaaggcgtcaacctttccctcctatcgagcgtgatgtcgtcccgcctctcccgtggcacgtacaacggtggtctcctctcgacggaggctgggaccctggccagggtggtcgccgactgcaccatcaccgcggcggggtacctgggcgtggggaagctcctcaacgtcaccctgctaccgtcgctggtgatatgtgttgcgtccatcgcctgcaccttcctgacgtacaactcgcttttctgatggagcttcgcgacgtatttgtgtcgtcatgattcgttccaaatcaaggcagctgggagaccgccgttgccattgcccgaaggggctgttgtgttattatattatatatgtgcgtcgatttgattgctgtaaattgacaaaatgatggcagccactggccttgccctgcaaaattttgatcgcttatgtccgtgacgttgtcaatgctatgttgtgttgacgtgttggtccaaactgtaattatgctactctcgactgatctgatctccgctgcgatgcggttttgagagtggagtcgtacgagagtggatcggcgtttttgtccattgggcttgattggatttatgagataaatagtttgtcggctaattttagtaccttttcgattattagctgaagggctactaaattgtttgttcattagtcatttgagattactgatagg

SEQ ID NO: 3812 - DNA, 2867 bp, Zea Mays
ccggctctgcagccaccccgcgtccacggtccacctctgtctctctctcgttcagcgctccagctcgctcgcctggctattcggctataaatactcgcatcccgtggctctcgcgccccctccacccctccccttcccctgccactctccgcctctggcctagcgcccccgcccgctcgatccgcctagtaggtaacggcgaggctcaccgcgtccgcactcgcccgtgaatccgtgatttctcccaccttcctttcagcgccgctctcccaccttcctttcagcgccgcccgccgtccttttcgatcagtatttaaaaatcaagatggttaacttcgggaagaaattgatggcagatcaaattccagaatggaaaggatattatatcaattacaagttgatgaagaagaaagttaaacagtatggccagcagctccagcagggggaaaaagatcgtcgtcgggttctgaaggatttctcgaagatgcttgatgatcagatagagaagatcgtcctgtttctgttggaacaacaaggactattggcaagcaggattgagaagttaggaaagcaaagggcaatactacaagagcagccagatatatctggcattgctgagttacgagaagcttatagggaagttggtatcaatctcatcaaacttctcaagttcgttgaccttaatgcaactggcattcggaaaatcttgaagaagtttgataagcgttttggctatagatttactgattactatgtgacaagtagatcgaatcacccttactctcagctgcaacaggtctttaagcatgtgggtgtaggagctgttgtaggagctttgtcacgtaaccttgctgaactccaagaacgtcaaggaagctacttatctatttatgatcagccatcttctgctcttaaggaccccatcattgatatgataaattcttcagttgataagttgacaaggtcaactaattttcttcgctttttggggcaacatgccatgattgtggatgaggagtctcctagcactgcaggagaggaagaaatagaagatcagaaataccatttcatgtcccttatgctgaacctggtgaacacattcctttacatggtcaacacgtacatcattgtgccaactgcagatgactattcagtgagccttggggcagcttctactgtttgtggtgtggtcattggttcaatggctgttgcgcaaatattttcctctatttacttcagtgcatggtccaacaagtcatatttcaaaccgcttgttttcagtagcattgttttgttcttggggaatatatgctatgctatggcatatgatatgaagtctctaacggtccttattatcggccgtttactctgtgggatgggttctgcaagagctgtcaatcgccgatatattagtgattgtgtccctgcaaggatacgcatgcaagcttcggctggatttgttagcgcaagtgcacttggcatggcctgtgggccagcgctagctggtttacttcagtggaaattcaaggtctacatggttacattcaatcaatcgactctaccgggttgggtgatggcagttgcatggctattgtatttgatttggctatggttctcattcaaagaaccgaaccgtgctaccgaggtgaatgaagccccacaaaatcctgcttctggacaaactgttgatattggacgactagagaatggaattgcacagcctctgctcaaggattccgtggataaacaaaatgaagatgaagacgaagttgatgatattgaagaaactgcagatgattctcgcaaacctgcaacatcaattggctcagcataccgattgcttaccccgtcagtgaaggtccagttgttgatatacttcatgctcaaatacgcaatggagattttgctttcggagtcgagtgttatcaccaatcactatttcagttggaatacaagcgcagtggcaatatttctagcaatcctagggttgacagtccttcctgtaaacgctgttgttggaacatacatcagcaatatgtttgaggacaggcaactcctcatggtgtctcaaattacgttgctagtaggcattatcttcagcttcaaagtcacgagcacatactatgtcgtccagtatgttgtctcagcactggtcacatttgtttctgccgaagttcttgaaggcgtcaacctttccctcctatcgagcgtgatgtcgtcccgcctctcccgtggcacgtacaacggtggtctcctctcgacggaggctgggaccctggccagggtggtcgccgactgcaccatcaccgcggcggggtacctgggcgtggggaagctcctcaacgtcaccctgctaccgtcgctggtgatatgtgttgcgtccatcgcctgcaccttcctgacgtacaactcgcttttctgatggagcttcgcgacgtatttgtgtcgtcatgattcgttccaaatcaaggcagctgggagaccgccgttgccattgcccgaaggggctgttgtgttattatattatatatgtgcgtcgatttgattgctgtaaattgacaaaatgatggcagccactggccttgccctgcaaaattttgatcgcttatgtccgtgacgttgtcaatgctatgttgtgttgacgtgttggtccaaactgtaattatgctactctcgactgatctgatctccgctgcgatgcggttttgagagtggagtcgtacgagagtggatcggcgtttttgtccattgggcttgattggatttatgagataaatagtttgtcggctaattttagtaccttttcgattattagctgaagggctactaaattgtttgttcattagtcatttgagattactgatagg

SEQ ID NO: 3813 - DNA, 1806 bp, Zea Mays
aatgacgcaatcggtacctagcacgtgaaaattccttccgctccagttattacggagcaatagggtggtgaactggtgactggagctggaatcgcatttcttgctctttggtctctccagaatcatcctccggccgagccttcttggaatcctcccgagattcgcttgcccgcccttttcttttcaagtggatctgaacttgggagggaaccccgatgcagccgcggtacggagaagcacgacagccgctgccggggcggtacgcgctgtaccacttcggcaccagcggcgccgccgtcgccgccgccaccgccgtgacccatccgttcgatgttatcaaagtcaggcttcaaatgcagcttgctgggcaaagaggaaacttagttggaatgggaacaatatttacacaaatggttgaaagggaaggggctcggtcactctacctgggacttgcaccagcgttggcgagagctgttgtctatggtggccttcggtttggactgtatgagccctgcaagcatgtctgcagttatgcatttggttcaacaaactttgcttttaaatttgcatctggagtcattgctgggggccttgcaactgctttaacaaatcccatggaagttttgaaggtgaggctgcagatgagtaaaagcagtaccagtacaataagagagatgagaaaagttatagcgcacgaagggtttaaagcactttggaaaggagtcggcccagcaatgacaagagcaggttgcctcactgcatcacaaatggcgacttacgatgaggccaaacaggccttaatgaagtggacaccacttgaagaaggttttcagttacatctcatctcgagtttcatagctggaacagctggtactcttgtgaccgcacctgtagacatgatcaaaacacggttaatgctgcaacaggagtccataggcgccagagtatacaggaacggattccattgtgcttcccaggtgttgatcttaatatttcatttttgatgtttgtgctattaggaattattcctggtaagaacattgctagaattactttctataagtgcctgaaagcactgcgaaattgttaagctacaacattagtagtgaactattgtcacaagatgagaacaggaatgttacaaccgaggagattggaaatacaataccttgagcgccaacaacatgaaggtattcttctgatatttgtttccattctcttggtttgcaggttgtggtgacagagggtgtgaagtcactttataaaggtggatttgccacattcgcgagagtaggccctcagacaacgattacctttgtcgtgtgcgagaaactgcgcgaacttgcaggaatgactgccatctagtgccaccccaaattgcataatgtgtggggtccaacggttgaacagcatactctacccgagttttcacaccattctttattcaccattcatgatgagaagggagaagataagcacccactgggatgtttaaggattgggaagccagagctccttcagatttatcatacctcatttgaaatttcgaaatagcgtgattgttgttatgtttgctctaagacttactcatcatatctctaatctcatcttgtatttcgaactacactctacgaacaatacagtctacaatgtaaaaacattatttttggtgaccatatgggtaacctgttgtacatgctgtacacggtctaactaccattgaatgtgtgtgtgggtagctctcaagtttgagatcttgctccaccttggaccatgatgtatgcatgtctgggccttcaacgagca

SEQ ID NO: 3814 - DNA, 1675 bp, Zea Mays
ttcgtttgcgtcggattgcacccggaatcgttctagctaatcaaagtttatataaattagagaagcaatccggttaggaatcgttccgacccatcaattcgacacaaacgacaaggccttagctggaacgatttcgagtataatccgacacaaaggaagtgaaattccccaatactccatatgcgatgccaacgagaccaaaagtgaaaaattccccactcatgtttgctatatatataaatagcctcctcagtcctcccctcccgtagtcccgtctcctccacctttcactttccagttcaagtcaaaccacgttcctcgcggtcgcggaggctcacgccaagctcgctaaccgctcccctcctccctcactccctcgtctctccctctccccccgaatcctcgacacccaaagcccaaaccctagcacgggcagcggagctgcgtcgggcgaatggacctgcagctgcatgtcttctacagggcgctcgggctctcgttcgtcggcggcctcagcaccgccatcggtgcactgtttgtcgttttgaatcctgcccctaaccttaaagtgctcgggcttctacagcatctcctttctagacctggcacacaatgccctgaattctattggcttcttgaaggggaacctctggttttttgcaggggttcttttcttcggtttcattattaagtttatcccagagccagatttttcgccaccagctgatccaagcgagaaagaggctgatgatggtgtatcaggtaaagatatgatgagaaaacatcgccggcaagtgctattcagtggtattatcactgctgttggaattagcttgcataatcttccagagggaatggctgtatttcttggatctgtcaagggtcttcatgtgggcctgaacttggctgttgctattgccttacataacataccagagggggttgctgtagctcttccaatctattttgctaccaaaagcaaaaaaaaggcattttatacggcagcattctctggtttggctgaaccactaggagtggttgctgtagctttgttgtttccaagcagtttgaatcctgacattcttgaaggcctacttggatctgtgggtggtgtcatggctttcctcactttgcatgaaatgctgcctcttgcatttgactattgtggccagaagcaagctgtcaaagctgtctttgtgggcatggcctgcatgtctgcaagcttgtacttcttggaagtcagcttaccaaaggagataagcttgtagcatcgcgctgcaggtactgggaggccatagcctgtcagtagatcctgaattctaggaggaggaacagcacaataaaaccatgaacagtgactactggtgtgccgccattgatattgtccatcttaccgtgaaaggagggagaaactgcatttccccagaatgtattccccagattcctcgtgggaccatatgaaagaattgaaaaatgtactgtagtactctgtcgtccggcaatggaagcttcgaagtcgtcaactaaactatttctagcactctcgtcggttgacaatggaagattctatgtaaaaacccatcagatagatgttaacctttaatctttaatttcttaaaagtacattgaaataagatactttgctttcaaacaccccctatatttagtttgaacc

SEQ ID NO: 3815 - DNA, 1835 bp, Zea Mays
caacgacctctgaaaccctaaccaaataaacccaccgttcgaaatccccaaaggccaaaaccctcctccgaacccttcccgccgccgccacccccaccccgaccggcaccaccacctcctagctccaccaccgtccgccgtcgccgcgatggaagacgacccgtcgcgccaggtgcgcgtgcgcttcgtcacaaagctgccacctccgctgcggacgccgcccgctgccatcgccgtccccgcggacctcactcgcatgggcctctccgagatcgtcaacagcctcctcgcagccgccgagccggaccaccagtcgcagcccttcgacttcatcgtgcagggcgagctcgtgcggctgccactccaagagtttctcctagccaagggcatctccgcggagagggtgcttgagctcgagtatgtgagagcagtggcgccaaggaagcaggaggaaccttgcccccatgatgactgggttagtgctgtggatggatcaaacccaggttttatattatctggatgctatgatggtcttgcaagattatggaaagatgcagcagtatgcacacaaattttggagggacacaatgatgcaattacttctaccagattcatcaataagggatctgaaaccgagggcagtctgcatgtagtgactggctcaaaggataggtcactgcggctatacaagtgtgatacatcagtcattatggactacccaaagcgggttggggcttacaaaattctccgcggccacacggcatcggttaaaagtatctccgcagacccttctggcgatatgctatgttctggatcctgggatggtaccatcaagttgtgggcagttgaaggatctgatgacgatgatgctgtttcattgaagaagagaaggatgaattctgattcatctggacctgaagagtctcagttagagggttcagccacttcaacacttctgggacatacacaaggtgtaactgctgttacctggcctgaacggaaaacgatatattcagcatcttgggatcattctgtaaggcagtgggatgttcaaacagtgaaagaaacatggaatatgttttgtgggaaggccttgaattgcttggactgtggaggtgagggttcttcattgattgctgctggtggttctgatcccgtgttgagggaacattagctcctgtttttcagttctcctctcattcaagctggatcactgcttgtaaatggcatccgagttcttgtttccatttggtgtcatcttcctttgacgggaaagtgatgttgtgggatctaagaacagcatggccgctggcgtctgtggactcgcatgaagataaggttttatgtgcggactggtggaaaggggacagtgtgataagtggcggagctgattccaagctatgtatctcatctggtattcaaatcgtgtgatgaagttcttccttatggttctcgagcccatgttattgagattatatgggttgacaagccatttccagaagccaaataatgtcagatatgtctgggaagatacgcaacccttcagtcaagatcaagatacggcacagggctttaccagatgtgtatgcaaaagtgcatttcttgcataagtaagatccaaagcaattgataactacatcttgctcatcaacttttttatgtgttcattggtgcgtttggcaccaatattactctattattccaagatcatgaattaatagttgaagtctgggctgaccggctgaccgcctctgtttatgctctgttacttgtcgcttggcactttggcagcctggtataaactaacctagcatatggttgtgattgcgactggc

SEQ ID NO: 3816 - DNA, 459 bp, Zea Mays
gaaattaaccaccaaatcgagttgaccggcggaagaaagagttggcttccccgtcaagtcacaaccacccagagactcaccagtcaccaccccagggccagccgcacgtttagccgggctaaacaaacacgggcgcacaatcggaactcgctgcactgcttggaatccaacgagccaatcattcaaatcctcccgggaaccgcgttgagcagggcacggtcgattggatctagggtgagggtccgtcgccgaagaaactcgcaggcggtcacgaggaggcggcgggggagggcgggggagatggcctcggaggagatgacggcgacggaggtggctgcgctgctggacttgaagccgcacccggagggcggcttctacaccgagaccttccgcgacggctccatcacgctcaccacgtcccagctcccgccccactttgctctgggtggtgatccttcg

SEQ ID NO: 3817 - DNA, 1705 bp, Zea Mays
  misc_feature (1704)..(1705): n is a, c, g, or t
cctccctccccagtcccccttccccaccaaggcagcaacccgcaaatcaaaaccctactccgcgcgcgctctctcacccgcctccatggacggcgcctcctccagcctccctctcccccaaccaccgccgcaggtctacctccgccgccccgtgccgccgcccggcccgccgcttcaggctgctcctagggtccagccgttcagcgcccctgcgcccatccccatcttctcctcgaagccccgcgccgctgtgaggtccccgattcctcctcctcatcttcctgctgctgttacttcagctcccgctcccctggcggccacagcggaggctccatctcggccgccgcccgcatccactgaccagccgccccagcagcaaactggtgcgatgcccccgcctccggctccagcaccggcggggaaggggggacccaagcccaaggcacagttgaatgagcaaaacagtggagaatattctcaatctgaaaacaacgtagtagaaactgcacaagggcatgataaggagactacccctggacctgtaaaagctacaaagaggataaaaaaactaaaggcttctaaacacaacttgaacaacacaaattctggagcaattgaaggagatgctgatccttctttatcctcattaaaccactgccgctatgacagctcactaagtctgctgacgaagaagttcatcaacctgcttcaaggagctgaagatggagcccttgatttgaataaagcagctgagacgttggaggtgcaaaagaggaggatatatgatataacaaatgttctagaaggtgttcatttaattgaaaagggacttaagaatatggttcgctggaagggatttgacatatcgaagcctaaggatatagaacgccaaatttcttcattgaaggaagaacttgaatctctttatgatgaagagttaaggttggatgacgaaataagggaagcaaaagaaaaactacaagctctcgccctagatggggataaaagaaagaagatataaataagattcctcactttcagagatccactatgatcgctataaatgctcctcgtggaacttgtgttgaagttccagaccctaatgcggatcagtacatgtatgggaatctgggtttgcaggagaagcactacaaaattgtcctgagaagttcaatgggtcctgttgattgctatttgataagcggtgaccatgaggatatatttaaccagggccagctggtggcagcagacagattaaaacctgcagttgctactgatagttctcaagatttgcagcagatggattgtgatcctaatcaggcaagtaatggtggctgcatgcatgcagcagaaccatccagaaagcaagaaattggcattttgagaatcgttccatcagatgccgacgctgatgctgattactggcttgcttctggcgttgacgttagtatgacagatgcttggggcacgtagtggatggatcctcggagttagggctcttaacctgccccttagacagacaaaatagaatgagtctgcagtgcacaattgcattggggctggatcagtaggatacctttagtctccatgctctaggcccgttaactaacaaatcagagggtacatggtaggcagtagatcttgtacattggcggcatgattgtagttgttactctgtttcatcgacagttaagatagaatcann

SEQ ID NO: 3818 - DNA, 1746 bp, Zea Mays
  misc_feature (1745)..(1746): n is a, c, g, or t
cccgccccgcgtcccgcgcccgcttcgttttgcttccatctcctccctccccagtcccccttccccaccaaggcagcaacccgcaaatcaaaaccctactccgcgcgcgctctctcacccgcctccatggacggcgcctcctccagcctccctctcccccaaccaccgccgcaggtctacctccgccgccccgtgccgccgcccggcccgccgcttcaggctgctcctagggtccagccgttcagcgcccctgcgcccatccccatcttctcctcgaagccccgcgccgctgtgaggtccccgattcctcctcctcatcttcctgctgctgttacttcagctcccgctcccctggcggccacagcggaggctccatctcggccgccgcccgcatccactgaccagccgccccagcagcaaactggtgcgatgcccccgcctccggctccagcaccggcggggaaggggggacccaagcccaaggcacagttgaatgagcaaaacagtggagaatattctcaatctgaaaacaacgtagtagaaactgcacaagggcatgataaggagactacccctggacctgtaaaagctacaaagaggataaaaaaactaaaggcttctaaacacaacttgaacaacacaaattctggagcaattgaaggagatgctgatccttctttatcctcattaaaccactgccgctatgacagctcactaagtctgctgacgaagaagttcatcaacctgcttcaaggagctgaagatggagcccttgatttgaataaagcagctgagacgttggaggtgcaaaagaggaggatatatgatataacaaatgttctagaaggtgttcatttaattgaaaagggacttaagaatatggttcgctggaacctaaggatatagaacgccaaatttcttcattgaaggaagaacttgaatctctttatgatgaagagttaaggttggatgacgaaataagggaagcaaaagaaaaactacaagctctcgccctagatggggataaaagaaagtcgttatatcttttgaaggaagatataaataagattcctcactttcagagatccactatgatcgctataaatgctcctcgtggaacttgtgttgaagttccagaccctaatgcggatcagtacatgtatgggaatctgggtttgcaggagaagcactacaaaattgtcctgagaagttcaatgggtcctgttgattgctatttgataagcggtgaccatgaggatatatttaaccagggccagctggtggcagcagacagattaaaacctgcagttgctactgatagttctcaagatttgcagcagatggattgtgatcctaatcaggcaagtaatggtggctgcatgcatgcagcagaaccatccagaaagcaagaaattggcattttgagaatcgttccatcagatgccgacgctgatgctgattactggcttgcttctggcgttgacgttagtatgacagatgcttggggcacgtagtggatggatcctcggagttagggctcttaacctgccccttagacagacaaaatagaatgagtctgcagtgcacaattgcattggggctggatcagtaggatacctttagtctccatgctctaggcccgttaactaacaaatcagagggtacatggtaggcagtagatcttgtacattggcggcatgattgtagttgttactctgtttcatcgacagttaagatagaatcann

SEQ ID NO: 3819 - DNA, 424 bp, Zea Mays
cttcttggactcttggaaaaggtgaagatcaatgcacctcatttctgccctcagttgctcatggttgatggaaatggattgctccatccgcgaggttttggtttagcttgtcatctcggcgttcttgcagacattcctactgttggagttggaaaaaatctacatcacgtagatggccttaaccaatcagaagttagaagactgctcggatcaaaagagaactgcaacagggaactggttttgttgactggacagtctgggacaaaatggggcatgccacggcgatagtgaaatcttgctgtagataccgtgttcctgagcctacaaggcaggcggatataagatcaaaggtcttcctgcagaagctccaaaagccacggcagtgacaggacttcctttttgttttttttcctcaaaaaaaaaa

SEQ ID NO: 3820 - DNA, 3771 bp, Zea Mays
tccagatcgaaatttctctcttcaccaaacacacgctctctctccccttcccatctccttcctcccgccccagatccgagcccggcgcccgagttcatggcgagcgacagcgacgtcgacgaggacgagctcctgcagattgcgctgcaggagcaggcggcgcgggacctcagccaccagcgcccgcccgccgccaacaagcccgttgtcaacctcgtccgcccacccgcccccaatgctcgcggcggcaacgccagggccgggggcgccgcagcgaaggcgcgccagcccagccgcggcggcgacgaggacgacgactcggaggtcgagctgctctccatctcctccggcgacgaggacgacaatccccgcgcccgcggcccgccgccgccccgcgggggcgggggtggacgcgccggagcgcggagggccgcgtcacgggacgatggggacttcgacgatgaggagcccagaagctggaagcgcgtcgacgaggcagagcttgctcgcagggttcgagaaatgcgtgaagcaaaggtggctcctaacattcaagaacttgatcagaaagcagcagctgctgctgcagctgctgctcgaaaggccctcacgagtgtacagactttaccaaaaggagttgaggttttagatcctttgggccttggtgtcattgataataaatccctgcggttgatcactgacgcttcagtaagttctccaatttcaagggagaagtctcaaggtttggaccccaatatgcgagacaaagttatctattcatctccaaattttgatcccaaagttttcctttcgtgggtccacaaagacacgagcgctgctgacttagaggctggtgctctcaccttgaaaactgatctcaaagggagaacacagcagaaaaaacagttagtcaaggagaacttcgattgttttgtctcgtgcaaaactacaatagatgacattgagtcgaaattgagacagatagaggaagatcctgaaggtgcaggtactgctcacttgtattcagtgacacaaaaaattagcggtgtggcaaatcgtgcatttgagcctctatttgagaggcaggcccaagctgaaaagatcagatctgttcagggaatgcttcaaagattccgaacactatttaacctaccaagtgcaatccgtgggaacattagaaaaggagaatatgatcttgctgtcagagagtaccaaaaagcaaagtcaattgttcttccttctcatgtggggatactaaaacgtgtactcgaagaggtcgaaaaggtgatgcaagaattcaggggcatgctttataagtccatggaggatcctcatcttgatcttgctgagattgagaacattgttcgtctattgttggagttggaacctgaaacagatccagtgtggcattatttaaatattcagaatagcaggattcatggattgtttgaaaagtgtactcaagatcatgactcgagaatggaagttttgcaaaataaaattcgcgaaaaagtgctctctgattcgaagtggaggcagctgcaacaagattcaaataaatctttgtcaacaaactttatggctgaggaagctgatagtttaagggccacctacattcgtaggctaacttctgtactgatccagcatgttccagctttctggagattagctttatctgttttcagtggaaaatttgccaaggcagcttctggtaacgtagtttctgattttgatgtgaatgcaaagccgactgcaaataagaatgatgaaaaaggtggagaagtaaagtacacaaaccacactcttgatgaagttggtagtatggttcaggctactatatcggcttttgacactaaggttcagagtaccttccgtgattttgaggaatgcaacattctttgtccatacatgagtgacactataaaagaaatagctaaggcctgtcagactcttgaagggaaggattcgtctccaactgctgtaaaaatgttgcgcacacttcattttgaaatgacaaagctttacattctacggctttgttcatggatgcgggcaacaacaaaggagatatcaaaagatgagacttgggttactttatccacccttgagagaaacaagtcccagtatgcgatttcatgcttgcccctggagttccgtgacataacagtttcagctatggaccgaattgatactatgattcttaatctgatgagcgagactgcgaagtcatatgacatttctcaaccacttcaggaaatcaatgagtctgttagacttgcatttttgaattcctttctggactttgctggttatctggagaggtttggaggtgaactaaccgagaacagaccaaacaaagaaaacaattatgtctcaaatggatacataaatggtactagagaaacatttgttaacacagatggagatttgcacaaaaagctgctggttgttttgagtaacattgggtattgtaaagctgaactttcagaagaactttacagcaaatatagacacatttggtctccagtcaggaataatgaggagcgaagttctgacatgcgagacctgaggacttctttctctgcacttgaagagaaagtcctggaccaatatacttttgcaaagtcaaacttgatcagaagtgctgcacaaagttatcttttggattctgggatttattggggagcagcgccaatggtaaagggcattcgagatgcaactcttgacttactgcacatccttgtagcagtacatgcagaggtatactctggcgctcggcctctgttggagaagacaatgaaaattttggttgagggtttggtcgacatctttcttagtgtttttcatgagaataagaccaaagatattagattgttggatgcgaatggtttttgtcaactgatgcttgagcttgagtattttgagactgtactgcacacgtacttctcacctgaggcgcaacaggctatgaaatctttacaagagaatttgttggaaaaggcctgtgaaagtgttgcagaagccatggaaaatcctggacaccaacgtcgaccaacccgtggcagtgaagatacagcatcggatgacagacagccatcagtatcacctgatgatttgcttgtgcttgctcagcagtgcagtagtgatctgctgcaaggggagttggagaggactcgattgaacatagcctgtttcatggagtcgacccttcaaccaacagctgcgccagcaggcccaaagcctgccgcacattcttcttaccaagcacagcatgctcccgtccaaacgtcctcgcctagttttagaaggcagcagactggtacaagttcccctgtagtctccaggcggcgccggtgagcttagtgcatctttccatcattggcgtagcctcttcccggagtttccttccttttcccccctcacatgtgtgctttttttaatcacttgtaattgtcatcctgttgtcatgtgttacgaatttcgatccattcttttggtgttgtataagatgaaaaggaggagtacagtactggtgctgctgcacgggatcatggaattgtataatatcgacgagtcaaatattattgctgcttgaagataccaccacagctttatgtatatggaattctggagttgtcggtctgcgccaacttccttcctgcggtcgtcaccgcatgtttgtacattcgtcgcttggacagttttatgtatcccgagatttgttaatattgtatcagttggttcgtgattgttgatatgtctgcatgcttt

SEQ ID NO: 3821 - DNA, 3840 bp, Zea Mays
cgcagtttaacgccatcaagatcgcaagtccagatcgaaatttctctcttcaccaaacacacgctctctctccccttcccatctccttcctcccgccccagatccgagcccggcgcccgagttcatggcgagcgacagcgacgtcgacgaggacgagctcctgcagattgcgctgcaggagcaggcggcgcgggacctcagccaccagcgcccgcccgccgccaacaagcccgttgtcaacctcgtccgcccacccgcccccaatgctcgcggcggcaacgccagggccgggggcgccgcagcgaaggcgcgccagcccagccgcggcggcgacgaggacgacgactcggaggtcgagctgctctccatctcctccggcgacgaggacgacaatccccgcgcccgcggcccgccgccgccccgcgggggcgggggtggacgcgccggagcgcggagggccgcgtcacgggacgatggggacttcgacgatgaggagcccagaagctggaagcgcgtcgacgaggcagagcttgctcgcagggttcgagaaatgcgtgaagcaaaggtggctcctaacattcaagaacttgatcagaaagcagcagctgctgctgcagctgctgctcgaaaggccctcacgagtgtacagactttaccaaaaggagttgaggttttagatcctttgggccttggtgtcattgataataaatccctgcggttgatcactgacgcttcagtaagttctccaatttcaagggagaagtctcaaggtttggaccccaatatgcgagacaaagttatctattcatctccaaattttgatcccaaagttttcctttcgtgggtccacaaagacacgagcgctgctgacttagaggctggtgctctcaccttgaaaactgatctcaaagggagaacacagcagaaaaaacagttagtcaaggagaacttcgattgttttgtctcgtgcaaaactacaatagatgacattgagtcgaaattgagacagatagaggaagatcctgaaggtgcaggtactgctcacttgtattcagtgacacaaaaaattagcggtgtggcaaatcgtgcatttgagcctctatttgagaggcccaagctgaaaagatcagatctgttcagggaatgcttcaaagattccgaacactatttaacctaccaagtgcaatccgtgggaacattagaaaaggagaatatgatcttgctgtcagagagtaccaaaaagcaaagtcaattgttcttccttctcatgtggggatactaaaacgtgtactcgaagaggtcgaaaaggtgatgcaagaattcaggggcatgctttataagtccatggaggatcctcatcttgatcttgctgagattgagaacattgttcgtctattgttggagttggaacctgaaacagatccagtgtggcattatttaaatattcagaatagcaggattcatggattgtttgaaaagtgtactcaagatcatgactcgagaatggaagttttgcaaaataaaattcgcgaaaaagtgctctctgattcgaagtggaggcagctgcaacaagattcaaataaatctctggaagttgattctaccattggtgattctcctcgagttgatcagttgtcaacaaactttatggctgaggaagctgatagtttaagggccacctacattcgtaggctaacttctgtactgatccagcatgttccagctttctggagattagctttatctgttttcagtggaaaatttgccaaggcagcttctggtaacgtagtttctgattttgatgtgaatgcaaagccgactgcaaataagaatgatgaaaaaggtggagaagtaaagtacacaaaccacactcttgatgaagttggtagtatggttcaggctactatatcggcttttgacactaaggttcagagtaccttccgtgattttgaggaatgcaacattctttgtccatacatgagtgacactataaaagaaatagctaaggcctgtcagactcttgaagggaaggattcgtctccaactgctgtaaaaatgttgcgcacacttcattttgaaatgacaaagctttacattctacggctttgttcatggatgcgggcaacaacaaaggagatatcaaaagatgagacttgggttactttatccacccttgagagaaacaagtcccagtatgcgatttcatgcttgcccctggagttccgtgacataacagtttcagctatggaccgaattgatactatgattcttaatctgatgagcgagactgcgaagtcatatgacatttctcaaccacttcaggaaatcaatgagtctgttagacttgcatttttgaattcctttctggactttgctggttatctggagaggtttggaggtgaactaaccgagaacagaccaaacaaagaaaacaattatgtctcaaatggatacataaatggtactagagaaacatttgttaacacagatggagatttgcacaaaaagctgctggttgttttgagtaacattgggtattgtaaagctgaactttcagaagaactttacagcaaatatagacacatttggtctccagtcaggaataatgaggagcgaagttctgacatgcgagacctgaggacttctttctctgcacttgaagagaaagtcctggaccaatatacttttgcaaagtcaaacttgatcagaagtgctgcacaaagttatcttttggattctgggatttattggggagcagcgccaatggtaaagggcattcgagatgcaactcttgacttactgcacatccttgtagcagtacatgcagaggtatactctggcgctcggcctctgttggagaagacaatgaaaattttggttgagggtttggtcgacatctttcttagtgtttttcatgagaataagaccaaagatattagattgttggatgcgaatggtttttgtcaactgatgcttgagcttgagtattttgagactgtactgcacacgtacttctcacctgaggcgcaacaggctatgaaatctttacaagagaatttgttggaaaaggcctgtgaaagtgttgcagaagccatggaaaatcctggacaccaacgtcgaccaacccgtggcagtgaagatacagcatcggatgacagacagccatcagtatcacctgatgatttgcttgtgcttgctcagcagtgcagtagtgatctgctgcaaggggagttggagaggactcgattgaacatagcctgtttcatggagtcgacccttcaaccaacagctgcgccagcaggcccaaagcctgccgcacattcttcttaccaagcacagcatgctcccgtccaaacgtcctcgcctagttttagaaggcagcagactggtacaagttcccctgtagtctccaggcggcgccggtgagcttagtgcatctttccatcattggcgtagcctcttcccggagtttccttccttttcccccctcacatgtgtgctttttttaatcacttgtaattgtcatcctgttgtcatgtgttacgaatttcgatccattcttttggtgttgtataagatgaaaaggaggagtacagtactggtgctgctgcacgggatcatggaattgtataatatcgacgagtcaaatattattgctgcttgaagataccaccacagctttatgtatatggaattctggagttgtcggtctgcgccaacttccttcctgcggtcgtcaccgcatgtttgtacattcgtcgcttggacagttttatgtatcccgagatttgttaatattgtatcagttggttcgtgattgttgatatgtctgcatgcttt

SEQ ID NO: 3822 - DNA, 2129 bp, Zea Mays
cgctcgcctcgcccgcgcctgctttctgattcaaatggttggagagcatcttctgcaccacgcacctactggcctcccccaccaactgaatctgagagcaatggctacttgcgcgtccggtgcaatggtggcttgaaccaacaacgtagtgcagtatgattaagacaagaaacttatctctaaggcggcatgattcatcgtgcaatttttatattcatggtaacattgctaaggcatttgagatcactgctgttttgattctgtagatatgtaatgctgttgttgctgcacggatcatgaatgctacactggtgctgccagaattagacacaaattcattctggcatgatgaaagtggctttgtaggtatttatgatgttccccacttcatcaagacactgaaatatgacgtccgaattgttatgagcattcctgaaatcactacaaatggaaagaccaagaagctcaaaggccagcagcttcggccaccaagagatgcaccggtatcttggtatgcaactgatgctttggagacgatgaagaagtatggagctatatatttaagtccattttcacaccgtttggcagaagatattgataatccagagctccagagattgagatgcagagtgaattaccatgcactacgattcaagccaaatatcatgaaaacaagcagtgagatagtgaacaagctccgctcagaaggccatttcatgtcaattcatcttcgatttgagttggatatgcttgcatttgcagggtgctttgacatattcaaacctcaagagcaaaaaattctgtggaagtacagggaagaacattttgcagaaaaggaacttatccccatgaaaatcaggctcaaaggaaagtgccctttaactccagaagaggtaggttttattctacgtgccatgggatttgacaatagaacacgcatttaccttgcctctggcgagctctttggagggaaacgtttcatgaagccattcaagaccatgtttccacgcttagagaaccacagcacagttggacctggaaagctggaagagaatacccaagggctagcaggatcagcagttgactacatggtttgcctcctgtctgacattttcatgcccacatatgatggcccaagcaactttgcaaacaacctcatgggccaccgtatgtactacggtttccggaccacaatcacgccgaacagaaaggctcttgccccgatactcatcgacaggatggaaggccgccacattggctttgagagaatcaggagggtgatgtccaacacccattttggtgccccccacaagcgcgtccatccagagtctttctacacgaactcatggcctgagtgcttctgccagacggatgccaagaaccatgcagaccggtgtccccctgataacataaatgacgttctggaaagccagttccagagcgaagaagaaatggaagaagcaagagcctctaatcagactgacccatccagccaaatagaagagctgacgatttaactgatcaactagggattactgctcggaagcattttgaacacttggaatggtcatcagagaaatccagatacaactatattcaaggaatgtattaattgatggctcaaactggagcggttgacatgctgaggtgtggtatctggtggtattcagggagagcattgaaccagattttgaataggtctggtcatatatggttttgaggagaaaacaatatgtatgtcaatagttttcctcattgaagagtgaagttgtgcgggttgtgtaggtggcagtgacaaaagtgagaaacctttgcgcaatatggtaccatccggtgtataaaggccccggttaggctggtgccagtgcaccctttgtctttcgtccctggcatgtcagctattgactccactcttgtccttactgttttagtgcacaactgcacaactcgcagcgggatatagcttcggcatatagtcacattaacttttctatttcagaattaagtaatttacgtgaatttattttaatgctcagaaaccacataacatgatatttttattaaagtaaaaattacaaagggtatgataattaaaataaaactatatgctaattaaaaaataacataaa

SEQ ID NO: 3823 - DNA, 2274 bp, Zea Mays
ctgcgcgccgcgcgatcccggggccacgcccacgcgcaactccattactccgctcgcagccagatctgagtcctcactctgtctcttcctcagtcccggcatcagcgctcaaaccctaacacgccacgcgatcccgatgcgcaggggtctgggcagcgaggcatcgttgcgccggcggcgcgggccggcgcggctttgggtggcagtggcggcgctggtggtcggcaccgtgtgcctcttctcctcctcttcggtcggcctgttgggcgcctcttacagggtccagattcaaatggttggagagcatcttctgcaccacgcacctactggcctcccccaccaactgaatctgagagcaatggctacttgcgcgtccggtgcaatggtggcttgaaccaacaacgtagtgcaatatgtaatgctgttgttgctgcacggatcatgaatgctacactggtgctgccagaattagacacaaattcattctggcatgatgaaagtggctttgtaggtatttatgatgttccccacttcatcaagacactgaaatatgacgtccgaattgttatgagcattcctgaaatcactacaaatggaaagaccaagaagctcaaaggccagcagcttcggccaccaagagatgcaccggtatcttggtatgcaactgatgctttggagacgatgaagaagtatggagctatatatttaagtccattttcacaccgtttggcagaagatattgataatccagagctccagagattgagatgcagagtgaattaccatgcactacgattcaagccaaatatcatgaaaacaagcagtgagatagtgaacaagctccgctcagaaggccatttcatgtcaattcatcttcgatttgagttggatatgcttgcatttgcagggtgctttgacatattcaaacctcaagagcaaaaaattctgtggaagtacagggaagaacattttgcagaaaaggaacttatccccatgaaaatcaggctcaaaggaaagtgccctttaactccagaagaggtaggttttattctacgtgccatgggatttgacaatagaacacgcatttaccttgcctctggcgagctctttggagggaaacgtttcatgaagccattcaagaccatgtttccacgcttagagaaccacagcacagttggacctggaaagctggaagagaatacccaagggctagcaggatcagcagttgactacatggtttgcctcctgtctgacattttcatgcccacatatgatggcccaagcaactttgcaaacaacctcatgggccaccgtatgtactacggtttccggaccacaatcacgccgaacagaaaggctcttgccccgatactcatcgacaggatggaaggccgccacattggctttgagagaatcaggagggtgatgtccaacacccattttggtgccccccacaagcgcgtccatccagagtctttctacacgaactcatggcctgagtgcttctgccagacggatgccaagaaccatgcagaccggtgtccccctgataacataaatgacgttctggaaagccagttccagagcgaagaagaaatggaagaagcaagagcctctaatcagactgacccatccagccaaatagaagagctgacgatttaactgatcaactagggattactgctcggaagcattttgaacacttggaatggtcatcagagaaatccagatacaactatattcaaggaatgtattaattgatggctcaaactggagcggttgacatgctgaggtgtggtatctggtggtattcagggagagcattgaaccagattttgaataggtctggtcatatatggttttgaggagaaaacaatatgtatgtcaatagttttcctcattgaagagtgaagttgtgcgggttgtgtaggtggcagtgacaaaagtgagaaacctttgcgcaatatggtaccatccggtgtataaaggccccggttaggctggtgccagtgcaccctttgtctttcgtccctggcatgtcagctattgactccactcttgtccttactgttttagtgcacaactgcacaactcgcagcgggatatagcttcggcatatagtcacattaacttttctatttcagaattaagtaatttacgtgaatttattttaatgctcagaaaccacataacatgatatttttattaaagtaaaaattacaaagggtatgataattaaaataaaactatatgctaattaaaaaataacataaa

SEQ ID NO: 3824 - DNA, 2279 bp, Zea Mays
cggggccacgcccacgcgcaactccattactccgctcgcagccagatctgagtcctcactctgtctcttcctcagtcccggcatcagcgctcaaaccctaacacgccacgcgatcccgatgcgcaggggtctgggcagcgaggcatcgttgcgccggcggcgcgggccggcgcggctttgggtggcagtggcggcgctggtggtcggcaccgtgtgcctcttctcctcctcttcggtcggcctgttgggcgcctcttacagggtccaggatgttgatgtaaataagttgtggagaactgcagattcaaatggttggagagcatcttctgcaccacgcacctactggcctcccccaccaactgaatctgagagcaatggctacttgcgcgtccggtgcaatggtggcttgaaccaacaacgtagtgcaatatgtaatgctgttgttgctgcacggatcatgaatgctacactggtgctgccagaattagacacaaattcattctggcatgatgaaaggtatttatgatgttccccacttcatcaagacactgaaatatgacgtccgaattgttatgagcattcctgaaatcactacaaatggaaagaccaagaagctcaaaggccagcagcttcggccaccaagagatgcaccggtatcttggtatgcaactgatgctttggagacgatgaagaagtatggagctatatatttaagtccattttcacaccgtttggcagaagatattgataatccagagctccagagattgagatgcagagtgaattaccatgcactacgattcaagccaaatatcatgaaaacaagcagtgagatagtgaacaagctccgctcagaaggccatttcatgtcaattcatcttcgatttgagttggatatgcttgcatttgcagggtgctttgacatattcaaacctcaagagcaaaaaattctgtggaagtacagggaagaacattttgcagaaaaggaacttatccccatgaaaatcaggctcaaaggaaagtgccctttaactccagaagaggtaggttttattctacgtgccatgggatttgacaatagaacacgcatttaccttgcctctggcgagctctttggagggaaacgtttcatgaagccattcaagaccatgtttccacgcttagagaaccacagcacagttggacctggaaagctggaagagaatacccaagggctagcaggatcagcagttgactacatggtttgcctcctgtctgacattttcatgcccacatatgatggcccaagcaactttgcaaacaacctcatgggccaccgtatgtactacggtttccggaccacaatcacgccgaacagaaaggctcttgccccgatactcatcgacaggatggaaggccgccacattggctttgagagaatcaggagggtgatgtccaacacccattttggtgccccccacaagcgcgtccatccagagtctttctacacgaactcatggcctgagtgcttctgccagacggatgccaagaaccatgcagaccggtgtccccctgataacataaatgacgttctggaaagccagttccagagcgaagaagaaatggaagaagcaagagcctctaatcagactgacccatccagccaaatagaagagctgacgatttaactgatcaactagggattactgctcggaagcattttgaacacttggaatggtcatcagagaaatccagatacaactatattcaaggaatgtattaattgatggctcaaactggagcggttgacatgctgaggtgtggtatctggtggtattcagggagagcattgaaccagattttgaataggtctggtcatatatggttttgaggagaaaacaatatgtatgtcaatagttttcctcattgaagagtgaagttgtgcgggttgtgtaggtggcagtgacaaaagtgagaaacctttgcgcaatatggtaccatccggtgtataaaggccccggttaggctggtgccagtgcaccctttgtctttcgtccctggcatgtcagctattgactccactcttgtccttactgttttagtgcacaactgcacaactcgcagcgggatatagcttcggcatatagtcacattaacttttctatttcagaattaagtaatttacgtgaatttattttaatgctcagaaaccacataacatgatatttttattaaagtaaaaattacaaagggtatgataattaaaataaaactatatgctaattaaaaaataacataaa

SEQ ID NO: 3825 - DNA, 1801 bp, Zea Mays
tttttttttgtttaaagaaaagaatttgaaacagagatcaaggagtggggaggttgcaatgcaagggggctctgacacccgtggcgcgtggttacctaccgctaccggcaagcgtgattatcattgacagactggggcgacgcctcctgagtcctgacgcctgttcaaataaaatcgaattcaaatgttcactaccacccatcccgaaagagccccagcccgcagggagtcaagtagtcaaccgttctgcccgctccccctcacacaaaaggcaaaccacccgccaccgtcggcagacggcaactactttcatttcgtcgtcgtcgcccgcccccacccgctcctccactccaccaccaccggacagatacggatgtctccgcccgcacatccacttcacaaacgaaaacccgcagcaaacgctagcagcggcggcgccggcagttggtagccgcgaccgagacacggcgggtgacctgccccgccgcagtcggggtgtatgtattaccaccgccagaattccaggagacgaggatcgaggaggcaccgatccgtagcggcgatatcgtagagccgctggtctcacgccgcaccgagacaatggcagaccagttagggtcttacactattagatcccatggaatgatattggcaaggttgcacatacatgatgactgacttgagatatcctatgaagggcaatacagtgccattttgggctgttccactgattggaattatactgccttgggccatctttgttgggatttacttcaaaaagaagaatttttatgatttgcaccatggcatactggggattctatactcagtgctgataactgcagtgattactgatgcaattaaggatggtgttggacggcctcgtccagattttttctggcgctgtttccctaatggaaatgatgtttatgataacattactactggtgttatatgcaatggagtgaagagcgtaatcaaggaaggccacaagagctttcccagtggacacagttcatggtcttttgctggtctaggcttccttgcatggtacttagctgggaaactcacagcctttgaccgcaaagggcatattgcgaagctatgcattgtgttcctgcctctccttactgccgcacttgtggctgtttctcgagtggacgactactggcatcattggcaagatgtatttgcagggggtcttataggtcttacagttgcttcgttttgctacctacagtttttcccatatcctttcgatggcgatgctttgtggcctcacgcatacgcggtccggttagccgaggaggggaacagcagaaatgcgaactcatacagcgtgagaccaaccgaaatcgaaacagtcgatattcctgggcacggtgggatcatcaccctaagagatactctaaacgatgtggagtctggcagtgccaggagattgtgagatgggtctgcaggtgtggagattgatgtctcagataccatgggagttgcttgcatatgtgtacaggtagatctattgtagagctgttgactgctgccaccgtgataggggagggttgtttagacgggcctggcagtaaatttacttggtagggtgctgtttcttctgagaacctttggcttttgtttgtatatatgctcttatcaaagtgttgagttcagagttgtggttaaagtttgtttgctgacactctttgtaaccagtttggtcgctgcattcagcaactatgatctgatcagatgttgcccagtctactgttgttcttatattaagcgtgaaattcatttgtcacca

SEQ ID NO: 3826 - DNA, 2221 bp, Zea Mays
cgacaaggttggtagaggacgcgcacccggggtggagctgagagcaacaggagctcctgcggcgaattcgggccccgagtacgccggttcaggcggccgccgccggtggaattgtgccagtcgaggtggcctgctggtgcggcgggagtttgcgagtagggcggttccggttttgagtgagcgaaggtgttgttgggggcgtggatctggccggcggcgggcgatgggaaggagggactagggctcgattggagggaaaggcgtgatccatgggcggatgcttctcgcaggaggagcaccggctccagagcaggccagctgaagctgctggaccagacggactgcagaagtcaaaatctgattctaaagctacagcaagtgttcttgctccaccaaaagctgtggtggatctgcaagtggaaggatatggaaatgtgaatattttcacatatgacgaattgagcgcagccacaaaaaacttccgaccagatcaaattcttggagagggtgggtttggagttgtttacaaaggtgtaattgatgaaaatgttagagcaggtttcccatccaggcaggttgctgtgaaagaactaaacccagagggttttcaaggggacaaggagtggctggcagaagtcaactatcttgggcaacttagtcatccaaatcttgttgaactgattggctattgctgtgagggttcacatagactgcttgtgtatgagtacatggcttgtggaagcctcgaaaagcacctttttcggcgggtttgccttaatatgccatggtcaacacgcatgaagattgcattgggtgctgcaagggggctcgagtaccttcacagagctgagagatccatcatttatcgagatttcaagacatcaaacatcttgctagatgcggattataatgctaagctttcagactttggtctcgcaagaacaggtcctagtggagaccaaacccacgtgtcaactcgtgttatgggaacttatggatacgcggctccagaatatgtcatgactgcacgaagtgatgtttatggctttggagtcgtgcttctagagatgattattggaagaagggctgtggacgatagccggccgagccgtgagcataacctagttgactgggcacggcccctcctcgtccataacaggaagctgttccggataatcgatccaagaatggaagggcagtactccaccaaggctgccaccgaggtggcaagccttgcataccgctgcctgagccagaaccccaaaggacgaccaaccatgagccaagttgttgagacctttgaggccgtgcagaacatgcctgaatgccaggacatactcctccagaacggcatcacaggtgccgtgacgctctacgaggtcccaaaggagcctgcagacagagttgagctggagaaggccaagcaggaaccggcagtaaagaccgccgcaatcccgcccgtgaacggaaagccggccccccagagcaggcgaacgcggcctgggaatggccggagcaagagcgagccatcgttggagtgtaagatgtacatcccatcaccagactctgacgaacagcagctcggcctggaggcactggcgtccccaaatggcagcatgaaggaccatcctgacgaggatttgtacaagatataaaatcagatcagttttttttttttcaaacaacatgagccctcgttgctcgccttttgcgccgccaccccagctctcaaagatcggtcagttacaattttttctctgatagccaccggcctcgctagggttcttattcttccgattagcaattgtatgtagagggagagttgtgatggaaagcatgtgtgtgcttgccatgacgatgctgtagagatctgatacacttctttctggggaatttccactccaaaaatggaagttgagagatgtgtcctgacgattggtgcgttttacccgtgtgttgagtttacttgtaaagatgcttcttcgttgtaatcttcagttctgcgggaaatcaacaccagcatagaaattgatagattagtcactgtgttgtcaatttgttcaaatctccaagcggtgaagtttttatttatctatttatttttttcgcacaactagagtggtaagttcatgaatattagttcaaagcatctgtatcctactttataaatccgtacatatctgagaagttttaaaacttaatctcaaggttgatataaaat

SEQ ID NO: 3827 - DNA, 1390 bp, Zea Mays
cgagcacgccggaagcggtcgaaactcgaaagggacaaagcagcgagcggcgccgggttccccctcccttcctcgcccctgatctacgccgatcgaaggccgggcggcgatgcttccattagatcagcgtcgaggacgtccgctgctgctccctgtggctgcggttttgcagcataagaaatatagctacacacagctcaatgcttgtcaggatcgatggcagatagggagcatcgaacagtatttgtcacagtggggacgacatgctttgatgctcttgtcatggcggtagattctccagaagtgaagaaggctttattgcaaaaaggttatagtaatcttcttattcagatgggccgaggaacatatgttccattgaaggtctcaggagatgctacccttcaagttgatcatttcacattttcaccaagcatcgctgacaatatgagaacagcttccctagttatcagccatgcaggttcaggaagcatatttgagactctgcgactcggcaaaccactaatcgttgttgtaaatgaagatttgatggacaatcaccagagtgaattagcagaagaattggctgaaaggaagcatctcttctgtgcacgcccacaaacattgggagagaccatccgggcaatggacctagagacactggttccttatgagccaggggatgccaaaccagtcgtcaccctgatcaacagatttcttggctttccagttgattgacgaatctattcggttgttcttcaatccatgtggattagatggtattgcgtcggtttaattccatagcaagtcaaaatacatcctaaacccactcaatccactccaatccatatggaatcatgtctaaacgaacaaggtctactcctagaccttgttcggttatttcaattccatgtggattggagtatattggaatggattgtgatgaattttgatttgctataggtttaaaccgactcaataacactcaatccacatggatcaacagtaaaacaaacaagcccttaatgagtctagttgatataaaatggattaactgacatggaaatagcagaccgttctctttgcaattttcatccattaaggcgttagctttattgcagtggccataagtcctcaacctataaggatgtttatattttcatcaaattatttaaggagtcaattcttctggtggtatgcttttgttcgttgacatgtgaagacggtttaatctcaacatgtactattggttctgttttctttgaaacagctcatggaggtatggtatccatgtgtttgtaggagtaaaaatgcatgaatgtatgcgagtgttttaagtagactatctataaattcctaacattttaagacagcagaacagtcagtttggttc

SEQ ID NO: 3828 - DNA, 1765 bp, Zea Mays
gttttctctgttgtgcttctgagaagggatacgggtctttcacgacttctgacgggagggaagggtgtatgatgatgcgtggtaacgtaattctcaacaccgccgagccatagcaatcatcaccgtcgtagtcgccacctcctctcccggcgtggagtggaagagaacccgtctgcactcataggctggttttgttcggtgggagggcaacttgagtctaagatattcaggggattcaaggaaaagaacaatatcttcatcaacgtggatagatgcatgaagtacagtactttctgttatgcacccagaaatcccaatatcacaccactggcaactgcatcgtttggggacatggctgattcttcaatttttacctttcccagaatccatgtgaaggatccatatcagcgcctcggaatcagcagggaagcatcggaagaagaaattcgggctgctaggatttatctgataagcaagtatggaggccatagtcaagcgctgatgcaattgagtgtgcccatgataggattatcatgcagagtttctttgataggaaaaaaaccaaaaacgaacctcaagaaaaaaattagagaacttagtcagtcacgtgccgtgaaggctattcaaggcagatttcaaacaccacgtagcaaagtcatttggcagacagctattacttttgtcttgcttggagtgcttacccttgctttccctactgaagaagggccaaccctccaggtggccatctcttgtgcagcaaatatctatttcatttatcagagggtcaaaagtggatggcgagcattcttttatgggcttggttctttctttgcttccttgttcctgggcaccttcttgatggtatccctaattcctcctgtactccccggcccaagaaacttggaagtgagcaccgcgtgtgttacttacgtgctccttttcgtatcgccgacattcttgaagtaagagatctccgtgcttccttccatgttagcccaaagtcttgcagaagttataatcatggtatcctgcttcaaatagcttgtacaatccatcagctttttgtttgtttgtttcacgttcgtggagttggaaatggtagcccctcggtgagttgatagtagttttcaggttgccatgtgatatgtagaactttttttttgcccttggaccgtgaggtcttaagcacaaagagtaacacctctctcgtaggagttgtgtggaggcctgtcaacttgcttccgaatagatcatgtatcgtaatatccatgctgaagtcatcggtcgtcttttggatggacatcacgtcacctcgggacattacaacccgtcctccctgaatgctgcggctgaactgtactgatcgcgtttgcaagacaggaactggagggatttcttagggttgctacgcctgatctgatcttggcatcgctcgagttgttgcgctggctttgtcgtctcgtaaaacaatgtgcagcccaccagtgcatcggtgactggcgcatcatcatctgtctcggctatccatccattatctaaggagcgtggaagtccgtgacccagggccactagtggatcaattactgtactggggctggcttctgtcattttggactattaaatagcctgatccggcctctacataagatcactattctacttattagactatagcacatcaatagcttctgtggccggcagtcctgtgttgcatgtgtcgtgatgtcgcgggagatgccgatgttgacgcctcgatcgtttgcgg

SEQ ID NO: 3829 - DNA, 1362 bp, Zea Mays
cgcagccggtgtggctgacgctgaagtgtgctccgctccgcctccgcccgcggccgtacgctcccgagctccacccgtcgcgccccgaccgagatcgtccccggcgatggcttccgcggtggccgcttcgaccgctacgcggttcctgccgcggcttccggacccgtggtggacgcgtcgtgcgcgagcggcgctcccgccgccgccgctcacgtggcggcctctcccgttcacggtgtccgccgcgtcgtcccgccctggggaagcggaaggaggacggcgcgggaggatgcggaggcggcgcgccaggagggcggaacaggaggaaggcgtctcgctaagctctgaaaaggagacggtaaattctactccacgtgctcaacccaaaaagggtgcagaacccgtagcggtgtccagcacgagtgggaaaggctctgccattagaagggtgacacttgtgattcttgctgccgtgctttttggagttagcattgccttgaaggacggggccgagaaggcatcggagtattttgctgggtgtatttattggaacagagtttgtcggtggacaatctctttgtttttgttctggtctttaagtatttcaaagtgccaaatgaataccagaatcgagtactttcttatggtattgctggagctgtggtcttccgggctgtgatgatcatcctaggaacagctaccatccagaaatttgaggcggtgaatttgttgttggctttgatcctgttattcacttcttacaagctctttgctgaagaagaagaagaatctgatctatctgataacttcattgtgaaaacatgccaaaagttcattccagtcactgattattatgatgataatcgttttttcacaaatcaagatggtgtatggaaagctacaccattgctcttgactttggcagtgattgagctgagtgatattgcctttgctattgactcaataccagcagtttttggcgtcacaagggatccacttataatactatcatcaaatatttttgctatttctggtttgcggtcgctctatgtgctcgtttctgaaagcatgggtgaattggagtatctacagcctgccattggtattgtgttgggcttcattgggacaaagatgatctttgacttttttggttatcatataccaacagaagcttcgcttgcaattgtaactacatgtcttagtggaggcgtcatattaagtcttaggaaagcatcaaaagagaagggggacaagtagactgatgcaacaacacatgcagattcaatagcttctttatgttctacatctgaggtgaatttagaagtcaccataacgaggataaaagtacgctggtgctacttc

SEQ ID NO: 3830 - DNA, 1480 bp, Zea Mays
gacgctgaagtgtgctccgctccgcctccgcccgcggccgtacgctcccgagctccacccgtcgcgccccgaccgagatcgtccccggcgatggcttccgcggtggccgcttcgaccgctacgcggttcctgccgcggcttccggacccgtggtggacgcgtcgtgcgcgagcggcgctcccgccgccgccgctcacgtggcggcctctcccgttcacggtgtccgccgcgtcgtcccgccctggggaagcggaaggaggacggcgcgggaggatgcggaggcggcgcgccaggagggcggaacaggaggaaggcgtctcgctaagctctgaaaaggagacggtaaattctactccacgtgctcaacccaaaaagggtgcagaacccgtagcggtgtccagcacgagtgggaaaggctctgccattagaagggtgacacttgtgattcttgctgccgtgctttttggagttagcattgccttgaaggacggggccgagaaggcatcggagtattttgctgggtatttattggaacagagtttgtcggtggacaatctctttgtttttgttctggtctttaagtatttcaaagtgccaaatgaataccagaatcgagtactttcttatggtattgctggagctgtggtcttccgggctgtgatgatcatcctaggaacagctaccatccagaaatttgaggcggtgaatttgttgttggctttgatcctgttattcacttcttacaagctctttgctgaagaagaagaagaatctgatctatctgataacttcattgtgaaaacatgccaaaagttcattccagtcactgattattatgatgataatcgttttttcacaaatcaagatggtgtatggaaagctacaccattgctcttgactttggcagtgattgagctgagtgatattgcctttgctattgactcaataccagcagtttttggcgtcacaagggatccacttataatactatcatcaaatatttttgctatttctggtttgcggtcgctctatgtgctcgtttctgaaagcatgggtgaattggagtatctacaggttatcatataccaacagaagcttcgcttgcaattgtaactacatgtcttagtggaggcgtcatattaagtcttaggaaagcatcaaaagagaagggggacaagtagactgatgcaacaacacatgcaggcataggaatccagcttgctccatatttttggcagatagtcaagttacaaaaataattataataaacacttaaaagccaggtaaacatagtgttttcactaaactaattacttgtataaaaaaatctaacctgacagaatatcttttgatcagtatatgtagtcttagctaatgccttgttcatttaaaaatagattcaatagcttctttatgttctacatctgaggtgaatttagaagtcaccataacgaggataaaagtacgctggtgctacttc

SEQ ID NO: 3831 - DNA, 1658 bp, Zea Mays
gggactgcaacatgatcaaagaggaaaaagtggaagccgccatcatctccatcaggtcgttctcgcttccgtcggtccatccaaggccatgctatcgacacctccgcagtcttcccatcctccagtacattttttcaactgcccgcgcggtagggaaggcaaagggtgggcatgtcgtcctctcctctgcaccacgtcatccacgacgatggtggaggagactgcttcagtcgccattcgttagtctccgttgctcctccacacgcttggtcgtcgtctctacggttggcccaggaatggaggtcgtcaattcaggtcgagtaggagcactctacggctccgcattgctactggtggtccaataatcacaccttcatgatttagtggatttccctcatccatatctccactaacattagaatattccttatcccatcgtcatgaggtcttcctacttttggtctctaaattgtgtatgccttttggagtaatttgctttgtttcgatgcctacatgttagctttgaataaagctaatttccctgcagcttttgaaaaagagttgctgaaaaaaaatcaggtgaatcgcacattctgtaagttctattcgaaagagccaacagacttctacatctgatactgaagaacatagatccaaatgtaatgctaaagaagaaatcacaaaggaccaaacaactagcactaggcaactcaaagcaaaagataatatgccttcgtttgaatctcctccaaaaagagtctttcatgtgatttgaacgctgcgccaacagaaacttggcttctaaatggagctggttgttgaaatgagaggacaaatgaggaatggactgaagtggttgcaacgtaggaaatcaggttgctttatgttacacatgttgtttggtggcaaaaatcagtggtccatcagtgcttcctatggccttcgtttcaaggaccgattcttcttcagtggatgctgacagctagacatcccgaaagtcatctggagagtatagctcggcacatgtagcctcctggagtcgttgacaactcagtgccatctgaatcataggacaactgaagcaaagcgagatagtaatggaagaagaattgaaaagatcaggctgcttgccatcatatatatatacatgggaggaggaggaatagcttcccttgctgtgaggacttgcggctcgacatcattctcactttcttcccacaatctcatggggtggatgatcgccatagccttctctccgacttccaggttctgtactcctaccaaggggcaacgtgaggtgtccacaggggcgaggccgtgcctccgtcccgccgcccccgacaatgatccccaccggcactttgtacgaaagcacaatattaggacttttttatgatcttttatcttttttatttgaaggcacaataggatccaaagaggtaggttcctttttgtcactgatttcatatacttgaataacatgtgttcggtttgaaagagcacataattgcattcctatttttagtccttacatgattactacatagttgtttaccggtttgaggtctgcagatctcaagctcgctcgcactgcagataccttgtagtttatttttttactgcattgcgactaggccttccaatttgacaaacacaat

SEQ ID NO: 3832 - DNA, 2726 bp, Zea Mays
cccgtttaggaccccgaacccgggaaggctctccccttgccaggtgggcctgatgctcatcaggcccatctcccagtggttgtttttggcttgttctcccactaacgcttggcgactcacgagtcgagggtttctctcctgcgcggcggctacctctctccacggcggcggcgggcgatcctgcagatcccgcggctccctccgcgattcgagactcagatgggggaaggcacagagagcggcggcggggcgaccacagcgccgcctctgaggtatataaggtgctacaagtgcgggttctgcgacgtggtccggtccaagaagtgcttgctccgcgcccacgtgcttgagcaccacaaggatgaggtggatgctttggggggttactgggaaggtggagatgctggtccgcgcaaagagatcagccgtgcgtgcgaacagtgcgggatgagcttcaagaagcaggcgcatctgaagcaacatatgcagagccattcgctcgagatacagatgtgtgaagcattggatctcaaagaactccaaaatgcgagaaggccttgaacggactagtaccaggatggggagaccctcctgagaagctccatcaagagttccttcattcacgctattcttcaggttgtgtgttctgagctattctgagctgcttgctgctttttttgttattatgttcctgtcacatgacatatgctaaaggtctagtctgagattgcgatgccacttttttcaacaagttgggcgtctgctgttctagtcatatttgataattgatgaatttacactgcaatgctgtttgagtatatctagctgtcaccgtttgatggccctcattattgacaggatagatttagcaggcatagagagacacaattcctgttctgcatagtttatgtgctcgactttagttatgtgttcactgaaatgattggatcatgatcttccttagttgaattatacatttcatgcaaaaatcaaattaattttcatttgaaggtgagttatgcggatacggtgtgctgctatttgcccctgtatttggggactggtgtacgacatttgatttgctggtttttgtaggcaatttgttgacatatgaatgcgtgaagcattggatcccaaagaactccaaaatgcgataaggccttgaatggactagtatcaggattgggagaccatcctgagaagctccatcaagcatgccttgttcacgcgtttcttaagaggcccttttcctgcactgttgatggttgcccctttagctatagcaggaaggatcatttgaacagacatttacttactcatgaagggaaactatttgtgtgccctgtcgaaggatgtggccgtaagttcaatatcaagggtaatatgcagagacatgttcaggaaatccacaaagatgtctctccttgtgaaagcaagaaagaattcatctgtccaaaggttaactgtgggaaggctttcaaatatgcttctaagttaaagaagcacgaagaatcacatgtccagctggaatacacagaagttatgtgctgtgagccaggctgcatgaagttcttttcaaacatggaatgcctgaaggcgcataaccaatcttgccatcaatatgttcagtgtgatatctgtggtacgaaacagctaaagaagaatttccagcgccatcatcggatgcatgaaggttcctgcgtcactgagagggttaaatgccacatcgaggactgcaaatgttcgttctcgaagaaatccaatttggacaagcatgttaaggcggtacatgagcagcgtcgtccttttgtgtgccaattctctgggtgtggcaagaggttttcttacaagcacgtaagggacaatcatgagaagtcaagcgctcatgtgcacactgagggtgattttgtcgaggctgatgagcagcggccacgttcagtaggtgggtgcaagaggaaacccgtatctgttgagagtttgatgcgtaagagggtagccgctcctgacgatgggcctgctcatgctgatgcaactgaatatttgagatggcttctgtcggtttgattggacgttcaagtgcactttgtgtagttggaaacatcagcgatttacttggcatgtataggaagatgaatgtctctagtatgttatgtaaatgtttatgtacggtatcagaaatacagatcattggacctcaattataaaggcaatatgctgtattggcaagatcttgaatgtaagagcggttgctcatgatcattagatctatgtgtcttcagcacagcttggcaacatgttttggtatgttcgcagttgcagtgtctttgcctttttttgcctcctgctggttgcaggtgaaaattggattcatgattcttgaatgctcttatgtaacaacaaaaatatctgttcagttctcattgtgcagaaccacagcactcttcattccgatttgcagatgcacgtgaccaaaaaagataatttgcagatgcaccatgaacccgtggcaccagatgcccgtcagcagctggcacccgtccagctcgcgccggagagcctccaggcggaccagctccgccgccccgcggatcgattggactagcgacgaggccgagatgcgcacggacgtcatcggcggcggcgatggctcttctgcctcggaactcggatgcctcagtgtgcgtgcgcgtgtcagtgtgatctcttgcctccaatggatcgcgtgc

SEQ ID NO: 3833 - DNA, 1474 bp, Zea Mays
gcccagtttgcgaggacgatgcgggcgcacgcagcggcatcgcaggacgcagcaaagccctgaaaccgcccccacgtccccctccccgcaccgcagagccagtcagaacagtaacaccggagcggcagctgcagtggccgaggccggagcacgcaaggcatggatagataccaaagggtagagaagcctcggaatgacacaccaatcagccagaatgagattaggattactactcaggggaggatgaggaactatatcagctatgggatgtcgctgcttgaggaaaatggacacgatgagattagtatcaaggccatgggacaggccataaataagacagttatggttgttgaattgattaagagaagggttggaggtcttcatcagaacagtgccactgaatctgttgatatcacagacacatgggaacctttggaagaaggccttctcccactagagacaactcgccatgtgtcgatgatcactgtgacgttatcaaagaagcctctggatacatcatctccaggataccaaccacctatcccagctgaagaagtgaaacctgcttttgactatgaccatgaagattcgtatcctactggccgtggaagaggacgtggtggtgggagaagaggcaggggaagaggtatatgtatgagcaatggtccctctccacccgcttatggttacaatgaagagtggggtgaggaaggagattactataatagagggcgtgggagaggaaggtcacgtggacgaggcagagtgcgtggtggctactatggaggcgggaggcgtggtggctacagttatggctatggtgcgagaggcgggtactatgaagagcaagacgaatactatgatgatcctgaagaatatgcccctccaggccgtcgtgggcgtggcagaggaagaagggggatgccttggcgtggccgtggagtctactactagacgatgcgatgcgatgcgatgcgatgcgacatgccaaacgggtgtgctgaagctagcaatggcgtgcttggttggttatctgttctatggagttccgacccagactagaattacccagcagggtccttccaggtgctgtgcctgtgcaactcgtctgggcaagttttgtggctcgctcgtggttttgtagctaggttaagcgagtgaagtttaatcactcggtagcagtgttttcccccttcggacggcatgcatgttgtttattttgctgctaatctacctaccttccaattttgtatggatggtgatggatactggatgcatcagtttcatatttttttttctcctggtaaatctgtagtttttataaagacggttacactgatacctgatgacaagatgaggcaggaagtttgttatgctgcagaataagagcagcatgaaaaaaaatgaatacagctatcgttgttagtgtactagcatttatcttagcgctagattagtttccagtataatcatc

SEQ ID NO: 3834 - DNA, 2371 bp, Zea Mays
cttcaaccctccttccgtcttcctcctctagtcttacctcgttgcacctcaagaaacttggcgcgcaaccaggaaaccccctcttctctctctctctctctctctctctctctgccttctgattccaagctccccaactgcccagcaccaacctgccgaactcccctcctttttgttggtttgtcgaattataaattgagcccggccggctgactaccatgaagccgccatcactggtgcactgcttcaagctgctggtcctgctggcgctcgccaggctgaccatgcacgtccccgacgaggacatgctatcgcccctcggcgcgctgcgcctcgacggtcatttcagcttccatgacgtctccgccatggcgcgggacttcggcaaccagtgcagcttcctgccggccgccgtgctccacccaggctcggtctccgatatcgccgccaccgtgaggcacgtcttctccctgggcgagggctcgccgctcaccgtcgcggcgcgcgggcatggacactccctcatgggtcagtcccaggccgcccaggggatcgtggtcaggatggagtcgctccggggcgctaggctccaggtccacgacggctttgtcgatgcccccggaggagagctctggatcaatgtcctgcgtgagacgctgaagcacggcctggcacccaagtcgtggacggactatctccatctcacggtcggtggcaccttgtctaatgcgggggtcagcggccaggcgttccgccacggaccgcaggtcagcaatgtcaatcaactggagattgtgacaggaaggggagacgtcgttacctgctcacccgaggataactctgatctcttctatgctgctctcggcggtcttggtcagttcgggatcataaccagagcaaggattgcacttgagctcggattttgaaagcttcaccgaagaccaggagatgttgatcatggcagagaactcctttgactacattgaaggttttgtcatcataaacaggacaggcatcctcaacaactggagggcgtccttcaagccacaggacccagtccaagcaagccatttccagtcagatggaagagtgctatactgcctcgaactaaccaagaacttcaatagtggcgacactgataccatggaacaggaagttgctgtactgctatctcggcttagattcatacagtctactctattccacaccgatgtcacgtacctggagtttttggacagggtgcacacctctgagctgaagctgagggcacaaagcctctgggaagttccacacccttggttgaatcttctgataccgaggagctcaatccgcagatttgctacggaagtctttggcaggatcctgaaagatagcaacaatggtcctatattgctttatccagtgaacaaatcaaagtgggacaacaaaacgtcagtggtcataccagatgaggaaattttctacctagtgggattcctttcttcagcaccgtctctctcaggtcacggcagcattgcacatgcgatgagcctgaacagccaaatagtagagttctgtgaagaggctgatattgggatgaaacagtatctagcacactacaccacacaggagcagtggaaaacccactttggagcaaggtgggagacatttgaacggaggaaacacagatatgatcccctagccatcctagcaccaggacagagaatattcccaaaggcgtcactcccattgtctttgtgacggttcctgctatttaaaggcttctgtagagcatacattgtacaaaagtgtaggtaaaagtatcccctgtaaagacaatatctacggaaggtagctagcctgaagaacacagcatagcgactttttcagtggccaaagatacctcaaagcagtacttcaatgtggagcaacgtcacctgaaccctgaaggtggtgagtgcaactttggaggcaatcactggtagtggagcctggagggttgtagcggtccaaggaacctgtctgttgttacagcgttgagatgagctgtgctgatcaactgatcactaaccagtgtcccgaggaaatcatgttggtctgtatgtattttccgttaacaacagtgcagaagtttgcatgagggtagtgcattgattagcaaatagcactgcctgttatttcacttgtaactggcatctcatctcaaggagagcctgcgtaactgtagcaggttatattgttttccatgagtcagaaactcagaatattaatgctcgtgcaaaaacagtgtagtcgcttatcaatcatggtgttcagaaacagaaaaactcttggaattctctcaacttgttcattaaatgttagcaacctatagtgtgagcttggataacaa
